United States Patent Application Publication US 2021/0260178 A1 - sequence listing, part 22

SEQ ID NO: 36240 - RNA, 1655 nt, Artificial Sequence
  mRNA product Design i-3 (hSL-A64-N5) comprising derived and/or modified sequence from LASV(Lassa virus/H.sapiens-wt/NGA/2016/ISTH_0009;Clade II)__AVO03571__GPCmut9 (opt5)
aggagaaagcuuaccaugggccagaucauuaccuucuuucaagaggugccccacgucaucgaagagguuaugaacauugugcugaucgcccucagccugcuugcuauucugaaggggaucuacaauguggccacaugcggacuccugggccuugucuccuuccugcuccugugugggagaucuugcagcacgaccuauaaaggaguguacgaacugcagacacucgagcuggacauggcgucccuuaacaugaccaugccucugucuuguacaaagaauaacagccaucacuauaucaugguuggcaaugaaaccgggcucgagcugacacuuaccaacacguccauuaucaaucauaaauuuugcaaccugucugaugcucacaagaaaaaucucuacgaccaugcccugaugagcauuaucuccaccuuccaccugagcauuccgaacuuuaaucaguaugaggccaugucuugugauuucaacggaggccggaucuccgugcaguacaaucucagccacucuuaugcugucgacgccgcuaaccauugcggcacaauugccaauggggugcugcaaaccuuuaugcgcauggcguggggaggcuccuacaucgcccuugauagcggguguggaucuugggacugcaucaugacauccuaccaguaucugauuauccagaacaccacgugggaagaucacugucaguucagcagacccuccccuauuggcuaccucgggcugcuuucucaacggacacgcgacaucuauauuagcagacggcugcucggaaccuuuacauggacccuguccgauagcgagggcaacgaaacccccggcggguacugccugacacgcuggaugcucaucgaggcugagcugaaguguuucggaaauacggccguugcuaagugcaacgaaaaacaugacgaggaauuuugcgauaugcuuagacuguucgacuuuaauaagcaggccauccggcgccucaaaaccgaggcgcagaugucuauucagcugaucaacaaggccgugaaugcucuuauuaacgaucaacugaucaugaaaaaucaccucagagacauuauguguaucccuuauugcaacuacuccaaguauugguaccugaaucacacagucaccggcaagacaagccugccccgguguuggcucgugucuaacgggagcuaccugaaugaaacccauuucuccgacgauaucgagcagcaggccgacaacaugauuacggagcuucugcaaaaagaauauaucgaucgccagggaaagacaccucucggccugguggaccuguucgucuuuucuaccagcuucuaccuuauuuccaucuuucuccaccugguuaaaauuccgacccauagacacaucacagggaagcccugcccuaaaccccaucggcugaaucacaugggaauuuguagcugcggccucuauaaccacccuggcgugcccgugaaguggaaacgcugaggacuaguuauaagacugacuagcccgaugggccucccaacgggcccuccuccccuccuugcaccgagauuaaucaaaggcucuuuucagagccaccaaaaaaaaaaaaaaaaaaaaaaaaaaaaaaaaaaaaaaaaaaaaaaaaaaaaaaaaaaaaaaaaagaauu

SEQ ID NO: 36241 - RNA, 1655 nt, Artificial Sequence
  mRNA product Design i-3 (hSL-A64-N5) comprising derived and/or modified sequence from LASV(Lassa virus/H.sapiens-wt/NGA/2016/ISTH_0017;Clade II)__AVO03567__GPCmut9 (opt5)
aggagaaagcuuaccaugggccagaucauuaccuucuuucaagaggugccccacgucaucgaagagguuaugaacauugugcugaucgcccucagccugcuugcuauucugaaggggaucuacaauguggccacaugcggacucuucggccuggucuccuuucuucugcucugugggagaucuugcagcacgaccuauaaaggaguguacgaacugcagacacuggagcucgacauggcgucccugaacaugaccaugccucuuucuuguacaaagaauaacagccaucacuauaucaugguuggcaaugaaaccgggcuggagcucacacugaccaacacguccauuaucaaucauaaauucugcaaccuuucugaugcucacaagaaaaaucuguacgaccaugcccucaugagcauuaucuccaccuuucaccugagcauuccgaacuucaaucaguaugaggccaugucuugugauuuuaacggaggcaagaucuccgugcaguacaaucugagccacacauaugcuauugacgccgcuaaccauugcggcaccaucgccaaugggguccuccaaacauucaugcggauggcguggggaggcucuuacaucgcccuggauuccggguguggaagcugggacugcauuaugaccucuuaccaguaucuuaucauucagaacacgacaugggaagaucacugucaguuuucccgccccagcccuaucggcuaccuggggcuccugucccaaagaacccgggacauuuauaucucucgcagacuucugggaacauucaccuggacccucagcgauuccgagggcaacgaaacacccggcggguacugccugacgcgguggaugcugaucgaggcugagcucaaguguuuuggaaauaccgccguggcuaaaugcaacgaaaagcaugacgaggaguucugcgauaugcugcgccuuuuugacuucaauaaacaggccauuagacggcugaagacagaagcgcagaugagcauccagcucauuaacaaagccguuaaugcucugaucaacgaucaacuuauuaugaagaaucaucugcgcgacaucauguguaucccuuauugcaacuacucuaaguauugguaccucaaucacaccgugacaggcaaaaccucccugcccagauguuggcuggucagcaacgggucuuaccucaaugaaacgcacuucagcgacgauauugagcagcaggccgacaacaugaucacagagcugcuucaaaaggaauauauggaucggcagggaaaaaccccucugggccucguggaccuguuuguguucuccaccucuuuuuaccugauuagcaucuuccuucaccucguccgcauuccgacacauagacacguuaucgggaagcccugcccuaaaccccaucggcugaaucacaugggaauuuguuccugcggccuguauaagcacccuggcgugcccgugaaauggaagcgcugaggacuaguuauaagacugacuagcccgaugggccucccaacgggcccuccuccccuccuugcaccgagauuaaucaaaggcucuuuucagagccaccaaaaaaaaaaaaaaaaaaaaaaaaaaaaaaaaaaaaaaaaaaaaaaaaaaaaaaaaaaaaaaaaagaauu

SEQ ID NO: 36242 - RNA, 1655 nt, Artificial Sequence
  mRNA product Design i-3 (hSL-A64-N5) comprising derived and/or modified sequence from LASV(Lassa virus/H.sapiens-wt/NGA/2018/ISTH_0959;Clade II)__AVV65099__GPCmut9 (opt5)
aggagaaagcuuaccaugggccagaucauuaccuucuuucaagaggugccccacgucaucgaagagguuaugaacauugugcugaucgcccucagccugcuugcuauucugaaggggaucuacaauguggucacaugcggacucuucggccugguguccuuucuucugcucugugggagaucuugcagcacgaccuauaaaggaguuuacgaacugcagacacuggagcucgacauggccucccugaacaugaccaugccucuuucuuguacaaagaauaacagccaucacuauaucauggugggcaaugaaaccgggcuggagcucacacugaccaacacguccauuaucaaucauaaauucugcaaccuuucugaugcgcacaagaaaaaucuguacgaccaugcucucaugagcauuaucuccaccuuucaccugagcauuccgaacuucaaucaguaugaggccaugucuugugauuuuaacggaggcaagaucuccguccaguacaaucugagccacgccuaugcuauugacgccgcuaaccauugcggcacaaucgccaauggggugcuccaaaccuucaugcggauggcguggggaggcucuuacaucgcccuggauuccggguguggaagcugggacugcauuaugacaucuuaccaguaucuuaucauucagaacaccacgugggaagaucacugucaguuuucccgccccagcccuaucggcuaccuggggcuccugucccaaagaacacgggacauuuauaucucucgcagacuucugggaaccuucacauggacccucagcgauuccgagggcaacgaaacccccggcggguacugccugacacgguggaugcugaucgaggcugagcucaaguguuuuggaaauacggccguugcuaaaugcaacgaaaagcaugacgaggaguucugcgauaugcugcgccuuuuugacuucaauaaacaggccauuagacggcugaagaccgaagcgcagaugagcauccagcucauuaacaaagccgugaaugcucugaucaacgaucaacuuauuaugaagaaucaucugcgcgacaucauguguaucccuuauugcaacuacucuaaguauugguaccucaaucacacagucaccggcaaaacaucccugcccagauguuggcuggugagcaacgggucuuaccucaaugaaacccacuucagcgacgauauugagcagcaggccgacaacaugaucacggagcugcuucaaaaggaauauauugaucggcagggaaaaacaccucugggccucguggaccuguuugucuucuccaccucuuuuuaccugaucagcauuuuccuucaccucguuaagaucccgacccaucgccacgugauugggaaacccugcccuaagccccauagacugaaucacaugggaaucuguuccugcggccuguauaaacacccuggcgugcccgucaaguggaagcggugaggacuaguuauaagacugacuagcccgaugggccucccaacgggcccuccuccccuccuugcaccgagauuaaucaaaggcucuuuucagagccaccaaaaaaaaaaaaaaaaaaaaaaaaaaaaaaaaaaaaaaaaaaaaaaaaaaaaaaaaaaaaaaaaagaauu

SEQ ID NO: 36243 - RNA, 1655 nt, Artificial Sequence
  mRNA product Design i-3 (hSL-A64-N5) comprising derived and/or modified sequence from LASV(LASV003-NIG-2008;Clade II)__AIT17580__GPCmut9 (opt5)
aggagaaagcuuaccaugggccagaucauuaccuucuuucaagaggugccccacgucaucgaagagguuaugaacauugugcugaucgcccucagccugcuugcuauucugaaggggaucuacaauguggccacaugcggacucuucggccuggucuccuuucuucugcucugugggagaucuugcagcacgaccuauaaaggaguguacgaacugcagacacuggagcucgacauggcgucccugaacaugaccaugccucuuucuuguacaaagaauaacagccaucacuauaucaugguuggcaaugaaaccgggcuggagcucacacugaccaacacguccauuaucaaucauaaauucugcaaccuuucugaugcucacaagaaaaaucuguacgaccaugcccucaugagcauuaucuccaccuuucaccugagcauuccgaacuucaaucaguaugaggccaugucuugugauuuuaacggaggcaagaucuccgugcaguacaaucugagccacacauaugcugucgacgccgcuaaccauugcggcaccauugccaauggggugcuccaaacauucaugcggauggcguggggaggcucuuacaucgcccuggauuccggguguggaagcugggacugcaucaugaccucuuaccaguaucuuauuauccagaacacgacaugggaagaucacugucaguuuucccgccccagcccuauuggcuaccuggggcuccugucccaaagaacccgggacaucuauauuucucgcagacuucugggaacauucaccuggacccucagcgauuccgagagcaacgaaacacccggcggcuacugccugacgcgguggaugcugaucgaggcugagcucaaguguuuugggaauaccgccguugcuaaaugcaacgaaaagcaugacgaggaguucugcgauaugcugcgccuuuuugacuucaauaaacaggccaucagacggcugaaggcggaagcccagaugucuauucagcucaucaacaaagcugugaaugcccugauuaacgaucaacuuaucaugaagaaucaucugcgcgacauuauguguaucccuuauugcaacuacuccaaguauugguaccucaaucacacagucaccggaagaacaagccugccccgguguuggcuggugucuaacggcagcuaccucaaugaaacccacuucuccgacgauaucgagcagcaggcugacaacaugauuacggagcugcuucaaaaagaauauauggaucgccaggggaagacaccucugggacucguggaccuguuugucuucucuaccagcuuuuaccugaucuccauuuuccuucaccucguuaaaaucccgacccauagacacgugauuggcaagcccugcccuaaaccccaucggcugaaucacauggggaucuguagcugcggacuguauaagcacccuggcgugcccgucaaauggaagcgcugaggacuaguuauaagacugacuagcccgaugggccucccaacgggcccuccuccccuccuugcaccgagauuaaucaaaggcucuuuucagagccaccaaaaaaaaaaaaaaaaaaaaaaaaaaaaaaaaaaaaaaaaaaaaaaaaaaaaaaaaaaaaaaaaagaauu

SEQ ID NO: 36244 - RNA, 1655 nt, Artificial Sequence
  mRNA product Design i-3 (hSL-A64-N5) comprising derived and/or modified sequence from LASV(LASV035-NIG-2009;Clade II)__AIT17588__GPCmut9 (opt5)
aggagaaagcuuaccaugggccagaucauuaccuucuuucaagaggugccccacgucaucgaagagguuaugaacauugugcugaucgcccucagccugcuugcuauucugaaggggaucuacaauguggccacaugcggacucuucggccuggucuccuuucuucugcucugugggagaucuugcagcacgaccuauaaaggaguguacgaacugcagacacuggagcucgacauggcgucccugaacaugaccaugccucuuucuuguacaaagaauaacagccaucacuauaucaugguuggcaaugaaaccgggcuggagcucacacugaccaacacguccauuaucaaucauaaauucugcaaccuuucugaugcucacaagaaaaaucuguacgaccaugcccucaugagcauuaucuccaccuuucaccugagcauuccgaacuucaaucaguaugaggccaugucuugugauuuuaacggaggcaagaucuccgugcaguacaaucugagccacgcuuaugccgucgacgcugccaaccauugcggcacaauugcgaauggggugcuccaaaccuucaugcggauggccuggggaggcucuuacaucgcucuggauuccggguguggaagcugggacugcaucaugacaucuuaccaguaucuuauuauccagaacaccacgugggaagaucacugucaguuuucccgccccagcccuauuggcuaccuggggcuccugucccaaagaacacgggacaucuauauuucucgcagacuucugggaaccuucacauggacccucagcgauuccgagggcaacgaaacccccggcggguacugccugacacgguggaugcugaucgaggccgagcucaaguguuuuggaaauacggcuguugccaaaugcaacgaaaagcaugacgaggaguucugcgauaugcugcgccuuuuugacuucaauaaacaggcgaucagacggcugaaggccgaagcucagaugagcauucagcucaucaacaaagccgugaaugcucugauuaacgaucaacuuaucaugaagaaucaucugcgcgacauuauguguaucccuuauugcaacuacucuaaguauugguaccucaaucacaccgucacaggcaaaaccucccugcccagauguuggcuggugagcaacgggucuuaccucaaugaaacacacuucagcgacgauaucgagcagcaggccgacaacaugauuaccgagcugcuucaaaaggaauauaucgaucggcagggaaaaacgccucugggccucguggaccuguuugucuucuccacaucuuuuuaccugauuagcaucuuccuucaccucguuaagauuccgacccaucgccacgugaucgggaaacccugcccuaagccccauagacugaaucacaugggaauuuguuccugcggccuguauaaacacccuggcgugcccgucaaguggaagcggugaggacuaguuauaagacugacuagcccgaugggccucccaacgggcccuccuccccuccuugcaccgagauuaaucaaaggcucuuuucagagccaccaaaaaaaaaaaaaaaaaaaaaaaaaaaaaaaaaaaaaaaaaaaaaaaaaaaaaaaaaaaaaaaaagaauu

SEQ ID NO: 36245 - RNA, 1655 nt, Artificial Sequence
  mRNA product Design i-3 (hSL-A64-N5) comprising derived and/or modified sequence from LASV(LASV1000-NIG-2009;Clade II)__AIT17782__GPCmut9 (opt5)
aggagaaagcuuaccaugggccagaucauuaccuucuuucaagaggugccccacgucaucgaagagguuaugaacauugugcugaucgcccucagccugcuugcuauucugaaggggaucuacaauguggccacaugcggacucuucggccuggucuccuuucuucugcucugugggagaucuugcagcacgaccuauaaaggaguguacgaacugcagacacuggagcucgacauggcgucccugaacaugaccaugccucuuucuuguacaaagaauaacagccaucacuauaucaugguuggcaaugaaaccgggcuggagcucacacugaccaacacguccauuaucaaucauaaauucugcaaccuuucugaugcucacaagaaaaaucuguacgaccaugcccucaugagcauuaucuccaccuuucaccugagcauuccgaacuucaaucaguaugaggccaugucuugugauuuuaacggaggcaagaucuccgugcaguacaaucugagccacacauaugcugucgacgccgcuaaccauugcggcaccauugccaauggggugcuccaaacauucaugcggauggcguggggaggcucuuacaucgcccuggauuccggguguggaagcugggacugcaucaugaccucuuaccaguaucuuauuauccagaacacgacaugggaagaucacugucaguuuucccgccccagcccuauuggcuaccuggggcuccugucccaaagaacccgggacaucuauauuucucgcagacuucugggaacauucaccuggacccucagcgauuccgagggcaacgaaacacccggcggguacugccugacgcgguggaugcugaucgaggcugagcucaaguguuuuggaaauaccgccguugcuaaaugcaacgaaaagcaugacgaggaguucugcgauaugcugcgccuuuuugacuucaauaaacaggccaucaagagacugaaaacagaagcgcagaugagcauucagcucaucaacaaggccgugaaugcucugauuaacgaucaacuuaucaugaagaaucaucugcgggacauuauguguaucccuuauugcaacuacucuaaauauugguaccucaaucacaccgucacaggcaagaccucccugccccgcuguuggcuggugagcaacgggucuuaccucaaugaaacgcacuucagcgacgauaucgagcagcaggccgacaacaugauuacagagcugcuucaaaaagaauauaucgauagacagggaaagaccccucugggccucguggaccuguuugucuucuccaccucuuuuuaccugauuagcaucuuccuucaccucguuaaaauuccgacacaucggcacgugguggggaagcccugcccuaaaccccaucgccugaaucacaugggaaucuguuccugcggccuguauaagcacccuggcguccccgugaaguggaaaagaugaggacuaguuauaagacugacuagcccgaugggccucccaacgggcccuccuccccuccuugcaccgagauuaaucaaaggcucuuuucagagccaccaaaaaaaaaaaaaaaaaaaaaaaaaaaaaaaaaaaaaaaaaaaaaaaaaaaaaaaaaaaaaaaaagaauu

SEQ ID NO: 36246 - RNA, 1655 nt, Artificial Sequence
  mRNA product Design i-3 (hSL-A64-N5) comprising derived and/or modified sequence from LASV(LASV221-NIG-2010;Clade II)__AIT17624__GPCmut9 (opt5)
aggagaaagcuuaccaugggccagaucauuaccuucuuucaagaggugccccacgucaucgaagagguuaugaacauugugcugaucgcccucagccugcuugcuauucugaaggggaucuacaauguggccacaugcggacucuucggccuggucuccuuucuucugcucugugggagaucuugcagcacgaccuauaaaggaguguacgaacugcagacacuggagcucgacauggcgucccugaacaugaccaugccucuuucuuguacaaagaauaacagccaucacuauaucaugguuggcaaugaaaccgggcuggagcucacacugaccaacacguccauuaucaaucauaaauucugcaaccuuucugaugcucacaagaaaaaucuguacgaccaugcccucaugagcauuaucuccaccuuucaccugagcauuccgaacuucaaucaguaugaggccaugucuugugauuuuaacggaggcaagaucuccgugcaguacaaucugagccacacauaugcuauugacgccgcuaaccauugcggcaccaucgccaaugggguccuccaaacauucaugcggauggcguggggaggcucuuacaucgcccuggauuccggguguggaagcugggacugcauuaugaccucuuaccaguaucuuaucauucagaacacgacaugggaagaucacugucaguuuucccgccccagcccuaucggcuaccuggggcuccugucccaaagaacccgggacauuuauaucucucgcagacuucugggaacauucaccuggacccucagcgauuccgagggcaacgaaacacccggcggguacugccugacgcgguggaugcugaucgaggcugagcucaaguguuuuggaaauaccgccguggcuaaaugcaacgaaaagcaugacgaggaguucugcgauaugcugcgccuuuuugacuucaauaaacaggccauuagacggcugaagacagaagcgcagaugagcauccagcucauuaacaaagccguuaaugcucugaucaacgaucaacuuauuaugaagaaucaucugcgcgacaucauguguaucccuuauugcaacuacucuaaguauugguaccucaaucacaccgugacaggcaaaaccucccugcccagauguuggcuggucagcaacgggucuuaccucaaugaaacgcacuucagcgacgauauugagcagcaggccgacaacaugaucacagagaugcugcaaaaggaauauauggaucggcagggaaaaaccccucuuggccugguggaccucuuuguguucuccaccucuuuuuaccugauuagcaucuuccugcaccuugucaagauuccgacacaucgccacguuaucgggaaacccugcccuaagccccauagacucaaucacaugggaauuuguuccugcggccuguauaaacacccuggcgugcccgugaaguggaagcggugaggacuaguuauaagacugacuagcccgaugggccucccaacgggcccuccuccccuccuugcaccgagauuaaucaaaggcucuuuucagagccaccaaaaaaaaaaaaaaaaaaaaaaaaaaaaaaaaaaaaaaaaaaaaaaaaaaaaaaaaaaaaaaaaagaauu

SEQ ID NO: 36247 - RNA, 1655 nt, Artificial Sequence
  mRNA product Design i-3 (hSL-A64-N5) comprising derived and/or modified sequence from LASV(LASV237-NIG-2010;Clade II)__AIT17638__GPCmut9 (opt5)
aggagaaagcuuaccaugggccagaucauuaccuucuuucaagaggugccccacgucaucgaagagguuaugaacauugugcugaucgcccucagccugcuugcuauucugaaggggaucuacaauguggccacaugcggacucuucggccuggucuccuuucuucugcucugugggagaucuugcagcacgaccuauaaaggaguguacgaacugcagacacuggagcucgacauggcgucccugaacaugaccaugccucuuucuuguacaaagaauaacagccaucacuauaucaugguuggcaaugaaaccgggcuggagcucacacugaccaacacguccauuaucaaucauaaauucugcaaccuuucugaugcucacaagaaagaccuguacgaucaugcccucaugagcauuaucuccaccuuucaccugagcauuccgaauuucaaccaguaugaggccaugucuugugacuuuaauggaggcaagaucuccgugcaguacaaccugagccacacauaugcugucgaugccgcuaaucauugcggcaccauugccaacggggugcuccaaacauucaugcggauggcguggggaggcucuuacaucgcccuggacuccggguguggaagcugggauugcaucaugaccucuuaccaguaucuuauuauccagaauacgacaugggaagaccacugucaguuuucccgccccagcccuauuggcuaccuggggcuccugucccaaagaacccgggauaucuauauuucucgcagacuucugggaacauucaccuggacccucagcgacuccgagggcaacgaaacacccggcggguacugccugacgcgguggaugcugaucgaggcugagcucaaguguuuuggaaacaccgccguugcuaaaugcaaugaaaagcaugaugaggaguucugcgacaugcugcgccuuuuugauuucaacaaacaggccaucagacggcugaagacagaagcgcagaugagcauucagcucaucaauaaagccgugaacgcucugauuaaugaccaacuuaucaugaagaaccaucugcgcgacauuauguguaucccuuauugcaauuacucuaaguauugguaccucaaccacaccgucacaggcaaaaccucccugcccagauguuggcuggugagcaaugggucuuaccucaacgaaacgcacuucagcgaugacaucgagcagcaggccgauaauaugauuacagagcugcuucaaaaggaauauauggaccggcagggaaaaaccccucugggccucguggaucuguuugucuucuccaccucuuuuuaccugaucagcauuuuccuucaccucaucaagauuccgacacaucgccacaucaccgggaaacccugcccuaagccccauagacugaaccacaugggaauuuguuccugcggccuguauaaacacccuggcguucccgugaaguggaagcggugaggacuaguuauaagacugacuagcccgaugggccucccaacgggcccuccuccccuccuugcaccgagauuaaucaaaggcucuuuucagagccaccaaaaaaaaaaaaaaaaaaaaaaaaaaaaaaaaaaaaaaaaaaaaaaaaaaaaaaaaaaaaaaaaagaauu

SEQ ID NO: 36248 - RNA, 1655 nt, Artificial Sequence
  mRNA product Design i-3 (hSL-A64-N5) comprising derived and/or modified sequence from LASV(LASV253-NIG-2011;Clade II)__AIT17670__GPCmut9 (opt5)
aggagaaagcuuaccaugggccagaucauuaccuucuuucaagaggugccccacgucaucgaagagguuaugaacauugugcugaucgcccucagccugcuugcuauucugaaggggaucuacaauguggccacaugcggacucuucggccuggucuccuuucuucugcucugugggagaucuugcagcacgaccuauaaaggaguguacgaacugcagacacuggagcucgacauggcgucccugaacaugaccaugccucuuucuuguacaaagaauaacagccaucacuauaucaugguuggcaaugaaaccgggcuggagcucacacugaccaacacguccauuaucaaucauaaauucugcaaccuuucugaugcucacaagaaaaaucuguacgaccaugcccucaugagcauuaucuccaccuuucaccugagcauuccgaacuucaaucaguaugaggccaugucuugugauuuuaacggaggcaagaucuccgugcaguacaaucugagccacacauaugcugucgacgccgcuaaccauugcggcaccauugccaauggggugcuccaaacauucaugcggauggcguggggaggcucuuacaucgcccuggauuccggguguggaagcugggacugcaucaugaccucuuaccaguaucuuauuauccagaacacgacaugggaagaucacugucaguuuucccgccccagcccuauuggcuaccuggggcuccugucccaaagaacccgggacaucuauauuucucgcagacuucugggaacauucaccuggacccucagcgauuccgagggcaacgaaacacccggcggguacugccugacgcgguggaugcugaucgaggcugagcucaaguguuuuggaaauaccgccguugcuaaaugcaacgaaaagcaugacgaggaguucugcgauaugcugcgccuuuuugacuucaauaaacaggccaucagacggcugaaggcggaagcccagaugagcauucagcucaucaacaaagcugugaaugcccugauuaacgaucaacuuaucaugaagaaucaucugcgcgacauuauguguaucccuuauugcaacuacucuaaguauugguaccucaaucacacagucaccggcagaacaucccugccccgguguuggcuggugagcaacgggucuuaccucaaugaaacccacuucagcgacgauaucgagcagcaggcugacaacaugauuacggagcugcuucaaaaagaauauaucgaucgccagggaaagacaccucugggccucguggaccuguuugucuucuccaccucuuuuuaccugauuagcaucuuccuucaccucguuaaaauuccgacccauagacacaucauugggaagcccugcccuaaaccccaucggcugaaucacaugggaaucuguuccugcggccuguauaagcacccuggcgugcccgugaaauggaagcgcugaggacuaguuauaagacugacuagcccgaugggccucccaacgggcccuccuccccuccuugcaccgagauuaaucaaaggcucuuuucagagccaccaaaaaaaaaaaaaaaaaaaaaaaaaaaaaaaaaaaaaaaaaaaaaaaaaaaaaaaaaaaaaaaaagaauu

SEQ ID NO: 36249 - RNA, 1655 nt, Artificial Sequence
  mRNA product Design i-3 (hSL-A64-N5) comprising derived and/or modified sequence from LASV(LASV254-NIG-2011;Clade II)__AIT17674__GPCmut9 (opt5)
aggagaaagcuuaccaugggccagaucauuaccuucuuucaagaggugccccacgucaucgaagagguuaugaacauugugcugaucgcccucagccugcuugcuauucugaaggggaucuacaauguggccacaugcggacucuucggccuggucuccuuucuucugcucugugggagaucuugcagcacgaccuauaaaggaguguacgaacugcagacacuggagcucgacaugaccaaccugaauaugacaaugccucuuuccuguaccaagaacaauucucaucacuauaucaugguuggcaacgaaacagggcuggagcucacccugacgaauaccagcauuaucaaccauaaauucugcaaucuuuccgaugcgcacaagaaaaaccuguacaaucaugcucucaugucuauuaucagcacauuucaccuguccauuccgaacuucaaucaguaugaggccaugagcugugacuuuaacggaggcaagaucucugugcaguacaaucugucccacagcuaugccgucgaugcugccaaccauugcggcaccauugcuaacggggugcuccaaacauucaugcggauggccuggggaggcucuuacaucgcgcuggacuccggguguggaaauugggauugcaucaugaccagcuaccaguaucuuauuauccagaacacgacaugggaagaccacugucaguuuucucgccccuccccuauuggcuaccuggggcuccugagccaaagaacccgggauaucuauauuucccgcagacuucugggaacauucaccuggacccucucugacagcgagggcaaugaaacacccggcggguacugccugacgcgguggaugcugaucgaggccgagcucaaguguuuuggaaacaccgcuguugccaaaugcaaugaaaagcaugaugaggaguucugcgacaugcugcgccuuuuugauuucaacaaacaggcuaucagacggcugaagacagaagcccaggcgaauauucagcucaucaacaaagccgugaaugcucugauuaacgaccaacuuaucaugaagaaucaucugcgcgauauuauguguaucccuuauugcaacuacuccaaguauugguaccucaaucacaccgucacaggcaaaaccagccugcccagauguuggcuggugucuaacggguccuaccucaaugaaacgcacuucagcgacgacaucgagcagcaggccgauaacaugauuacagagcugcuucaaaaggaauauauggaccggcagggaaaaaccccucugggccucguggaucuguuugucuucucuaccagcuuuuaccugaucuccauuuuccuucaccucguuaagaucccgacacaucgccacgugauugggaaacccugcccuaagccccauagacugaaccacaugggaaucuguucuugcggccuguauaaacacccuggcgugcccgucaaguggaagcggugaggacuaguuauaagacugacuagcccgaugggccucccaacgggcccuccuccccuccuugcaccgagauuaaucaaaggcucuuuucagagccaccaaaaaaaaaaaaaaaaaaaaaaaaaaaaaaaaaaaaaaaaaaaaaaaaaaaaaaaaaaaaaaaaagaauu

SEQ ID NO: 36250 - RNA, 1655 nt, Artificial Sequence
  mRNA product Design i-3 (hSL-A64-N5) comprising derived and/or modified sequence from LASV(Nig08-A19;Clade III)__ADU56618__GPCmut9 (opt5)
aggagaaagcuuaccaugggccagaucgugaccuucuuucaagaggucccccacguuauugaagaggugaugaacaucgugcugauugcccucagcauccuggcuauucuuaaggggcuguacaauaucgccacaugcggacucaucggccuggucacguuccuucugcucuccgggagaucuuguagcaugaccuauaaaggaguguacgaacugcagacacuggagcucaacaugaauacccugaacaugacaaugccucuuuccugcaccaagaauaacucucaucacuauauuaugguuggcaaugaaacagggcuggagcucacccugacgaacaccagccuucugcaucacaaauuuuguaaucucuccgacgcgcauaagaaaaaccuguacgaucacacacugaugucuaucauuagcaccuuccaccucuccaucccgaauuuuaaccaguaugaggcuaugagcugcgacuucaauggaggcaagauuacagugcaguacaaccugucucauuccuaugccaucgaugccgcuaaucacuguggcaccgucgccaacggggugcuucaaacguuuaugcggauggcuuggggaggcagcuacauugcccuggacucugggugcggaaagugggauuguaucaugacauccuaccaguaucucaucauucagaacaccacaugggaagaccauugccaguucagccgccccucuccuaucggcuaccuggggcuucugucccaaagaacccgggauauuuauaucagccgcagacuccugggaaccuuuacauggacgcuguccgacucugagggcaaugaaacccccggcggguacugucucacacgguggaugcugauugaggcggagcuuaaaugcuucggaaacaccgccguugcuaaguguaaugaaaaacacgaugaggaauuuugcgacaugcugcgccucuucgauuuuaacaagcaggccaucagacggcugaaagcugaggcccagaugagcauccagcuuauuaauaaggcggugaacgcccugaucaaugaccaacucauuaugaagaaccaucugcgcgauaucaugugcauuccuuauuguaauuacuccaaauauugguaccugaaccacacaagcaccggcagaacgucucucccccggugcuggcuggucuccaaugggagcuaccuuaacgaaacacacuucucugacgacaucgagcagcaggcugauaauaugaucaccgagaugcugcaaaaggaauaucucgaccgccagggaaaaaccccucugggccugguggaucuuuucguguuuagcacauccuucuaccucauuucuaucuuucugcaucuggucaagauuccgacccacagacauaucguugggaaacccuguccuaagccccaccggcucaaccacaugggaauuugcagcuguggccuguauaaacagccuggcgugcccgugcgcuggaagagaugaggacuaguuauaagacugacuagcccgaugggccucccaacgggcccuccuccccuccuugcaccgagauuaaucaaaggcucuuuucagagccaccaaaaaaaaaaaaaaaaaaaaaaaaaaaaaaaaaaaaaaaaaaaaaaaaaaaaaaaaaaaaaaaaagaauu

SEQ ID NO: 36251 - RNA, 1658 nt, Artificial Sequence
  mRNA product Design i-3 (hSL-A64-N5) comprising derived and/or modified sequence from LASV(G1180-SLE-2010;Clade IV)__AIT17168__GPCmut9 (opt5)
aggagaaagcuuaccaugggccagaucgugaccuucuuucaagaggucccccacguuauugaagaggugaugaacaucgugcugauugcccucagcauccuggcuguccuuaaggggcuguacaauuucgccacaugcggacucgugggccugcuuacguuucugcuccugugugggagauccugcaccgcgucucgguauaaaggaguuuacgaacugcagacacucgagcugaacauggaaacccuuaauaugacaaugccucugagcuguaccaagaacaauucccaucacuauauuauggugggcaacgagacagggcucgagcugacccuuacgaauaccucuaucaucaaccauaaauucugcaaucugagcgacgcucacaagaaaaaccucuacgaucaugcccugauguccauuaucucuacauuucaccugagcauuccgaauuucaaccaguaugaagccauguccugugacuuuaauggaggcaagaucagcguccaguacaaccucucucacuccuaugcuggcgaugccgcuaaucauugcgggaccguggccaacggaguucugcaaacauucaugcgcauggcguggggcgggagcuacauugcccuugacucuggauguggcuccugggauugcaucaugaccagcuaccaguaucugauuauccagaacacgacaugggaggaccacugucaguuuucuagacccuccccuaucggguaccucggacugcuuagccaacggacccgcgauauuuauaucuccagacggcugcucggcacauucaccuggacccugucugacagcgaaggcaaggauacacccgggggauacugccugacgcgcuggaugcucauugaggcugagcugaaauguuuuggcaauaccgccguggcuaagugcaacgaaaaacaugacgaggaguucugcgauaugcuuagacuguuugacuucaauaagcaggccauccagcggcucaaagcggaagcccagauguccauucaacugaucaacaaggcugucaaugcccuuaucaacgaucagcugauuaugaagaaucaccuccgcgacaucauguguauuccuuauugcaacuacagcaaauauugguaccugaaucacacaaccacagggaagaccucucugcccaaauguuggcucguguccaacggaagcuaccugaaugaaacgcauuucucugacgauaucgagcagcaagcugacaacaugauuacagagaugcuucagaaggaauauauggagagacagggcaaaaccccucuggggcucguggaucuguuugucuucagcaccuccuuuuaccugaucucuaucuuccuucaccucguuaagauuccgacacaucggcacaucgugggaaaaagcugccccaagccucaucgccugaaucacaugggcauuuguuccugcggccuguauaagcagcccggggugccugucaaauggaagagaugaggacuaguuauaagacugacuagcccgaugggccucccaacgggcccuccuccccuccuugcaccgagauuaaucaaaggcucuuuucagagccaccaaaaaaaaaaaaaaaaaaaaaaaaaaaaaaaaaaaaaaaaaaaaaaaaaaaaaaaaaaaaaaaaagaauu

SEQ ID NO: 36252 - RNA, 1658 nt, Artificial Sequence
  mRNA product Design i-3 (hSL-A64-N5) comprising derived and/or modified sequence from LASV(G1442-SLE-2011;Clade IV)__AIT17180__GPCmut9 (opt5)
aggagaaagcuuaccaugggccagaucgugaccuucuuucaagaggucccccacguuauugaagaggugaugaacaucgugcugauugcccucagcauccuggcuguccuuaaggggcuguacaauguggccacaugcggacucauuggccugguuacguuccuucugcucugugggagauccugcaccacaacccuguauaaaggaguguacgaacugcagacacucgagcugaacauggaaacccuuaauaugacaaugccucugucuuguaccaagaacaauagccaucacuauauccgggucggcaacgagacggggcucgagcugacccuuacaaauaccuccaucauuaaccauaaauuuugcaaucugucugacgcgcacaagaaaaaccucuacgaucaugcucugaugagcaucauuuccacauuccaccugucuaucccgaauuuuaaccaguaugaagccaugagcugugacuucaauggaggcaagauuuccgugcaguacaaccucagccacucuuaugccggcgaugcugccaaucauugcgggaccguugcuaacggagugcugcaaacguuuaugcgcauggccuggggcggguccuacaucgcgcuugacagcggauguggcaacugggauugcauuaugacaucuuaccaguaucugaucauccagaauaccacaugggacgaucacugucaguucuccagacccagcccuauuggguaccucggacugcuuucucaacggacccgcgacgucuauaucuccagacggcugcucggcaccuuuacauggacgcugagcgauuccgagggcaaggacacccccgggggauacugccugacacgcuggaugcucauugaagccgagcugaaauguuucggcaacaccgcuguggccaagugcaaugagaaacaugaugaagaguuuugcgacaugcuuagacuguucgauuuuaacaagcaggcuauccagcggcucaaagccgaagcgcagaugucuauucaacugaucaauaaggccgugaacgcucuuaucaaugaccagcugauuaugaagaaccaccuccgcgacaucauguguauuccuuauugcaauuacagcaaauauugguaccugaacaauacagccaccgggaagacgucccugcccaaauguuggcucaucagcaacggaucuuaccugaaugagacacacuucuccgaugacauugaacaggaggcugauaacaugaucaccgagaugcuucaaaaggaauauauggagagacagggcaaaaccccucuggggcucgucgaccuguucguuuuuagcacaucuuucuaccugaucagcauuuuucuucaucucgugaagaucccgacccaccggcauauugugggaaaauccugccccaagccucaccgccugaaucauaugggcaucuguucuugcggccuguauaagcagcccggggucccugugagauggaaacggugaggacuaguuauaagacugacuagcccgaugggccucccaacgggcccuccuccccuccuugcaccgagauuaaucaaaggcucuuuucagagccaccaaaaaaaaaaaaaaaaaaaaaaaaaaaaaaaaaaaaaaaaaaaaaaaaaaaaaaaaaaaaaaaaagaauu

SEQ ID NO: 36253 - RNA, 1658 nt, Artificial Sequence
  mRNA product Design i-3 (hSL-A64-N5) comprising derived and/or modified sequence from LASV(G3010-SLE-2013;Clade IV)__AIT17344__GPCmut9 (opt5)
aggagaaagcuuaccaugggccagaucgugaccuucuuucaagaggucccccacguuauugaagaggugaugaacaucgugcugauugcccucagcauccuggcuguccuuaaggggcuguacaauuucgccacaugcggacucgugggccugguuacguuucuucugcucugugggagauccugcaccacaucucuguauaaaggaguguacgaacugcagacccucgagcugaacauggaaacacuuaauaugaccaugccucugagcuguacaaagaacaauucccaucacuauauuauggucggcaacgagaccgggcucgagcugacgcuuaccaauacaucuaucaucaaccauaaauucugcaaucugagcgacgcgcacaagaaaaaccucuacaaucaugcucugauguccauuaucucuaccuuucaccugagcauuccgaacuucaaucaguaugaagccauguccugugauuuuaacggaggcaagaucagcgugcaguacaaucucucucacuccuaugccggcgacgcugccagccauugcgggacaguugcuaacggagugcugcaaaccuucaugcggauggccuggggcgggucuuacauugcgcuugauuccggauguggcaagugggacugcaucaugacgagcuaccaguaucugauuauccagaacacaaccugggaggaucacugucaguuuucucgccccuccccuaucggguaccucggacugcuuagccaaagaacacgggacauuuauaucucccgcagacugcucggcaccuucaccuggacacugucugauagcgaaggcaaagacacgcccgggggauacugccugacccgguggaugcucauugaggccgagcugaaguguuuuggcaauacagcugucgccaaaugcaacgaaaagcaugaugaggaguucugcgacaugcuucgccuguuugauuucaauaaacaggcuauccagagacucaagaccgaagcccagauguccauucaacugaucaacaaggcggugaaugcccuuaucaacgaccagcugauuaugaaaaaucaccuccgggauaucauguguauuccuuauugcaacuacagcaaguauugguaccugaaucacacaaccacggggaaaacaucucugcccaaguguuggcucguguccaacggaagcuaccugaaugaaacccauuucucugacgacaucgagcagcaagcugauaacaugauuaccgagaugcuucagaaagaauauauggagcgccagggcaagacaccucuggggcucgucgaccuguuuguuuucagcaccuccuuuuaccugaucucuaucuuccuucaccucgugaaaauuccgacacauagacacaucgugggaaagagcugccccaagccucaucggcugaaucacaugggcauuuguuccugcggccuguauaaacagcccggggucccugugcgcuggaagagaugaggacuaguuauaagacugacuagcccgaugggccucccaacgggcccuccuccccuccuugcaccgagauuaaucaaaggcucuuuucagagccaccaaaaaaaaaaaaaaaaaaaaaaaaaaaaaaaaaaaaaaaaaaaaaaaaaaaaaaaaaaaaaaaaagaauu

SEQ ID NO: 36254 - RNA, 1658 nt, Artificial Sequence
  mRNA product Design i-3 (hSL-A64-N5) comprising derived and/or modified sequence from LASV(G502-SLE-2009;Clade IV)__AIT17126__GPCmut9 (opt5)
aggagaaagcuuaccaugggccagaucgugaccuucuuucaagaggucccccacguuauugaagaggugaugaacaucgugcugauugcccucagcauccuggcuguccuuaaggggcuguacaauuucgccacaugcggacucgugggccugcuuacguuucugcuccugugugggagauccugcaccacaggacuguauaaaggcguuuacgaacuccagacccuggagcuuaacauggaaacacugaauaugaccaugccucucucuuguacaaagaacaauagccaucacuauauuaugguggggaacgagaccggacuggagcuuacgcugaccaauacauccaucaucaaccauaaauucugcaaucucucugacgcgcacaagaaaaaccuguacgaucaugcucugaugagcauuaucuccaccuuucaccucucuauuccgaauuucaaccaguaugaagccaugagcugugacuuuaauggcggcaagaucuccguccaguacaaccugagccacucuuaugccggggaugcugccgaccauugcggaacaguggcuaauggcguucuucaaaccuucaugcggauggccuggggaggguccuacauugcgcuggauagcggcugugggcgcugggacugcaucaugacgucuuaccaguaucucauuauccagaacacaaccugggaggaucacugucaguuuuccagacccagcccuaucggauaccugggccuucugucucaacggacacgcgacauuuauaucuccagacggcuccugggcaccuucaccuggacacugagcgauuccgaagggaaggacacgcccggaggcuacugccucacccgcuggaugcugauugaggccgagcuuaaauguuuugggaacacagcuguggccaagugcaaugaaaaacaugaugaggaguucugcgacaugcugagacucuuugauuucaacaagcaggcuauccagcggcugaaagccgaagcgcagaugucuauucaacuuaucaauaaggccgucaacgcucugaucaaugaccagcucgugaugaagaaccaucugcgcgacauuauguguaucccuuauugcaauuacagcagauauugguaccugaaccacaccacaaccggacggacgucccuccccaaauguuggcuggugagcaauggcucuuaccuuaacgaaacacacuucuccgaugacauugagcagcaagccgauaauaugaucaccgagaugcugcagaaggaauauauggagcgccaggggaaaaccccucucggacuggucgaccuguuuguuuucagcacaucuuuuuaccuuauuagcaucuuccuccaccuggugaagaucccgacccauagacacauugugggcaaauccugccccaagccucaucggcugaaccacaugggcaucuguucuugcgggcucuauaaacagcccggagucccugugaaguggaagcgcugaggacuaguuauaagacugacuagcccgaugggccucccaacgggcccuccuccccuccuugcaccgagauuaaucaaaggcucuuuucagagccaccaaaaaaaaaaaaaaaaaaaaaaaaaaaaaaaaaaaaaaaaaaaaaaaaaaaaaaaaaaaaaaaaagaauu

SEQ ID NO: 36255 - RNA, 1658 nt, Artificial Sequence
  mRNA product Design i-3 (hSL-A64-N5) comprising derived and/or modified sequence from LASV(G733-SLE-2010;Clade IV)__AIT17154__GPCmut9 (opt5)
aggagaaagcuuaccaugggccagaucgugaccuucuuucaagaggucccccacguuauugaagaggugaugaacaucgugcugauugcccucagcauccuggcuguccuuaaggggcuguacaauuucgccacaugcggaauugugggccucguuuccuuucugcuucugugugggagaucuugcacgaccagccucuauaaaggaguguacgaacugcagacacuggagcucaacauggaaacccugaauaugacaaugccucuuuccuguaccaagaacaauucucaucacuauaucauggucggcaacgagacagggcuggagcucacccugacgaauaccagcaucauuaaccauaaauucugcaaucuuuccgacgcgcacaagaaaaaccuguacgaucaugcucucaugucuaucauuagcacauuucaccuguccaucccgaauuucaaccaguaugaagccaugagcugugacuuuaauggaggcaagauuucugugcaguacaaccugucccacagcuaugccggcgaugcugccaaucauugcgggaccaucgcuaacggaguucuccaaacauucaugcggauggccuggggcgggucuuacauugcgcuggacuccggaugugaucgcugggacugcaucaugaccagcuaccaguaucuuaucauucagaacacgacaugggaggaucacugucaguuuucuagacccuccccuaucggcuaccuggggcuccugagccaacggacccgcgacauuuauaucuccagacggcuucugggaacauucaccuggacccucucugauagcgaaggcaaggacacacccggcggguacugccugacgcgcuggaugcugauugaggccgagcucaaauguuuuggaaauaccgcuguggccaagugcaacgaaaaacaugaugaggaguucugcgacaugcugagacuuuuugauuucaauaagcaggcuauccagcggcugaaagccgaagcgcagauguccauccaacucauuaacaaggccgucaaugcucugaucaacgaccagcuuauuaugaagaaucaucugcgcgacaucauguguauuccuuauugcaacuacagcaaauauugguaccucaaucacacaaccacaggcaagaccucucugcccaaauguuggcugguguccaacgggagcuaccucaaugaaacgcacuucucugaugacaucgagcagcaagccgauaacaugaucacagagaugcugcagaaggaauauauggagagacagggaaaaaccccucuuggccugguggaccucuuugucuucagcaccuccuuuuaccugauuucuaucuuccugcaccuuguuaagauuccgacacaucggcacgugguggggaaaagcugccccaagccucaucgccucaaucacaugggaaucuguuccugcggccuguauggccagcccggggucccugugaaguggaaaagaugaggacuaguuauaagacugacuagcccgaugggccucccaacgggcccuccuccccuccuugcaccgagauuaaucaaaggcucuuuucagagccaccaaaaaaaaaaaaaaaaaaaaaaaaaaaaaaaaaaaaaaaaaaaaaaaaaaaaaaaaaaaaaaaaagaauu

SEQ ID NO: 36256 - RNA, 1658 nt, Artificial Sequence
  mRNA product Design i-3 (hSL-A64-N5) comprising derived and/or modified sequence from MOPV/LASV reassortant(IGS-1;Clade IV)__AFY05576__GPCmut9 (opt5)
aggagaaagcuuaccaugggccagaucgugaccuucuuucaagaggucccccacguuauugaagaggugaugaacaucgugcugauugcccucagcguccuggcugugcuuaaggggcuguacaauuucgccacaugcggacucguuggccuggugacguuucuucugcucugugggagauccugcaccacaucucuguauaaaggagucuacgaacugcagacccucgagcugaacauggaaacacuuaauaugaccaugccucugagcuguacaaagaacaauucccaucacuauaucauggugggcaacgagaccgggcucgagcugacgcuuaccaauacaucuauuaucaaccauaaauucugcaaucugagcgacgcgcacaagaaaaaccucuacgaucaugcucugauguccaucauuucuaccuuucaccugagcaucccgaauuucaaccaguaugaagccauguccugugacuuuaauggaggcaagauuagcguucaguacaaccucucucacuccuaugccggcgaugcugccaaucauugcgggacaguggcuaacggaguccugcaaaccuucaugcggauggccuggggcgggagcuacaucgcgcuugacucuggauguggcaacugggauugcauuaugacguccuaccaguaucugaucauucagaauacaaccugggaggaccacugucaguuuagccgccccucuccuaucggguaccucggacugcuuucccaaagaacacgggauaucuauauuagccgcagacugcucggcaccuucaccuggacacuguccgacucugaaggcgaggauacgcccgggggauacugccugacccgguggaugcucaucgaggccgaacugaaguguuuuggcaacacagcuguggccaaaugcaaugagaagcaugacgaagaguucugcgauaugcuucgccuguuugacuucaacaaacaggcuauucagagacucaaggccgaagcgcagaugagcauccaacugauuaauaaagccgugaacgcucuuaucaaugaucagcugaucaugaagaaccaccuccgggacauuauguguaucccuuauugcaauuacuccaaguauugguaccugaaccacaccacaaccgggcgcacgagccugcccaaauguuggcucgucucuaauggauccuaccugaacgagacacauuucagcgacgauauugagcagcaagccgacaauaugaucaccgaaaugcuucagaaggaguauauggaaagacagggcaaaaccccucuggggcucguugaucuguuuguguucucuaccagcuuuuaccugauuuccaucuuccuucaccucgugaagaucccgacacaucggcacauugucggaaaaucuugccccaagccucaucgccugaaccacaugggcaucuguagcugcggccuguauaaacagcccggggugccuguuaaguggaagagaugaggacuaguuauaagacugacuagcccgaugggccucccaacgggcccuccuccccuccuugcaccgagauuaaucaaaggcucuuuucagagccaccaaaaaaaaaaaaaaaaaaaaaaaaaaaaaaaaaaaaaaaaaaaaaaaaaaaaaaaaaaaaaaaaagaauu

SEQ ID NO: 36257 - RNA, 1658 nt, Artificial Sequence
  mRNA product Design i-3 (hSL-A64-N5) comprising derived and/or modified sequence from LASV(LM765-SLE-2012;Clade IV)__AIT17814__GPCmut9 (opt5)
aggagaaagcuuaccaugggccagaucgugaccuucuuucaagaggucccccacguuauugaagaggugaugaacaucgugcugauugcccucagcauccuggcuguccuuaaggggcuguacaauuucgccacaugcggacucgugggccugguuacguuucuucugcucugugggagauccugcaccacaucucuguauaaaggaguguacgaacugcagacccucgagcugaacauggaaacacuuaauaugaccaugccucugagcuguacaaagaacaauucccaucacuauauuauggucggcaacgagaccgggcucgagcugacgcuuaccaauacaucuaucaucgaccauaaauucugcaaccugagcgaugcgcaccggaagaaucucuacgaccaugcucugauguccauuaucucuaccuuucaccugagcauuccgaacuucaaucaguaugaagccauguccugugauuuuaacggaggcaaaaucagcgugcaguacaaucucucucacuccuaugccaaggacgcugccgaucauugcggcacaguugcuaacggggugcugcaaaccuucaugcgcauggccuggggaggcagcuacauugcgcuugacucuggguguggaagaugggauugcaucaugacguccuaccaguaucugauuauccagaauacaaccugggaggaccacugucaguuuagccggcccucuccuaucggcuaccucgggcugcuuucccaacgcacaagagauauuuauaucagccggcgccugcucggaaccuucaccuggacacuguccgacucugaaggcaaggauacgcccggcggguacugccugaccagauggaugcucauugaggccgagcugaaauguuuuggaaacacagcugucgccaagugcaacgaaaaacaugacgaggaguucugcgauaugcuucggcuguuugacuucaauaagcaggcuauccagcgccucaaagccgaagcgcagaugagcauucaacugaucaacaaggccgugaaugcucuuaucaacgaccagcugauuaugaagaaucaccucagagauaucauguguauuccuuauugcaacuacuccaaauauugguaccugaaucacaccacaaccggcaagacgagccugcccaaauguuggcucgugucuaacggguccuaccugaaugaaacacauuucagcgacgauaucgagcagcaagccgacaacaugauuaccgagaugcuucagaaggaauauauggagcggcagggaaaaaccccucugggccucgucgaucuguuuguuuucucuaccagcuuuuaccugaucuccaucuuccuucaccucgugaagauuccgacacaucgccacaucguggggaaacccugcccuaagccccauagacugaaucacaugggaauuuguucuugcggccuguauaagcagccuggcguccccgugaaauggaagcggugaggacuaguuauaagacugacuagcccgaugggccucccaacgggcccuccuccccuccuugcaccgagauuaaucaaaggcucuuuucagagccaccaaaaaaaaaaaaaaaaaaaaaaaaaaaaaaaaaaaaaaaaaaaaaaaaaaaaaaaaaaaaaaaaagaauu

SEQ ID NO: 36258 - RNA, 1658 nt, Artificial Sequence
  mRNA product Design i-3 (hSL-A64-N5) comprising derived and/or modified sequence from LASV(LM776-SLE-2012;Clade IV)__AIT17824__GPCmut9 (opt5)
aggagaaagcuuaccaugggccagaucgugaccuucuuucaagaggucccccacguuauugaagaggugaugaacaucgugcugauugcccucagcauccuggcuguccuuaaggggcuguacaauuucgccacaugcggacucgugggccugguuacguuucuucugcucugugggagauccugcaccacaucuguguauaaaggagucuacgaacugcagacccuggagcucaacauggaaacacugaauaugaccaugccucuuagcuguacaaagaacaauucccaucacuauauuauggugggcaacgagaccgggcuggagcucacgcugaccaauacaucuaucaucaaccauaaauucugcaaucuuagcgacgcgcacaagaaaaaccuguacgaucaugcucucauguccauuaucucuaccuuucaccugagcauuccgaauuucaaccaguaugaagccauguccugugacuuuaauggaggcaagaucagcguucaguacaaccugucucacuccuaugccggcgaugcugccaaucauugcgggacaguggcuaacggaguccuccaaaccuucaugcggauggccuggggcgggagcuacauugcgcuggacucuggauguggcaagugggauugcaucaugacguccuaccaguaucuuauuauccagaacacaaccugggaggaccacugucaguuuagccgccccucuccuaucggguaccugggacuccugucccaaagaacacgggauauuuauaucagccgcagacuucugggcaccuucaccuggacacucuccgacucugaaggcaaagauacgcccgggggauacugccugacccgguggaugcugauugaggccgagcucaaguguuuuggcaauacagcuguggccaaaugcaacgaaaagcaugacgaggaguucugcgauaugcugcgccuuuuugacuucaauaaacaggcuauccagagacugaaggccgaagcgcagaugagcauucaacucaucaacaaggccgugaaugcucugaucaacgaucagcuuauuaugaaaaaucaucugcgggacaucauguguauuccuuauugcaacuacuccaaguauugguaccucaaucacaccacaaccgggaaaacgagccugcccaaguguuggcuggucucuaacggauccuaccucaaugaaacacacuucagcgacgauaucgagcagcaagccgacaacaugauuaccgagaugcugcagaaagaauauauggagcgccagggcaagaccccucuugggcugguugaucucuuuguguucucuaccagcuuuuaccugaucuccaucuuccugcaccuugugaaaauuccgacacauagacacaucgucggaaagucuugccccaagccucaucggcucaaucacaugggcauuuguagcugcggccuguauaaacagcccggggugccuguucgcuggaagagaugaggacuaguuauaagacugacuagcccgaugggccucccaacgggcccuccuccccuccuugcaccgagauuaaucaaaggcucuuuucagagccaccaaaaaaaaaaaaaaaaaaaaaaaaaaaaaaaaaaaaaaaaaaaaaaaaaaaaaaaaaaaaaaaaagaauu

SEQ ID NO: 36259 - RNA, 1658 nt, Artificial Sequence
  mRNA product Design i-3 (hSL-A64-N5) comprising derived and/or modified sequence from LASV(Mad39;Clade IV)__ANH09722__GPCmut9 (opt5)
aggagaaagcuuaccaugggccagaucgugaccuucuuucaagaggucccccacguuauugaagaggugaugaacaucgugcugauugcccucagcauccuggcuguccuuaaggggcuguacaauguggccacaugcggacucauuggccugguuacguuccuucugcucugugggagauccugcaccacaacccuguauaaaggaguguacgaacugcaggcgcucgagcugaacauggaaacacuuaauaugaccaugccucugucuuguacaaagaacaauagccaucacuauauccgggucggcaacgagaccgggcucgagcugacgcuuaccaauacaucccugaucaaccauaaauuuugcaaucucucugacgcucacaagaaaaaccuguacgaucaugcccugaugagcauuaucuccaccuuccaccucucuauuccgaauuuuaaccaguaugaagccaugagcugugacuucaaugauggaaagaucuccgugcaguacaaccugagccacacauaugcuggcgacaccgccaaucauugcggcacgguugcuaacggggugcuucaaacauuuaugcgcauggccuggggaggcucuuacauugcgcuggauuccggguguggaggcugggacugcaucaugaccagcuaccaguaucucauuauccagaacacaaccugggaggaucacugucaguucucuagacccuccccuaucggguaccugggacuucugagccaacggacccgcgacauuuauaucucuagacggcuccugggcacauuuacguggacccuguccgauagcgaaggcaaggacacacccgggggauacugccucacccgcuggaugcugauugaggccgagcuuaaauguuucggcaauacagcugucgccaagugcaacgaaaaacaugaugaggaauuuugcgacaugcugagacucuucgauuuuaauaagcaggcuauccagcggcugaaagccgaggcgcagauguccauucaacuuaucaacaaggccgugaaugcucugaucaacgaccagcucauuaugaagaaucaucugcgcgacaucauguguauuccuuauugcaacuacucuaaauauugguaccugaaucacaccgugacggggaagacaagccuccccaaauguuggcuggucuccaacggaagcuaccuuaaugaaacccacuucucugaugacaucgagcagcaagccgauaacaugauuaccgagaugcugcagaaggaauauauggagagacagggcaaaacaccucucgggcugguugaccuguucguguuuuccaccagcuucuaccuuaucucuaucuuucuccaccuggugaagauuccgacacaucggcacgucgugggaaaacccugcccuaagccccaucgccugaaucacaugggcaucuguagcugcggcuucuauaagcagccugggguucccgugagauggaaacggugaggacuaguuauaagacugacuagcccgaugggccucccaacgggcccuccuccccuccuugcaccgagauuaaucaaaggcucuuuucagagccaccaaaaaaaaaaaaaaaaaaaaaaaaaaaaaaaaaaaaaaaaaaaaaaaaaaaaaaaaaaaaaaaaagaauu

SEQ ID NO: 36260 - RNA, 1658 nt, Artificial Sequence
  mRNA product Design i-3 (hSL-A64-N5) comprising derived and/or modified sequence from LASV(Z0947-SLE-2011;Clade IV)__AIT17840__GPCmut9 (opt5)
aggagaaagcuuaccaugggccagaucgugaccuucuuucaagaggucccccacguuauugaagaggugaugaacaucgugcugauugcccucagcauccuggcuguccuuaaggggcuguacaauuucgccacaugcggacucgugggccugguuacguuucuucugcucugugggagauccugcaccauuucucuguauaaaggaguguacgaacugcagacacucgagcugaacauggaaacccuuaauaugacaaugccucugagcuguaccaagaacaauucccaucacuauaucauggucggcaacgagacagggcucgagcugacccuuacgaauaccucuaucauuaaccauaaauucugcaaucugagcgacgcgcacaagaaaaaccucuacgaucaugcucugauguccaucauuucuacauuucaccugagcaucccgaauuucaaccaguaugaagccauguccugugacuuuaauggaggcaagauuagcgugcaguacaaccucucucacuccuaugccggcgaugcugccaaucauugcgggaccguugcuaacggagugcugcaaacauucaugcggauggccuggggcgggagcuacaucgcgcuugacucuggaugugaucgcugggacugcauuaugaccuccuaccaguaucugaucauccagaacacgacaugggaggaucacugucaguuuagcagacccucuccuauuggcuaccucgggcugcuuucccaacggacccgcgacaucuauauuagcagacggcugcucggaacauucaccuggacccuguccgauucugaaggcaaggacacacccggcggguacugccugacgcgcuggaugcucaucgaggccgagcugaaauguuuuggaaauaccgcugucgccaagugcaacgaaaaacaugaugaggaguucugcgacaugcuuagacuguuugauuucaauaagcaggcuauucagcggcucaaagccgaagcgcagaugagcauccaacugaucaacaaggccgugaaugcucuuauuaacgaccagcugaucaugaagaaucaccuccgcgacauuauguguaucccuuauugcaacuacuccaaauauugguaccugaaucacacaaccacaggcaagaccagccugcccaaauguuggcucgugucuaacggguccuaccugaaugaaacgcauuucagcgaugacauugagcagcaagccgauaacaugaucacagagaugcuucagaaggaauauauggagagacagggaaaaaccccucugggccucgucgaccuguuuguuuucucuaccagcuuuuaccugaucuccauuuuccuucaccucgugaagaucccgacacaucggcacauuguggggaaacccugcccuaagccccaucgccugaaucacaugggaaucuguucuugcggccuguauaagcagccuggcguccccgugaaauggaagagaugaggacuaguuauaagacugacuagcccgaugggccucccaacgggcccuccuccccuccuugcaccgagauuaaucaaaggcucuuuucagagccaccaaaaaaaaaaaaaaaaaaaaaaaaaaaaaaaaaaaaaaaaaaaaaaaaaaaaaaaaaaaaaaaaagaauu

SEQ ID NO: 36261 - RNA, 1689 nt, Artificial Sequence
  mRNA product Design i-3 (hSL-A100) comprising derived and/or modified sequence from LASV(Josiah;Clade IV)__NP_694870__GPCmut9 (opt1)
aggagaaagcuuaccaugggccagaucgugaccuucuuccaggaggucccccacgugaucgaggaggugaugaacaucguccugaucgcccucagcgugcuggccgugcugaaggggcucuacaacuucgcgaccugcggccuggucgggcuggugacguuccuccugcugugcggccgcuccugcaccaccagccucuacaaggggguguacgagcugcagacccuggagcucaacauggagacgcugaacaugaccaugccgcuguccugcaccaagaacaacagccaccacuacaucauggucggcaacgagaccggccucgagcugacgcugaccaacaccuccaucaucaaccacaaguucugcaaccucagcgacgcccacaagaagaaccuguacgaccacgcccugauguccaucaucagcaccuuccaccucuccauccccaacuucaaccaguacgaggccaugagcugcgacuucaacgggggcaagaucuccgugcaguacaaccugagccacuccuacgccggggacgcggccaaccacugcggcacgguggccaacgggguccugcagaccuucaugcggauggccuggggcggcagcuacaucgcgcucgacuccgggugcggcaacugggacugcaucaugaccagcuaccaguaccugaucauccagaacaccacgugggaggaccacugccaguucucccggcccagccccaucggguaccugggccuccugucccagcgcacccgggacaucuacaucagccgccggcugcucggcaccuucaccuggacgcugagcgacuccgaggggaaggacaccccgggcggguacugccugacccgcuggaugcucaucgaggccgagcugaagugcuucggcaacaccgccguggccaagugcaacgagaagcacgacgaggaguucugcgacaugcugcggcuguucgacuucaacaagcaggccauccagcgccugaaggcggaggcccagaugagcauccagcugaucaacaaggccgugaacgcccucaucaacgaccagcugaucaugaagaaccaccuccgggacaucaugugcauccccuacugcaacuacuccaaguacugguaccucaaccacacgaccaccggccgcaccagccugcccaagugcuggcuggucuccaacggcagcuaccucaacgagacgcacuucuccgacgacaucgagcagcaggccgacaacaugaucaccgagaugcugcagaaggaguacauggagcggcaggggaagacgccccugggccucguggaccuguucguguucagcaccuccuucuaccugaucagcaucuuccugcaccucgucaagaucccgacccaccgccacaucguggggaaguccugccccaagccccaccggcugaaccacaugggcaucugcagcugcgggcuguacaagcagcccggcgugccggucaaguggaagcgcugaggacuaguuauaagacugacuagcccgaugggccucccaacgggcccuccuccccuccuugcaccgagauuaaucaaaggcucuuuucagagccaccaaaaaaaaaaaaaaaaaaaaaaaaaaaaaaaaaaaaaaaaaaaaaaaaaaaaaaaaaaaaaaaaaaaaaaaaaaaaaaaaaaaaaaaaaaaaaaaaaaaaa

SEQ ID NO: 36262 - RNA, 1686 nt, Artificial Sequence
  mRNA product Design i-3 (hSL-A100) comprising derived and/or modified sequence from LASV(LP;Clade I)__AAF86701__GPCmut9 (opt1)
aggagaaagcuuaccaugggccagaucaucaccuucuuccaggaggugccccacgucaucgaggaggugaugaacaucgugcugaucgcccucagccugcuggccauccucaaggggcuguacaacaucgcgaccugcggcaucaucgggcuggucgccuuccucuuccugugcggcaaguccugcagccugacgcucaagggcggguacgagcugcagacccuggagcucaacauggagacccugaacaugaccaugccgcuguccugcacgaagaacagcucccaccacuacauccgcgugggcaacgagaccgggcucgagcugacccugaccaacacgagcaucaucaaccacaaguucugcaaccucuccgacgcccacaagaagaaccuguacgaccacgcccugaugagcaucaucuccaccuuccaccucagcauccccaacuucaaccaguacgaggccauguccugcgacuucaacggcgggaagaucagcgugcaguacaaccugucccacagcuacgcgggcgacgccgccgagcacugcgggaccgucgccaacggcgugcugcagaccuucaugcggauggcguggggcgggcgcuacaucgcccucgacuccggcugcgggaacugggacugcaucaugacgagcuaccaguaccugaucauccagaacaccaccugggaggaccacugccaguucucccggcccagccccaucggcuaccugggccuccugucccagcgcacccgggacaucuacaucagccgccggcugcucgggacguucaccuggacccugagcgacuccgagggcaacgagacccccgggggcuacugccugacgcgcuggaugcucaucgaggccgagcugaagugcuucgggaacaccgccguggccaagugcaacgagaagcacgacgaggaguucugcgacaugcugcggcuguucgacuucaacaagcaggcgauccgccggcugaaggccgaggcccagaugagcauccagcugaucaacaaggccgucaacgcccucaucaacgaccagcugaucaugaagaaccaccuccgcgacaucaugugcauccccuacugcaacuacuccaaguacugguaccucaaccacaccagcuccggccggaccagccugcccaagugcuggcugaucuccaacgggagcuaccucaacgagacgcaguucuccgacgacaucgagcagcaggcggacaacaugaucaccgagaugcugcagaaggaguacaucgagcgccagggcaagaccccgcuggggcucguggacaucuucaucuucagcaccuccuucuaccugaucagcaucuuccugcaccugaucaagaucccgacgcaccggcacaucgugggcaagcccugccccaagccccaccgccucaaccacaugggggucugcuccugcggccuguacaagcacccgggcgugcccaccaaguggaagcggugaggacuaguuauaagacugacuagcccgaugggccucccaacgggcccuccuccccuccuugcaccgagauuaaucaaaggcucuuuucagagccaccaaaaaaaaaaaaaaaaaaaaaaaaaaaaaaaaaaaaaaaaaaaaaaaaaaaaaaaaaaaaaaaaaaaaaaaaaaaaaaaaaaaaaaaaaaaaaaaaaaaaa

SEQ ID NO: 36263 - RNA, 1686 nt, Artificial Sequence
  mRNA product Design i-3 (hSL-A100) comprising derived and/or modified sequence from LASV(803213;Clade II)__AAF86703__GPCmut9 (opt1)
aggagaaagcuuaccaugggccagaucaucaccuucuuccaggaggugccccacgucaucgaggaggugaugaacaucgugcugaucgcccucagccugcuggccauccucaaggggaucuacaacgucgcgaccugcggccuguucgggcugaucuccuuccuccugcugugcggccgcagcugcuccgugacguacaaggggguguacgagcuccagacccuggagcugaacauggccaaccucaacaugaccaugccgcugagcugcaccaagaacaacucccaccacuacaucauggucggcaacgagacgggccuggagcucacccugaccaacaccagcaucaucaaccacaaguucugcaaccuguccgacgcccacaagaagaaccucuacgaccacgcccugaugagcaucaucuccacguuccaccugagcauccccaacuucaaccaguacgaggccauguccugcgacuucaacgggggcaagaucagcgugcaguacaaccucucccacagcuucgcgguggacgccgccaaccacugcgggaccaucgccaacggcguccugcagaccuucaugcggauggcguggggcggguccuacaucgcccuggacagcggcugcgggaacugggacugcaucaugaccuccuaccaguaccucaucauccagaacacgaccugggaggaccacugccaguucagccgccccucccccaucggcuaccuggggcugcucagccagcggacccgcgacaucuacaucagccggcgccugcugggcaccuucacguggacccucuccgacagcgagggcaacgaggcccccgggggcuacugccugacccgguggaugcugaucgaggccgagcucaagugcuucgggaacaccgccguggcgaagugcaacgagaagcacgacgaggaguucugcgacaugcugcgccuguucgacuucaacaagcaggccaucaagcggcucaagacggaggcccagauguccauccagcugaucaacaaggccgugaacgcccugaucaacgaccagcucaucaugaagaaccaccuccgcgacaucaugugcauccccuacugcaacuacagccgguacugguaccugaaccacaccgucaccgggaagaccucccugccccgcugcuggcuggugagcaacggcuccuaccugaacgagacgcacuucagcgacgacaucgagcagcaggcggacaacaugaucaccgagaugcuccagaaggaguacauggaccggcagggcaagaccccgcuggggcugguggaccucuucgucuucuccaccagcuucuaccugaucuccaucuuccugcaccuggugaagaucccgacgcaccgccacaucgugggcaagcccugccccaagccccaccggcucaaccacauggggaucugcagcugcggccuguacaagcacccggggguccccgugaaguggaagcgcugaggacuaguuauaagacugacuagcccgaugggccucccaacgggcccuccuccccuccuugcaccgagauuaaucaaaggcucuuuucagagccaccaaaaaaaaaaaaaaaaaaaaaaaaaaaaaaaaaaaaaaaaaaaaaaaaaaaaaaaaaaaaaaaaaaaaaaaaaaaaaaaaaaaaaaaaaaaaaaaaaaaaa

SEQ ID NO: 36264 - RNA, 1686 nt, Artificial Sequence
  mRNA product Design i-3 (hSL-A100) comprising derived and/or modified sequence from LASV(GA391;Clade III)__CAA36645__GPCmut9 (opt1)
aggagaaagcuuaccaugggccagaucgugaccuucuuccaggaggucccccacgugaucgaggaggugaugaacaucguccugaucgcccucagcauccuggccauccugaaggggcucuacaacguggcgaccugcggccugaucgggcuggugacguuccuccugcuguccggccgcagcugcucccucaucuacaaggggaccuacgagcugcagacccuggagcucaacauggagacccugaacaugacgaugccgcugagcugcaccaagaacaacucccaccacuacauccgggucggcaacgagaccggccucgagcugacccugacgaacaccagcauccucaaccacaaguucugcaaccuguccgacgcccacaagcgcaaccuguacgaccacagccucauguccaucaucagcaccuuccaccuguccauccccaacuucaaccaguacgaggccaugagcugcgacuucaacgggggcaagaucaccgugcaguacaaccugucccacagcuucgccguggacgccgcggggcacugcggcacgcucgccaacgggguccugcagaccuucaugcggauggccuggggcggcuccuacaucgcccuggacagcgggugcggcaacugggacugcaucaugaccuccuaccaguaccucaucauccagaacaccacgugggacgaccacugccaguucagccggcccucccccaucggguaccugggccugcucagccagcgcacccgggacaucuacaucagccgccggcugcugggcaccuucaccuggacgcucuccgacagcgaggggaacgagaccccgggcggguacugccugacccgcuggaugcugaucgaggcggagcucaagugcuucggcaacaccgccguggccaagugcaacgagaagcacgacgaggaguucugcgacaugcugcggcuguucgacuucaacaagcaggccauccgccggcucaagacggaggcccagauguccauccagcugaucaacaaggcggugaacgcccugaucaacgaccagcucaucaugaagaaccaccuccgcgacaucaugugcauccccuacugcaacuacagccgguacugguaccugaaccacaccuccaccggcaagaccagccugccccgcugcuggcugaucuccaacggcagcuaccugaacgagacgaaguucuccgacgacaucgagcagcaggccgacaacaugaucaccgagaugcuccagaaggaguacaucgaccggcaggggaagacgccccugggccuggucgaccuguucguguucagcaccuccuucuaccucaucagcaucuuccugcaccuggugaagaucccgacccaccgccacaucgucgggaagcccugccccaagccccaccggcucaaccacaugggcaucugcuccugcgggcuguacaagcagccgggcgugcccgugcgcuggaagcggugaggacuaguuauaagacugacuagcccgaugggccucccaacgggcccuccuccccuccuugcaccgagauuaaucaaaggcucuuuucagagccaccaaaaaaaaaaaaaaaaaaaaaaaaaaaaaaaaaaaaaaaaaaaaaaaaaaaaaaaaaaaaaaaaaaaaaaaaaaaaaaaaaaaaaaaaaaaaaaaaaaaaa

SEQ ID NO: 36265 - RNA, 1689 nt, Artificial Sequence
  mRNA product Design i-3 (hSL-A100) comprising derived and/or modified sequence from LASV(AV;Clade V)__CCA30314__GPCmut9 (opt1)
aggagaaagcuuaccaugggccagaucgugaccuucuuccaggaggucccccacgugaucgaggaggugaugaacaucguccugaucgcccucagcauccuggccgugcugaaggggcucuacaacaucgcgaccugcggccugaucgggcugaucacguuccuccugcugugcggccgcuccugcagcuccaaccucuacaaggggguguacgagcugcagagccuggaccucaacauggagacccugaacaugaccaugccgcuguccugcaccaagaacaacagccaccacuacauccgggucggcaacgacacgggccucgagcugacccugaccaacaccuccauccucaaccacaaguucugcaaccugagcgacgcccacaagaaggaccuguacgaccacgcccucauguccaucaucagcacguuccaccuguccauccccaacuucaaccaguacgaggccaugagcugcgacuucaacgggggcaagaucuccgugcaguacaaccugagccacuccuacgccaucgacgcggccaaccacugcgggaccguggccaacggcauccuccagaccuucaugcgcauggccuggggcgggagcuacaucgcgcuggacuccggcugcgggaacugggacugcaucaugaccagcuaccaguaccugaucauccagaacacgaccugggagaaccacugccaguucucccgccccagccccaucggcuaccucgggcugcugagccagcggacccgcgacaucuacaucucccggcgccuccugggcaccuucacguggacccugagcgacuccgagggcaacgccacccccgggggcuacugccucacccgguggaugcugaucgaggccgagcugaagugcuucgggaacacggccgucgccaagugcaacgagaagcacgacgaggaguucugcgacaugcuccgccuguucgacuucaacaagcaggcgaucagccggcugaaguccgaggcccagaugagcauccagcucaucaacaaggccgugaacgcccugaucaacgaccagcugaucaugaagaaccaccuccgcgacaucaugugcauccccuacugcaacuacuccaaguacugguaccugaaccacaccaucaccgggaagaccagccugcccaagugcuggcucguguccaacggcagcuaccugaacgagacgcacuucuccgacgacaucgagcagcaggccgacaacaugaucaccgagaugcugcagaaggaguacauggagcggcagggcaagaccccgcucgggcuggucgaccuguucguguucagcaccuccuucuaccugaucagcaucuuccuccgccuggugaagaucccgacgcaccggcacaucgucggcaagcccugccccaagccccaccgccugaaccacauggggaucugcuccugcggccucuacaagcagccgggggugcccgugcgguggaagcgcugaggacuaguuauaagacugacuagcccgaugggccucccaacgggcccuccuccccuccuugcaccgagauuaaucaaaggcucuuuucagagccaccaaaaaaaaaaaaaaaaaaaaaaaaaaaaaaaaaaaaaaaaaaaaaaaaaaaaaaaaaaaaaaaaaaaaaaaaaaaaaaaaaaaaaaaaaaaaaaaaaaaaa

SEQ ID NO: 36266 - RNA, 1686 nt, Artificial Sequence
  mRNA product Design i-3 (hSL-A100) comprising derived and/or modified sequence from LASV(Togo/2016/7082;Clade VI)__AMR44577__GPCmut9 (opt1)
aggagaaagcuuaccaugggccagaucaucaccuucuuccaggaggugccccacgucaucgaggaggugaugaacaucgugcugaucgcccucagccugcuggccauccucaagggggucuacaacguggcgaccugcggcaucaucgggcuggugacguuccuguuccucugcggccgcuccugcagccugaucuacaagggguccuacgagcugcagacccucgagcugaacauggagacccugaacaugaccaugccgcucagcugcacgaagaacuccagccaccacuacauccgggucggcaacgagaccggccuggagcugacccucaccaacacguccaucaucaaccacaaguucugcaaccugagcgacgcccacaagcgcaaccuguacgaccacgcccucauguccauccugagcaccuuccaccuguccauccccaacuucaaccaguacgaggccaugagcugcgacuucaacgggggcaagaucuccgugcaguacaaccucagccacgccuacgcgguggacgccgccgagcacugcgggaccgucgccaacggcgugcugcagaccuucaugcggauggcguggggcggguccuacaucgcccuggacagcggcugcgggaacugggacugcaucaugacguccuaccaguaccucaucauccagaacaccaccugggaggaccacugccaguucagccggcccucccccaucggcuaccuggggcugcucagccagcgcacccgggacaucuacaucagccgccggcugcugggcacguucaccuggacccucuccgacagcgagggcaacgagacccccgggggcuacugccugacgcgcuggaugcugaucgaggccgagcucaagugcuucgggaacaccgccguggccaagugcaacgagaagcacgacgaggaguucugcgacaugcugcggcuguucgacuucaacaagcaggcgauccagcgccucaaguccgaggcccagaugagcauccagcugaucaacaaggccgucaacgcccugaucaacgaccagcucaucaugaagaaccaccuccgggacaugaugugcauccccuacugcaacuacuccaaguacugguaccugaaccacaccagcuccgggcgcaccagccugcccaagugcuggcugguguccaacggcagcuaccugaacgagacgcacuucuccgacgacaucgagcagcaggccgacaacaugaucaccgagaugcuccagaaggaguacaucgaccggcagggcaagaccccgcuggggcugguggaccucuucgucuucagcaccuccuucuaccugaucagcaucuuccugcaccugaucaagaucccgacgcaccgccacaucgugggcaagcccugccccaagccccaccggcucaaccacauggggaucugcuccugcggccuguacaagcagccgggggugcccacccgcuggaagcggugaggacuaguuauaagacugacuagcccgaugggccucccaacgggcccuccuccccuccuugcaccgagauuaaucaaaggcucuuuucagagccaccaaaaaaaaaaaaaaaaaaaaaaaaaaaaaaaaaaaaaaaaaaaaaaaaaaaaaaaaaaaaaaaaaaaaaaaaaaaaaaaaaaaaaaaaaaaaaaaaaaaaa

SEQ ID NO: 36267 - RNA, 1686 nt, Artificial Sequence
  mRNA product Design i-3 (hSL-A100) comprising derived and/or modified sequence from LASV(KAK-428;Clade n.d. (VII))__ANH09740__GPCmut9 (opt1)
aggagaaagcuuaccaugggccagaucgugaccuucuuccaggaggucccccacgugaucgaggaggugaugaacaucguccugaucgcccucagccugcuggccauccucaaggggcuguacaacuucgcgaccugcggcgugaucgggcugaucacguuccuccugcugugcggccgcuccugcagcgccaccuacaaggggcaguacgagcuccagacccuggagcugaacauggagucccucaacaugaccaugccgcugagcugcacgaagaacaacucccaccacuacauccgggccggcaacaacaccggccuggagcucacccugaccaacacgagcaucaucucccacaaguucugcaaccugagcgacgcccacaagaagaaccucuacgaccacacccugauguccaucaucaccaccuuccaccugagcauccccaacuucaaccaguacgaggccauguccugcgacuucaacgggggcaagaucagcauccaguacaaccucucccacagcuacgcgggggacgccgcccagcacugcggcacgguggccaacgggguccugcagaccuucaugcgcauggcguggggcggcuccuaccuggcccucgacagcgggugccgcggcugggacugcaucaucuccagcuaccaguaccugaucauccagaacaccaccugggacgaccacugccaguucucccggcccagccccaucggguaccugggcuucgugagccagaagacgcgcgacaucuacaucucccggcgccuccugggcaccuucaccuggacccugagcgacuccgaggggcacgacaugccgggcggguacugccucacgcgguggaugcugaucgaggccgaccugaagugcuucggcaacaccgccguggccaagugcaacgagaagcacgacgaggaguucugcgacauguggcgccucuucgacuucaacaagcaggcgauccagcggcugaaggccgaggcccagaugaacauccagcugaucaacaaggccgucaacgcccucaucaacgaccagcugaugaugaagaaccaccuccgcgacaucaugugcauccccuacugcaacuacagcaaguucugguaccugaacaacaccaccacgggccggaccucccugccccgcugcuggcugaucagcaacggcuccuaccucaacgagacccacuucagcgacgacaucgagcagcaggcggacaacaugaucaccgagaugcugcagaaggaguacauggaccggcaggggaagacgccccugggccucguggaccuguucguguucuccaccagcuucuaccugaucaccaucuuccuccaccuggucaagaucccgacccaccgccacaucguggggaagcccugccccaagccccaccggcugaaccacaugggcaucugcuccugcgggcuguacaagcagccgggcgugcccguccgcuggaagcggugaggacuaguuauaagacugacuagcccgaugggccucccaacgggcccuccuccccuccuugcaccgagauuaaucaaaggcucuuuucagagccaccaaaaaaaaaaaaaaaaaaaaaaaaaaaaaaaaaaaaaaaaaaaaaaaaaaaaaaaaaaaaaaaaaaaaaaaaaaaaaaaaaaaaaaaaaaaaaaaaaaaaa

SEQ ID NO: 36268 - RNA, 1686 nt, Artificial Sequence; identical to SEQ ID NO: 36262
  mRNA product Design i-3 (hSL-A100) comprising derived and/or modified sequence from LASV(Pinneo-NIG-1969;Clade I)__AIT17836__GPCmut9 (opt1)

SEQ ID NO: 36269 - RNA, 1686 nt, Artificial Sequence
  mRNA product Design i-3 (hSL-A100) comprising derived and/or modified sequence from LASV(ISTH0009-NIG-2011;Clade II)__AIT17404__GPCmut9 (opt1)
aggagaaagcuuaccaugggccagaucaucaccuucuuccaggaggugccccacgucaucgaggaggugaugaacaucgugcugaucgcccucagccugcuggccauccucaaggggaucuacaacgucgcgaccugcggccuguucgggcugguguccuuccuccugcugugcggccgcagcugcuccacgaccuacaaggggguguacgagcuccagacccuggagcuggacauggccagccucaacaugaccaugccgcuguccugcacgaagaacaacagccaccacuacaucauggucggcaacgagaccggccuggagcucacccugaccaacacguccaucaucaaccacaaguucugcaaccugagcgacgcccacaagaagaaccucuacgaccacgcccugauguccaucaucagcaccuuccaccuguccauccccaacuucaaccaguacgaggccaugagcugcgacuucaacgggggcaagaucuccgugcaguacaaccucagccacgcguacgccguggacgccgccaaccacugcgggaccaucgcgaacggcguccugcagaccuucaugcggauggccuggggcggguccuacaucgcccuggacagcggcugcggguccugggacugcaucaugacgagcuaccaguaccucaucauccagaacaccaccugggaggaccacugccaguucucccgccccagccccaucggcuaccuggggcugcucagccagcggacccgcgacaucuacaucucccggcgccugcugggcacguucaccuggacccucagcgacuccgagggcaacgagacccccgggggcuacugccugacgcgguggaugcugaucgaggccgagcucaagugcuucgggaacaccgccguggcgaagugcaacgagaagcacgacgaggaguucugcgacaugcugcgccuguucgacuucaacaagcaggccauccggcgccucaagaccgaggcccagaugagcauccagcugaucaacaaggccgugaacgcccugaucaacgaccagcucaucaugaagaaccaccuccgggacaucaugugcaucccguacugcaacuacuccaaguacugguaccugaaccacaccgucacggggaagaccagccugccccgcugcuggcugguguccaacggcagcuaccugaacgagacccacuucuccgacgacaucgagcagcaggcggacaacaugaucaccgagcuccugcagaaggaguacauggaccggcagggcaagacgccccuggggcucguggaccuguucgucuucagcaccuccuucuaccugaucagcaucuuccugcaccucaucaagaucccgacccaccgccacaucaccggcaagcccugccccaagccccaccggcugaaccacauggggaucugcuccugcggccuguacaagcacccgggggugcccgugaaguggaagcgcugaggacuaguuauaagacugacuagcccgaugggccucccaacgggcccuccuccccuccuugcaccgagauuaaucaaaggcucuuuucagagccaccaaaaaaaaaaaaaaaaaaaaaaaaaaaaaaaaaaaaaaaaaaaaaaaaaaaaaaaaaaaaaaaaaaaaaaaaaaaaaaaaaaaaaaaaaaaaaaaaaaaaa

SEQ ID NO: 36270 - RNA, 1686 nt, Artificial Sequence
  mRNA product Design i-3 (hSL-A100) comprising derived and/or modified sequence from LASV(ISTH2010-NIG-2012;Clade II)__AIT17482__GPCmut9 (opt1)
aggagaaagcuuaccaugggccagaucaucaccuucuuccaggaggugccccacgucaucgaggaggugaugaacaucgugcugaucgcccucagccugcuggccauccucaaggggaucuacaacgucgcgaccugcggccuguucgggcugguguccuuccuccugcugugcggccgcagcugcuccacgaccuacaaggggguguacgagcuccagacccuggagcuggacauggccagccucaacaugaccaugccgcuguccugcacgaagaacaacagccaccacuacaucauggucggcaacgagaccggccuggagcucacccugaccaacacguccaucaucaaccacaaguucugcaaccugagcgacgcccacaagaagaaccucuacgaccacgcccugauguccaucaucagcaccuuccaccuguccauccccaacuucaaccaguacgaggccaugagcugcgacuucaacgggggcaagaucuccgugcaguacaaccucagccacgcguacgccguggacgccgccaaccacugcgggaccaucgcgaacggcguccugcagaccuucaugcggauggccuggggcggguccuacaucgcccuggacagcggcugcggguccugggacugcaucaugacgagcuaccaguaccucaucauccagaacaucaccugggaggaccacugccaguucucccgccccagccccaucggcuaccuggggcugcucagccagcggacccgcgacaucuacaucucccggcgccugcugggcaccuucacguggacccucagcgacuccgagggcaacgagacccccgggggcuacugccugacccgguggaugcugaucgaggccgagcucaagugcuucgggaacacggccguggcgaagugcaacgagaagcacgacgaggaguucugcgacaugcugcgccuguucgacuucaacaagcaggccauccggcgccucaagaccgaggcccagaugagcauccagcugaucaacaaggccgugaacgcccugaucaacgaccagcucaucaugaagaaccaccuccgggacaucaugugcauccccuacugcaacuacuccaaguacugguaccugaaccacaccgucaccgggaagacgagccugccccgcugcuggcugguguccaacggcagcuaccugaacgagacccacuucuccgacgacaucgagcagcaggcggacaacaugaucaccgagcuccugcagaaggaguacaucgaccggcagggcaagaccccgcuggggcucguggaccuguucgucuucagcacguccuucuaccugaucagcaucuuccugcaccucgugaagaucccgacccaccgccacguggucggcaagcccugccccaagccccaccggcugaaccacauggggaucugcuccugcggccuguacaagcacccgggggugcccgugaaguggaagcgcugaggacuaguuauaagacugacuagcccgaugggccucccaacgggcccuccuccccuccuugcaccgagauuaaucaaaggcucuuuucagagccaccaaaaaaaaaaaaaaaaaaaaaaaaaaaaaaaaaaaaaaaaaaaaaaaaaaaaaaaaaaaaaaaaaaaaaaaaaaaaaaaaaaaaaaaaaaaaaaaaaaaaa

SEQ ID NO: 36271 - RNA, 1686 nt, Artificial Sequence
  mRNA product Design i-3 (hSL-A100) comprising derived and/or modified sequence from LASV(Lassa virus/H.sapiens-wt/NGA/2015/ISTH_0543;Clade II)__AVO03639__GPCmut9 (opt1)
aggagaaagcuuaccaugggccagaucaucaccuucuuccaggaggugccccacgucaucgaggaggugaugaacaucgugcugaucgcccucagccugcuggccauccucaaggggaucuacaacgucgcgaccugcggccuguucgggcugguguccuuccuccugcugugcggccgcagcugcuccacgaccuacaaggggguguacgagcuccagacccuggagcuggacauggccaaccucaacaugaccaugccgcugagcugcacgaagaacaacucccaccacuacaucauggucggcaacgagaccggccuggagcucacccugaccaacacgagcaucaucaaccacaaguucugcaaccuguccgacgcccacaagaagaaccucuacgaccacgcccugaugagcaucaucuccaccuuccaccugagcauccccaacuucaaccaguacgaggccauguccugcgacuucaacgggggcaagaucagcgugcaguacaaccucucccacaccuacgcgguggacgccgccaaccacugcgggaccaucgccaacggcguccugcagacguucaugcggauggcguggggcgggagcuacaucgcccuggacuccggcugcgggagcugggacugcaucaugaccuccuaccaguaccucgugauccagaacaccaccugggaggaccacugccaguucagccgccccucccccaucggcuaccuggggcugcucagccagcggacgcgcgacaucuacaucagccggcgccugcugggcaccuucaccuggacccucuccgacagcgagggcaacgagacgcccgggggcuacugccugacccgguggaugcugaucgaggccgagcucaagugcuucgggaacaccgccguggccaagugcaacgagaagcacgacgaggaguucugcgacaugcugcgccuguucgacuucaacaagcaggcgauccggcgccucaagaccgaggcccagauguccauccagcugaucaacaaggccgucaacgcccugaucaacgaccagcucaucaugaagaaccaccuccgggacaucaugugcauccccuacugcaacuacagcaaguacugguaccugaaccacacggugaccgggaagaccucccugccccgcugcuggcuggugagcaacggcuccuaccugaacgagacccacuucagcgacgacaucgagcagcaggccgacaacaugaucacggagcuccugcagaaggaguacaucgaccggcagggcaagaccccgcuggggcucgucgaccuguucguguucuccaccagcuucuaccugaucuccaucuuccugcaccucgugaagaucccgacccaccgccacaucacgggcaagcccugccccaagccccaccggcugaaccacauggggaucugcagcugcggccuguacaagcacccggggguccccgugaaguggaagcgcugaggacuaguuauaagacugacuagcccgaugggccucccaacgggcccuccuccccuccuugcaccgagauuaaucaaaggcucuuuucagagccaccaaaaaaaaaaaaaaaaaaaaaaaaaaaaaaaaaaaaaaaaaaaaaaaaaaaaaaaaaaaaaaaaaaaaaaaaaaaaaaaaaaaaaaaaaaaaaaaaaaaaa

SEQ ID NO: 36272 - RNA, 1686 nt, Artificial Sequence
  mRNA product Design i-3 (hSL-A100) comprising derived and/or modified sequence from LASV(Lassa virus/H.sapiens-wt/NGA/2016/ISTH_0009;Clade II)__AVO03571__GPCmut9 (opt1)
aggagaaagcuuaccaugggccagaucaucaccuucuuccaggaggugccccacgucaucgaggaggugaugaacaucgugcugaucgcccucagccugcuggccauccucaaggggaucuacaacgucgcgaccugcggccugcuggggcucguguccuuccugcugcucugcggccgcagcugcuccacgaccuacaaggggguguacgagcugcagacccuggagcucgacauggccagccugaacaugaccaugccgcuguccugcacgaagaacaacagccaccacuacaucauggucggcaacgagaccggccucgagcugacccugaccaacacguccaucaucaaccacaaguucugcaaccucagcgacgcccacaagaagaaccuguacgaccacgcccugauguccaucaucagcaccuuccaccucuccauccccaacuucaaccaguacgaggccaugagcugcgacuucaacgggggccggaucuccgugcaguacaaccugagccacuccuacgcgguggacgccgccaaccacugcgggaccaucgccaacggcguccugcagaccuucaugcgcauggcguggggcgggagcuacaucgcccucgacuccggcugcgggagcugggacugcaucaugacguccuaccaguaccugaucauccagaacaccaccugggaggaccacugccaguucagccggcccagccccaucggcuaccuggggcuccugucccagcgcacccgggacaucuacaucagccgccggcugcucggcacguucaccuggacccuguccgacagcgagggcaacgagacccccgggggcuacugccugacgcgcuggaugcucaucgaggccgagcugaagugcuucgggaacaccgccguggccaagugcaacgagaagcacgacgaggaguucugcgacaugcugcggcuguucgacuucaacaagcaggcgauccgccggcugaagaccgaggcccagauguccauccagcugaucaacaaggccgugaacgcccucaucaacgaccagcugaucaugaagaaccaccuccgcgacaucaugugcaucccguacugcaacuacagcaaguacugguaccucaaccacaccgucacggggaagaccucccugccccggugcuggcuggugagcaacggcuccuaccucaacgagacccacuucagcgacgacaucgagcagcaggccgacaacaugaucaccgagcugcugcagaaggaguacaucgaccgccagggcaagacgccccucgggcugguggaccuguucgucuucuccaccagcuucuaccugaucuccaucuuccuccaccuggugaagaucccgacccaccggcacaucaccggcaagcccugccccaagccccaccgccugaaccacauggggaucugcagcugcggccucuacaaccacccgggggugcccgucaaguggaagcggugaggacuaguuauaagacugacuagcccgaugggccucccaacgggcccuccuccccuccuugcaccgagauuaaucaaaggcucuuuucagagccaccaaaaaaaaaaaaaaaaaaaaaaaaaaaaaaaaaaaaaaaaaaaaaaaaaaaaaaaaaaaaaaaaaaaaaaaaaaaaaaaaaaaaaaaaaaaaaaaaaaaaa

SEQ ID NO: 36273 - RNA, 1686 nt, Artificial Sequence
  mRNA product Design i-3 (hSL-A100) comprising derived and/or modified sequence from LASV(Lassa virus/H.sapiens-wt/NGA/2016/ISTH_0017;Clade II)__AVO03567__GPCmut9 (opt1)
aggagaaagcuuaccaugggccagaucaucaccuucuuccaggaggugccccacgucaucgaggaggugaugaacaucgugcugaucgcccucagccugcuggccauccucaaggggaucuacaacgucgcgaccugcggccuguucgggcugguguccuuccuccugcugugcggccgcagcugcuccacgaccuacaaggggguguacgagcuccagacccuggagcuggacauggccagccucaacaugaccaugccgcuguccugcacgaagaacaacagccaccacuacaucauggucggcaacgagaccggccuggagcucacccugaccaacacguccaucaucaaccacaaguucugcaaccugagcgacgcccacaagaagaaccucuacgaccacgcccugauguccaucaucagcaccuuccaccuguccauccccaacuucaaccaguacgaggccaugagcugcgacuucaacgggggcaagaucuccgugcaguacaaccucagccacaccuacgcgaucgacgccgccaaccacugcgggaccaucgccaacggcgugcugcagacguucaugcggauggcguggggcggguccuacaucgcccuggacagcggcugcggguccugggacugcaucaugaccagcuaccaguaccucaucauccagaacaccaccugggaggaccacugccaguucucccgccccagccccaucggcuaccuggggcugcucagccagcggacgcgcgacaucuacaucucccggcgccugcugggcaccuucaccuggacccucagcgacuccgagggcaacgagacgcccgggggcuacugccugacccgguggaugcugaucgaggccgagcucaagugcuucgggaacaccgccgucgccaagugcaacgagaagcacgacgaggaguucugcgacaugcugcgccuguucgacuucaacaagcaggcgauccggcgccucaagaccgaggcccagaugagcauccagcugaucaacaaggccgugaacgcccugaucaacgaccagcucaucaugaagaaccaccuccgggacaucaugugcauccccuacugcaacuacuccaaguacugguaccugaaccacacggugaccgggaagaccagccugccccgcugcuggcuggucuccaacggcagcuaccugaacgagacccacuucuccgacgacaucgagcagcaggccgacaacaugaucacggagcuccugcagaaggaguacauggaccggcagggcaagaccccgcuggggcucguggaccuguucguguucagcaccuccuucuaccugaucagcaucuuccugcaccucguccgcaucccgacccaccggcacgugaucggcaagcccugccccaagccccaccgccugaaccacauggggaucugcuccugcggccuguacaagcacccgggggugcccgucaaguggaagcggugaggacuaguuauaagacugacuagcccgaugggccucccaacgggcccuccuccccuccuugcaccgagauuaaucaaaggcucuuuucagagccaccaaaaaaaaaaaaaaaaaaaaaaaaaaaaaaaaaaaaaaaaaaaaaaaaaaaaaaaaaaaaaaaaaaaaaaaaaaaaaaaaaaaaaaaaaaaaaaaaaaaaa

SEQ ID NO: 36274 - RNA, 1686 nt, Artificial Sequence
  mRNA product Design i-3 (hSL-A100) comprising derived and/or modified sequence from LASV(Lassa virus/H.sapiens-wt/NGA/2018/ISTH_0959;Clade II)__AVV65099__GPCmut9 (opt1)
aggagaaagcuuaccaugggccagaucaucaccuucuuccaggaggugccccacgucaucgaggaggugaugaacaucgugcugaucgcccucagccugcuggccauccucaaggggaucuacaacgucgugaccugcggccuguucgggcugguguccuuccuccugcugugcggccgcagcugcuccacgaccuacaagggggucuacgagcuccagacccuggagcuggacauggcgagccucaacaugaccaugccgcuguccugcacgaagaacaacagccaccacuacaucauggugggcaacgagaccggccuggagcucacccugaccaacacguccaucaucaaccacaaguucugcaaccugagcgacgcccacaagaagaaccucuacgaccacgcccugauguccaucaucagcaccuuccaccuguccauccccaacuucaaccaguacgaggccaugagcugcgacuucaacgggggcaagaucuccgugcaguacaaccucagccacgccuacgcgaucgacgccgccaaccacugcgggaccaucgccaacggcguccugcagaccuucaugcggauggcguggggcggguccuacaucgcccuggacagcggcugcggguccugggacugcaucaugacgagcuaccaguaccucaucauccagaacaccaccugggaggaccacugccaguucucccgccccagccccaucggcuaccuggggcugcucagccagcggacccgcgacaucuacaucucccggcgccugcugggcacguucaccuggacccucagcgacuccgagggcaacgagacccccgggggcuacugccugacgcgguggaugcugaucgaggccgagcucaagugcuucgggaacaccgccguggccaagugcaacgagaagcacgacgaggaguucugcgacaugcugcgccuguucgacuucaacaagcaggcgauccggcgccucaagaccgaggcccagaugagcauccagcugaucaacaaggccgugaacgcccugaucaacgaccagcucaucaugaagaaccaccuccgggacaucaugugcaucccguacugcaacuacuccaaguacugguaccugaaccacaccgucacggggaagaccagccugccccgcugcuggcugguguccaacggcagcuaccugaacgagacccacuucuccgacgacaucgagcagcaggccgacaacaugaucaccgagcuccugcagaaggaguacaucgaccggcagggcaagacgccccuggggcucguggaccuguucgucuucagcaccuccuucuaccugaucagcaucuuccugcaccucgugaagaucccgacccaccgccacgugaucggcaagcccugccccaagccccaccggcugaaccacauggggaucugcuccugcggccuguacaagcacccggggguccccgugaaguggaagcgcugaggacuaguuauaagacugacuagcccgaugggccucccaacgggcccuccuccccuccuugcaccgagauuaaucaaaggcucuuuucagagccaccaaaaaaaaaaaaaaaaaaaaaaaaaaaaaaaaaaaaaaaaaaaaaaaaaaaaaaaaaaaaaaaaaaaaaaaaaaaaaaaaaaaaaaaaaaaaaaaaaaaaa

SEQ ID NO: 36275 - RNA, 1686 nt, Artificial Sequence
  mRNA product Design i-3 (hSL-A100) comprising derived and/or modified sequence from LASV(LASV003-NIG-2008;Clade II)__AIT17580__GPCmut9 (opt1)
aggagaaagcuuaccaugggccagaucaucaccuucuuccaggaggugccccacgucaucgaggaggugaugaacaucgugcugaucgcccucagccugcuggccauccucaaggggaucuacaacgucgcgaccugcggccuguucgggcugguguccuuccuccugcugugcggccgcagcugcuccacgaccuacaaggggguguacgagcuccagacccuggagcuggacauggccagccucaacaugaccaugccgcuguccugcacgaagaacaacagccaccacuacaucauggucggcaacgagaccggccuggagcucacccugaccaacacguccaucaucaaccacaaguucugcaaccugagcgacgcccacaagaagaaccucuacgaccacgcccugauguccaucaucagcaccuuccaccuguccauccccaacuucaaccaguacgaggccaugagcugcgacuucaacgggggcaagaucuccgugcaguacaaccucagccacaccuacgcgguggacgccgccaaccacugcgggaccaucgccaacggcguccugcagacguucaugcggauggcguggggcggguccuacaucgcccuggacagcggcugcggguccugggacugcaucaugaccagcuaccaguaccucaucauccagaacaccaccugggaggaccacugccaguucucccgccccagccccaucggcuaccuggggcugcucagccagcggacgcgcgacaucuacaucucccggcgccugcugggcaccuucaccuggacccucagcgacuccgagagcaacgagacgccgggcggguacugccugacccgguggaugcugaucgaggccgagcucaagugcuucggcaacaccgccguggccaagugcaacgagaagcacgacgaggaguucugcgacaugcugcgccuguucgacuucaacaagcaggcgauccggcgccucaaggccgaggcccagauguccauccagcugaucaacaaggccgugaacgcccugaucaacgaccagcucaucaugaagaaccaccuccgggacaucaugugcauccccuacugcaacuacagcaaguacugguaccugaaccacaccgucacgggccgcaccucccugccccggugcuggcuggugagcaacggguccuaccugaacgagacccacuucagcgacgacaucgagcagcaggcggacaacaugaucaccgagcuccugcagaaggaguacauggaccgccagggcaagacgccccugggccucguggaccuguucgucuucuccaccagcuucuaccugaucuccaucuuccugcaccucgugaagaucccgacccaccggcacgugaucgggaagcccugccccaagccccaccgccugaaccacaugggcaucugcagcugcgggcuguacaagcacccgggcguccccgugaaguggaagcggugaggacuaguuauaagacugacuagcccgaugggccucccaacgggcccuccuccccuccuugcaccgagauuaaucaaaggcucuuuucagagccaccaaaaaaaaaaaaaaaaaaaaaaaaaaaaaaaaaaaaaaaaaaaaaaaaaaaaaaaaaaaaaaaaaaaaaaaaaaaaaaaaaaaaaaaaaaaaaaaaaaaaa

SEQ ID NO: 36276 - RNA, 1686 nt, Artificial Sequence
  mRNA product Design i-3 (hSL-A100) comprising derived and/or modified sequence from LASV(LASV035-NIG-2009;Clade II)__AIT17588__GPCmut9 (opt1)
aggagaaagcuuaccaugggccagaucaucaccuucuuccaggaggugccccacgucaucgaggaggugaugaacaucgugcugaucgcccucagccugcuggccauccucaaggggaucuacaacgucgcgaccugcggccuguucgggcugguguccuuccuccugcugugcggccgcagcugcuccacgaccuacaaggggguguacgagcuccagacccuggagcuggacauggccagccucaacaugaccaugccgcuguccugcacgaagaacaacagccaccacuacaucauggucggcaacgagaccggccuggagcucacccugaccaacacguccaucaucaaccacaaguucugcaaccugagcgacgcccacaagaagaaccucuacgaccacgcccugauguccaucaucagcaccuuccaccuguccauccccaacuucaaccaguacgaggccaugagcugcgacuucaacgggggcaagaucuccgugcaguacaaccucagccacgcguacgccguggacgccgccaaccacugcgggaccaucgcgaacggcguccugcagaccuucaugcggauggccuggggcggguccuacaucgcccuggacagcggcugcggguccugggacugcaucaugacgagcuaccaguaccucaucauccagaacaccaccugggaggaccacugccaguucucccgccccagccccaucggcuaccuggggcugcucagccagcggacccgcgacaucuacaucucccggcgccugcugggcacguucaccuggacccucagcgacuccgagggcaacgagacccccgggggcuacugccugacgcgguggaugcugaucgaggccgagcucaagugcuucgggaacaccgccguggcgaagugcaacgagaagcacgacgaggaguucugcgacaugcugcgccuguucgacuucaacaagcaggccauccggcgccucaaggccgaggcccagaugagcauccagcugaucaacaaggccgugaacgcgcugaucaacgaccagcucaucaugaagaaccaccuccgggacaucaugugcauccccuacugcaacuacuccaaguacugguaccugaaccacaccgucaccgggaagacgagccugccccgcugcuggcugguguccaacggcagcuaccugaacgagacccacuucuccgacgacaucgagcagcaggccgacaacaugaucaccgagcuccugcagaaggaguacaucgaccggcagggcaagaccccgcuggggcucguggaccuguucgucuucagcacguccuucuaccugaucagcaucuuccugcaccucgugaagaucccgacccaccgccacgugaucggcaagcccugccccaagccccaccggcugaaccacauggggaucugcuccugcggccuguacaagcacccggggguccccgugaaguggaagcgcugaggacuaguuauaagacugacuagcccgaugggccucccaacgggcccuccuccccuccuugcaccgagauuaaucaaaggcucuuuucagagccaccaaaaaaaaaaaaaaaaaaaaaaaaaaaaaaaaaaaaaaaaaaaaaaaaaaaaaaaaaaaaaaaaaaaaaaaaaaaaaaaaaaaaaaaaaaaaaaaaaaaaa

SEQ ID NO: 36277 - RNA, 1686 nt, Artificial Sequence
  mRNA product Design i-3 (hSL-A100) comprising derived and/or modified sequence from LASV(LASV1000-NIG-2009;Clade II)__AIT17782__GPCmut9 (opt1)
aggagaaagcuuaccaugggccagaucaucaccuucuuccaggaggugccccacgucaucgaggaggugaugaacaucgugcugaucgcccucagccugcuggccauccucaaggggaucuacaacgucgcgaccugcggccuguucgggcugguguccuuccuccugcugugcggccgcagcugcuccacgaccuacaaggggguguacgagcuccagacccuggagcuggacauggccagccucaacaugaccaugccgcuguccugcacgaagaacaacagccaccacuacaucauggucggcaacgagaccggccuggagcucacccugaccaacacguccaucaucaaccacaaguucugcaaccugagcgacgcccacaagaagaaccucuacgaccacgcccugauguccaucaucagcaccuuccaccuguccauccccaacuucaaccaguacgaggccaugagcugcgacuucaacgggggcaagaucuccgugcaguacaaccucagccacaccuacgcgguggacgccgccaaccacugcgggaccaucgccaacggcguccugcagacguucaugcggauggcguggggcggguccuacaucgcccuggacagcggcugcggguccugggacugcaucaugaccagcuaccaguaccucaucauccagaacaccaccugggaggaccacugccaguucucccgccccagccccaucggcuaccuggggcugcucagccagcggacgcgcgacaucuacaucucccggcgccugcugggcaccuucaccuggacccucagcgacuccgagggcaacgagacgcccgggggcuacugccugacccgguggaugcugaucgaggccgagcucaagugcuucgggaacaccgccguggccaagugcaacgagaagcacgacgaggaguucugcgacaugcugcgccuguucgacuucaacaagcaggcgaucaagcggcucaagaccgaggcccagaugagcauccagcugaucaacaaggccgugaacgcccugaucaacgaccagcucaucaugaagaaccaccuccgcgacaucaugugcauccccuacugcaacuacuccaaguacugguaccugaaccacacggucaccgggaagaccagccugccccggugcuggcugguguccaacggcagcuaccugaacgagacccacuucuccgacgacaucgagcagcaggccgacaacaugaucacggagcuccugcagaaggaguacaucgaccgccagggcaagaccccgcuggggcucguggaccuguucgucuucagcaccuccuucuaccugaucagcaucuuccugcaccucgugaagaucccgacccaccggcacguggucggcaagcccugccccaagccccaccgccugaaccacauggggaucugcuccugcggccuguacaagcacccgggggugcccgugaaguggaagcggugaggacuaguuauaagacugacuagcccgaugggccucccaacgggcccuccuccccuccuugcaccgagauuaaucaaaggcucuuuucagagccaccaaaaaaaaaaaaaaaaaaaaaaaaaaaaaaaaaaaaaaaaaaaaaaaaaaaaaaaaaaaaaaaaaaaaaaaaaaaaaaaaaaaaaaaaaaaaaaaaaaaaa

SEQ ID NO: 36278 - RNA, 1686 nt, Artificial Sequence
  mRNA product Design i-3 (hSL-A100) comprising derived and/or modified sequence from LASV(LASV221-NIG-2010;Clade II)__AIT17624__GPCmut9 (opt1)
aggagaaagcuuaccaugggccagaucaucaccuucuuccaggaggugccccacgucaucgaggaggugaugaacaucgugcugaucgcccucagccugcuggccauccucaaggggaucuacaacgucgcgaccugcggccuguucgggcugguguccuuccuccugcugugcggccgcagcugcuccacgaccuacaaggggguguacgagcuccagacccuggagcuggacauggccagccucaacaugaccaugccgcuguccugcacgaagaacaacagccaccacuacaucauggucggcaacgagaccggccuggagcucacccugaccaacacguccaucaucaaccacaaguucugcaaccugagcgacgcccacaagaagaaccucuacgaccacgcccugauguccaucaucagcaccuuccaccuguccauccccaacuucaaccaguacgaggccaugagcugcgacuucaacgggggcaagaucuccgugcaguacaaccucagccacaccuacgcgaucgacgccgccaaccacugcgggaccaucgccaacggcgugcugcagacguucaugcggauggcguggggcggguccuacaucgcccuggacagcggcugcggguccugggacugcaucaugaccagcuaccaguaccucaucauccagaacaccaccugggaggaccacugccaguucucccgccccagccccaucggcuaccuggggcugcucagccagcggacgcgcgacaucuacaucucccggcgccugcugggcaccuucaccuggacccucagcgacuccgagggcaacgagacgcccgggggcuacugccugacccgguggaugcugaucgaggccgagcucaagugcuucgggaacaccgccgucgccaagugcaacgagaagcacgacgaggaguucugcgacaugcugcgccuguucgacuucaacaagcaggcgauccggcgccucaagaccgaggcccagaugagcauccagcugaucaacaaggccgugaacgcccugaucaacgaccagcucaucaugaagaaccaccuccgggacaucaugugcauccccuacugcaacuacuccaaguacugguaccugaaccacacggugaccgggaagaccagccugccccgcugcuggcuggucuccaacggcagcuaccugaacgagacccacuucuccgacgacaucgagcagcaggccgacaacaugaucacggagaugcuccagaaggaguacauggaccggcagggcaagaccccgcuggggcugguggaccucuucguguucagcaccuccuucuaccugaucagcaucuuccugcaccuggucaagaucccgacccaccgccacgugaucggcaagcccugccccaagccccaccggcucaaccacauggggaucugcuccugcggccuguacaagcacccgggggugcccgucaaguggaagcgcugaggacuaguuauaagacugacuagcccgaugggccucccaacgggcccuccuccccuccuugcaccgagauuaaucaaaggcucuuuucagagccaccaaaaaaaaaaaaaaaaaaaaaaaaaaaaaaaaaaaaaaaaaaaaaaaaaaaaaaaaaaaaaaaaaaaaaaaaaaaaaaaaaaaaaaaaaaaaaaaaaaaaa

SEQ ID NO: 36279 - RNA, 1686 nt, Artificial Sequence
  mRNA product Design i-3 (hSL-A100) comprising derived and/or modified sequence from LASV(LASV237-NIG-2010;Clade II)__AIT17638__GPCmut9 (opt1)
aggagaaagcuuaccaugggccagaucaucaccuucuuccaggaggugccccacgucaucgaggaggugaugaacaucgugcugaucgcccucagccugcuggccauccucaaggggaucuacaacgucgcgaccugcggccuguucgggcugguguccuuccuccugcugugcggccgcagcugcuccacgaccuacaaggggguguacgagcuccagacccuggagcuggacauggccagccucaacaugaccaugccgcuguccugcacgaagaacaacagccaccacuacaucauggucggcaacgagaccggccuggagcucacccugaccaacacguccaucaucaaccacaaguucugcaaccugagcgacgcccacaagaaggaccucuacgaccacgcccugauguccaucaucagcaccuuccaccuguccauccccaacuucaaccaguacgaggccaugagcugcgacuucaacgggggcaagaucuccgugcaguacaaccucagccacaccuacgcgguggacgccgccaaccacugcgggaccaucgccaacggcguccugcagacguucaugcggauggcguggggcggguccuacaucgcccuggacagcggcugcggguccugggacugcaucaugaccagcuaccaguaccucaucauccagaacaccaccugggaggaccacugccaguucucccgccccagccccaucggcuaccuggggcugcucagccagcggacgcgcgacaucuacaucucccggcgccugcugggcaccuucaccuggacccucagcgacuccgagggcaacgagacgcccgggggcuacugccugacccgguggaugcugaucgaggccgagcucaagugcuucgggaacaccgccguggccaagugcaacgagaagcacgacgaggaguucugcgacaugcugcgccuguucgacuucaacaagcaggcgauccggcgccucaagaccgaggcccagaugagcauccagcugaucaacaaggccgugaacgcccugaucaacgaccagcucaucaugaagaaccaccuccgggacaucaugugcauccccuacugcaacuacuccaaguacugguaccugaaccacacggucaccgggaagaccagccugccccgcugcuggcugguguccaacggcagcuaccugaacgagacccacuucuccgacgacaucgagcagcaggccgacaacaugaucacggagcuccugcagaaggaguacauggaccggcagggcaagaccccgcuggggcucguggaccuguucgucuucagcaccuccuucuaccugaucagcaucuuccugcaccucaucaagaucccgacccaccgccacaucacgggcaagcccugccccaagccccaccggcugaaccacauggggaucugcuccugcggccuguacaagcacccgggggugcccgugaaguggaagcgcugaggacuaguuauaagacugacuagcccgaugggccucccaacgggcccuccuccccuccuugcaccgagauuaaucaaaggcucuuuucagagccaccaaaaaaaaaaaaaaaaaaaaaaaaaaaaaaaaaaaaaaaaaaaaaaaaaaaaaaaaaaaaaaaaaaaaaaaaaaaaaaaaaaaaaaaaaaaaaaaaaaaaa

SEQ ID NO: 36280 - RNA, 1686 nt, Artificial Sequence
  mRNA product Design i-3 (hSL-A100) comprising derived and/or modified sequence from LASV(LASV253-NIG-2011;Clade II)__AIT17670__GPCmut9 (opt1)
aggagaaagcuuaccaugggccagaucaucaccuucuuccaggaggugccccacgucaucgaggaggugaugaacaucgugcugaucgcccucagccugcuggccauccucaaggggaucuacaacgucgcgaccugcggccuguucgggcugguguccuuccuccugcugugcggccgcagcugcuccacgaccuacaaggggguguacgagcuccagacccuggagcuggacauggccagccucaacaugaccaugccgcuguccugcacgaagaacaacagccaccacuacaucauggucggcaacgagaccggccuggagcucacccugaccaacacguccaucaucaaccacaaguucugcaaccugagcgacgcccacaagaagaaccucuacgaccacgcccugauguccaucaucagcaccuuccaccuguccauccccaacuucaaccaguacgaggccaugagcugcgacuucaacgggggcaagaucuccgugcaguacaaccucagccacaccuacgcgguggacgccgccaaccacugcgggaccaucgccaacggcguccugcagacguucaugcggauggcguggggcggguccuacaucgcccuggacagcggcugcggguccugggacugcaucaugaccagcuaccaguaccucaucauccagaacaccaccugggaggaccacugccaguucucccgccccagccccaucggcuaccuggggcugcucagccagcggacgcgcgacaucuacaucucccggcgccugcugggcaccuucaccuggacccucagcgacuccgagggcaacgagacgcccgggggcuacugccugacccgguggaugcugaucgaggccgagcucaagugcuucgggaacaccgccguggccaagugcaacgagaagcacgacgaggaguucugcgacaugcugcgccuguucgacuucaacaagcaggcgauccggcgccucaaggccgaggcccagaugagcauccagcugaucaacaaggccgugaacgcccugaucaacgaccagcucaucaugaagaaccaccuccgggacaucaugugcaucccguacugcaacuacuccaaguacugguaccugaaccacaccgucacggggcgcaccagccugccccggugcuggcugguguccaacggcagcuaccugaacgagacccacuucuccgacgacaucgagcagcaggcggacaacaugaucaccgagcuccugcagaaggaguacaucgaccgccagggcaagacgccccuggggcucguggaccuguucgucuucagcaccuccuucuaccugaucagcaucuuccugcaccucgugaagaucccgacccaccggcacaucaucggcaagcccugccccaagccccaccgccugaaccacauggggaucugcuccugcggccuguacaagcacccgggggugcccgucaaguggaagcggugaggacuaguuauaagacugacuagcccgaugggccucccaacgggcccuccuccccuccuugcaccgagauuaaucaaaggcucuuuucagagccaccaaaaaaaaaaaaaaaaaaaaaaaaaaaaaaaaaaaaaaaaaaaaaaaaaaaaaaaaaaaaaaaaaaaaaaaaaaaaaaaaaaaaaaaaaaaaaaaaaaaaa

SEQ ID NO: 36281 - RNA, 1686 nt, Artificial Sequence
  mRNA product Design i-3 (hSL-A100) comprising derived and/or modified sequence from LASV(LASV254-NIG-2011;Clade II)__AIT17674__GPCmut9 (opt1)
aggagaaagcuuaccaugggccagaucaucaccuucuuccaggaggugccccacgucaucgaggaggugaugaacaucgugcugaucgcccucagccugcuggccauccucaaggggaucuacaacgucgcgaccugcggccuguucgggcugguguccuuccuccugcugugcggccgcagcugcuccacgaccuacaaggggguguacgagcuccagacccuggagcuggacaugaccaaccucaacaugacgaugccgcugagcugcaccaagaacaacucccaccacuacaucauggucggcaacgagaccggccuggagcucacccugacgaacaccagcaucaucaaccacaaguucugcaaccuguccgacgcccacaagaagaaccucuacaaccacgcccugaugagcaucaucuccaccuuccaccugagcauccccaacuucaaccaguacgaggccauguccugcgacuucaacgggggcaagaucagcgugcaguacaaccucucccacagcuacgccguggacgcggccaaccacugcgggaccaucgccaacggcguccugcagacguucaugcggauggccuggggcggguccuacaucgcgcuggacagcggcugcgggaacugggacugcaucaugaccuccuaccaguaccucaucauccagaacaccaccugggaggaccacugccaguucagccgccccucccccaucggcuaccuggggcugcucagccagcggacgcgcgacaucuacaucagccggcgccugcugggcaccuucaccuggacccucuccgacagcgagggcaacgagacgcccgggggcuacugccugacccgguggaugcugaucgaggccgagcucaagugcuucgggaacaccgccguggccaagugcaacgagaagcacgacgaggaguucugcgacaugcugcgccuguucgacuucaacaagcaggccauccggcgccucaagaccgaggcgcaggccaacauccagcugaucaacaaggccgugaacgcccugaucaacgaccagcucaucaugaagaaccaccuccgggacaucaugugcauccccuacugcaacuacuccaaguacugguaccugaaccacacggucaccgggaagaccagccugccccgcugcuggcugguguccaacggcagcuaccugaacgagacccacuucuccgacgacaucgagcagcaggccgacaacaugaucacggagcuccugcagaaggaguacauggaccggcagggcaagaccccgcuggggcucguggaccuguucgucuucagcaccuccuucuaccugaucagcaucuuccugcaccucgugaagaucccgacccaccgccacgugaucggcaagcccugccccaagccccaccggcugaaccacauggggaucugcuccugcggccuguacaagcacccggggguccccgugaaguggaagcgcugaggacuaguuauaagacugacuagcccgaugggccucccaacgggcccuccuccccuccuugcaccgagauuaaucaaaggcucuuuucagagccaccaaaaaaaaaaaaaaaaaaaaaaaaaaaaaaaaaaaaaaaaaaaaaaaaaaaaaaaaaaaaaaaaaaaaaaaaaaaaaaaaaaaaaaaaaaaaaaaaaaaaa

SEQ ID NO: 36282 - RNA, 1686 nt, Artificial Sequence
  mRNA product Design i-3 (hSL-A100) comprising derived and/or modified sequence from LASV(Nig08-A19;Clade III)__ADU56618__GPCmut9 (opt1)
aggagaaagcuuaccaugggccagaucgugaccuucuuccaggaggucccccacgugaucgaggaggugaugaacaucguccugaucgcccucagcauccuggccauccugaaggggcucuacaacaucgcgaccugcggccugaucgggcuggugacguuccuccugcuguccggccgcagcugcuccaugaccuacaaggggguguacgagcuccagacccuggagcugaacaugaacacccucaacaugacgaugccgcugagcugcaccaagaacaacucccaccacuacaucauggucggcaacgagaccggccuggagcucacccugacgaacaccagccugcuccaccacaaguucugcaaccuguccgacgcccacaagaagaaccuguacgaccacacccucaugagcaucaucuccaccuuccaccugagcauccccaacuucaaccaguacgaggccauguccugcgacuucaacgggggcaagaucacggugcaguacaaccugagccacuccuacgccaucgacgccgcgaaccacugcgggaccguggccaacggcguccuccagaccuucaugcggauggccuggggcgggagcuacaucgcccuggacuccggcugcgggaagugggacugcaucaugaccagcuaccaguaccugaucauccagaacacgaccugggaggaccacugccaguucucccggcccagccccaucggcuaccucgggcugcugucccagcgcacccgggacaucuacaucagccgccggcuccugggcaccuucacguggacccugagcgacuccgagggcaacgagacccccgggggcuacugccucacccgcuggaugcugaucgaggcggagcugaagugcuucgggaacacggccguggccaagugcaacgagaagcacgacgaggaguucugcgacaugcuccggcuguucgacuucaacaagcaggccauccgccggcugaaggccgaggcgcagaugagcauccagcucaucaacaaggccgugaacgcccugaucaacgaccagcugaucaugaagaaccaccuccgcgacaucaugugcauccccuacugcaacuacuccaaguacugguaccugaaccacaccagcaccgggcggaccucccugccccgcugcuggcucgucagcaacggcuccuaccugaacgagacgcacuucagcgacgacaucgagcagcaggccgacaacaugaucaccgagaugcugcagaaggaguaccucgaccggcagggcaagaccccgcuggggcugguggaccuguucguguucuccaccagcuucuaccucaucuccaucuuccugcaccuggucaagaucccgacgcaccgccacaucgugggcaagcccugccccaagccccaccggcucaaccacauggggaucugcagcugcggccuguacaagcagccgggggugcccguccgcuggaagcggugaggacuaguuauaagacugacuagcccgaugggccucccaacgggcccuccuccccuccuugcaccgagauuaaucaaaggcucuuuucagagccaccaaaaaaaaaaaaaaaaaaaaaaaaaaaaaaaaaaaaaaaaaaaaaaaaaaaaaaaaaaaaaaaaaaaaaaaaaaaaaaaaaaaaaaaaaaaaaaaaaaaaa

SEQ ID NO: 36283 - RNA, 1689 nt, Artificial Sequence
  mRNA product Design i-3 (hSL-A100) comprising derived and/or modified sequence from LASV(G1180-SLE-2010;Clade IV)__AIT17168__GPCmut9 (opt1)
aggagaaagcuuaccaugggccagaucgugaccuucuuccaggaggucccccacgugaucgaggaggugaugaacaucguccugaucgcccucagcauccuggccgugcugaaggggcucuacaacuucgcgaccugcggccugguggggcugcucaccuuccugcugcucugcggccgcuccugcaccgccagccgguacaagggggucuacgagcugcagacccuggagcucaacauggagacccugaacaugacgaugccgcuguccugcaccaagaacaacagccaccacuacaucauggugggcaacgagaccggccucgagcugacccugacgaacaccuccaucaucaaccacaaguucugcaaccucagcgacgcccacaagaagaaccuguacgaccacgcccugauguccaucaucagcaccuuccaccucuccauccccaacuucaaccaguacgaggccaugagcugcgacuucaacgggggcaagaucuccgugcaguacaaccugagccacuccuacgcgggggacgccgccaaccacugcggcaccgucgccaacggggugcugcagacguucaugcgcauggcguggggcggcagcuacaucgcccucgacuccgggugcggcagcugggacugcaucaugaccuccuaccaguaccugaucauccagaacaccaccugggaggaccacugccaguucagccggcccucccccaucggguaccugggccuccugagccagcgcacgcgggacaucuacaucagccgccggcugcucggcaccuucaccuggacccuguccgacagcgaggggaaggacacgccgggcggguacugccugacccgcuggaugcucaucgaggccgagcugaagugcuucggcaacaccgccguggccaagugcaacgagaagcacgacgaggaguucugcgacaugcugcggcuguucgacuucaacaagcaggcgauccagcgccugaaggccgaggcccagauguccauccagcugaucaacaaggccgucaacgcccucaucaacgaccagcugaucaugaagaaccaccuccgggacaucaugugcauccccuacugcaacuacagcaaguacugguaccucaaccacaccacgaccggcaagaccucccugcccaagugcuggcuggugagcaacggcuccuaccucaacgagacccacuucagcgacgacaucgagcagcaggcggacaacaugaucacggagaugcugcagaaggaguacauggagcgccaggggaagacgccccugggccucguggaccuguucgucuucuccaccagcuucuaccugaucuccaucuuccugcaccucgugaagaucccgacccaccggcacaucgugggcaagagcugccccaagccccaccgccugaaccacauggggaucugcuccugcgggcuguacaagcagcccggcgucccggugaaguggaagcggugaggacuaguuauaagacugacuagcccgaugggccucccaacgggcccuccuccccuccuugcaccgagauuaaucaaaggcucuuuucagagccaccaaaaaaaaaaaaaaaaaaaaaaaaaaaaaaaaaaaaaaaaaaaaaaaaaaaaaaaaaaaaaaaaaaaaaaaaaaaaaaaaaaaaaaaaaaaaaaaaaaaaa

SEQ ID NO: 36284 - RNA, 1689 nt, Artificial Sequence
  mRNA product Design i-3 (hSL-A100) comprising derived and/or modified sequence from LASV(G1442-SLE-2011;Clade IV)__AIT17180__GPCmut9 (opt1)
aggagaaagcuuaccaugggccagaucgugaccuucuuccaggaggucccccacgugaucgaggaggugaugaacaucguccugaucgcccucagcauccuggccgugcugaaggggcucuacaacguggcgaccugcggccugaucgggcuggucacguuccuccugcugugcggccgcuccugcaccaccacccucuacaaggggguguacgagcugcagacgcuggagcucaacauggagacccugaacaugaccaugccgcugagcugcaccaagaacaacucccaccacuacauccgggugggcaacgagacgggccucgagcugacccugaccaacaccagcaucaucaaccacaaguucugcaaccucuccgacgcccacaagaagaaccuguacgaccacgcccugaugagcaucaucuccacguuccaccucagcauccccaacuucaaccaguacgaggccauguccugcgacuucaacgggggcaagaucagcguccaguacaaccugucccacagcuacgccggggacgcggccaaccacugcggcaccguggccaacggggugcugcagaccuucaugcgcauggccuggggcggcuccuacaucgcgcucgacagcgggugcggcaacugggacugcaucaugaccuccuaccaguaccugaucauccagaacacgaccugggacgaccacugccaguucagccgccccucccccaucggguaccugggccuccugagccagcggacccgcgacgucuacaucucccggcgccugcucggcaccuucacguggacccugagcgacagcgaggggaaggacaccccgggcggguacugccugacccgguggaugcucaucgaggccgagcugaagugcuucggcaacacggccguggccaagugcaacgagaagcacgacgaggaguucugcgacaugcugcgccucuucgacuucaacaagcaggccauccagcggcugaaggcggaggcccagauguccauccagcugaucaacaaggccgugaacgcccucaucaacgaccagcugaucaugaagaaccaccuccgcgacaucaugugcauccccuacugcaacuacagcaaguacugguaccugaacaacaccgccaccggcaagaccucccugcccaagugcuggcugaucagcaacggcuccuaccucaacgagacgcacuucagcgacgacaucgagcaggaggcggacaacaugaucaccgagaugcugcagaaggaguacauggagcggcaggggaagacgccccugggccucgucgaccuguucguguucuccaccagcuucuaccugaucuccaucuuccugcaccucgugaagaucccgacccaccgccacaucgucggcaagagcugccccaagccccaccggcugaaccacauggggaucugcuccugcgggcuguacaagcagcccggcgugccggugcgcuggaagcggugaggacuaguuauaagacugacuagcccgaugggccucccaacgggcccuccuccccuccuugcaccgagauuaaucaaaggcucuuuucagagccaccaaaaaaaaaaaaaaaaaaaaaaaaaaaaaaaaaaaaaaaaaaaaaaaaaaaaaaaaaaaaaaaaaaaaaaaaaaaaaaaaaaaaaaaaaaaaaaaaaaaaa

SEQ ID NO: 36285 - RNA, 1689 nt, Artificial Sequence
  mRNA product Design i-3 (hSL-A100) comprising derived and/or modified sequence from LASV(G3010-SLE-2013;Clade IV)__AIT17344__GPCmut9 (opt1)
aggagaaagcuuaccaugggccagaucgugaccuucuuccaggaggucccccacgugaucgaggaggugaugaacaucguccugaucgcccucagcauccuggccgugcugaaggggcucuacaacuucgcgaccugcggccugguggggcuggucacguuccuccugcugugcggccgcuccugcaccaccagccucuacaaggggguguacgagcugcagacccuggagcucaacauggagacgcugaacaugaccaugccgcuguccugcaccaagaacaacagccaccacuacaucauggugggcaacgagaccggccucgagcugacgcugaccaacaccuccaucaucaaccacaaguucugcaaccucagcgacgcccacaagaagaaccuguacaaccacgcccugauguccaucaucagcaccuuccaccucuccauccccaacuucaaccaguacgaggccaugagcugcgacuucaacgggggcaagaucuccguccaguacaaccugagccacuccuacgccggggacgcggccagccacugcggcacgguggccaacggggugcugcagaccuucaugcggauggccuggggcggcuccuacaucgcgcucgacagcgggugcggcaagugggacugcaucaugaccuccuaccaguaccugaucauccagaacaccacgugggaggaccacugccaguucagccgccccucccccaucggguaccugggccuccugagccagcggacccgcgacaucuacaucagccggcgccugcucggcaccuucaccuggacgcuguccgacagcgaggggaaggacaccccgggcggguacugccugacccgguggaugcucaucgaggccgagcugaagugcuucggcaacaccgccgucgccaagugcaacgagaagcacgacgaggaguucugcgacaugcugcgccucuucgacuucaacaagcaggccauccagcggcugaagacggaggcgcagauguccauccagcugaucaacaaggccgugaacgcccucaucaacgaccagcugaucaugaagaaccaccuccgcgacaucaugugcauccccuacugcaacuacagcaaguacugguaccugaaccacaccaccaccggcaagacgucccugcccaagugcuggcuggugagcaacggcuccuaccucaacgagacccacuucagcgacgacaucgagcagcaggccgacaacaugaucaccgagaugcugcagaaggaguacauggagcggcaggggaagacgccccugggccucgucgaccuguucguguucuccaccagcuucuaccugaucuccaucuuccugcaccucgugaagaucccgacccaccgccacaucgucggcaagagcugccccaagccccaccggcugaaccacauggggaucugcuccugcgggcuguacaagcagcccggcgugccggugcgcuggaagcggugaggacuaguuauaagacugacuagcccgaugggccucccaacgggcccuccuccccuccuugcaccgagauuaaucaaaggcucuuuucagagccaccaaaaaaaaaaaaaaaaaaaaaaaaaaaaaaaaaaaaaaaaaaaaaaaaaaaaaaaaaaaaaaaaaaaaaaaaaaaaaaaaaaaaaaaaaaaaaaaaaaaaa

SEQ ID NO: 36286 - RNA, 1689 nt, Artificial Sequence
  mRNA product Design i-3 (hSL-A100) comprising derived and/or modified sequence from LASV(G502-SLE-2009;Clade IV)__AIT17126__GPCmut9 (opt1)
aggagaaagcuuaccaugggccagaucgugaccuucuuccaggaggucccccacgugaucgaggaggugaugaacaucguccugaucgcccucagcauccuggccgugcugaaggggcucuacaacuucgcgaccugcggccugguggggcugcucacguuccugcugcucugcggccgcuccugcaccaccgggcuguacaagggcgucuacgagcugcagacccucgagcugaacauggagacgcugaacaugaccaugccgcucagcugcaccaagaacaacucccaccacuacaucauggugggcaacgagaccgggcuggagcugacgcucaccaacaccagcaucaucaaccacaaguucugcaaccuguccgacgcccacaagaagaaccuguacgaccacgcccucaugagcaucaucuccaccuuccaccugagcauccccaacuucaaccaguacgaggccauguccugcgacuucaacggcgggaagaucagcgugcaguacaaccugucccacagcuacgccggcgacgcggccgaccacugcgggacggucgccaacggcgugcuccagaccuucaugcggauggccuggggcggguccuacaucgcgcuggacagcggcugcgggcggugggacugcaucaugaccuccuaccaguaccugaucauccagaacaccacgugggaggaccacugccaguucagccgccccucccccaucggcuaccucggccugcugagccagcggacccgcgacaucuacaucucccggcgccuccuggggaccuucaccuggacgcugagcgacagcgagggcaaggacacccccgggggcuacugccucacccgguggaugcugaucgaggccgagcugaagugcuucgggaacaccgccguggccaagugcaacgagaagcacgacgaggaguucugcgacaugcuccgccuguucgacuucaacaagcaggccauccagcggcugaaggcggaggcccagauguccauccagcucaucaacaaggccgucaacgcccugaucaacgaccagcuggugaugaagaaccaccuccgcgacaucaugugcauccccuacugcaacuacagccgguacugguaccugaaccacacgaccaccggccgcaccucccugcccaagugcuggcucgugagcaacggguccuaccugaacgagacgcacuucagcgacgacaucgagcagcaggccgacaacaugaucaccgagaugcugcagaaggaguacauggagcggcagggcaagaccccgcucgggcuggucgaccuguucguguucuccaccagcuucuaccugaucuccaucuuccuccaccuggugaagaucccgacgcaccgccacaucgucggcaagagcugccccaagccccaccggcugaaccacauggggaucugcuccugcggccucuacaagcagcccggcgugccggugaaguggaagcgcugaggacuaguuauaagacugacuagcccgaugggccucccaacgggcccuccuccccuccuugcaccgagauuaaucaaaggcucuuuucagagccaccaaaaaaaaaaaaaaaaaaaaaaaaaaaaaaaaaaaaaaaaaaaaaaaaaaaaaaaaaaaaaaaaaaaaaaaaaaaaaaaaaaaaaaaaaaaaaaaaaaaaa

SEQ ID NO: 36287 - RNA, 1689 nt, Artificial Sequence
  mRNA product Design i-3 (hSL-A100) comprising derived and/or modified sequence from LASV(G733-SLE-2010;Clade IV)__AIT17154__GPCmut9 (opt1)
aggagaaagcuuaccaugggccagaucgugaccuucuuccaggaggucccccacgugaucgaggaggugaugaacaucguccugaucgcccucagcauccuggccgugcugaaggggcucuacaacuucgcgaccugcggcaucguggggcuggucuccuuccugcuccugugcggccgcagcugcacgaccucccuguacaaggggguguacgagcuccagacccuggagcugaacauggagacccucaacaugacgaugccgcugagcugcaccaagaacaacucccaccacuacaucauggugggcaacgagaccggccuggagcucacccugacgaacaccagcaucaucaaccacaaguucugcaaccuguccgacgcccacaagaagaaccucuacgaccacgcccugaugagcaucaucuccaccuuccaccugagcauccccaacuucaaccaguacgaggccauguccugcgacuucaacgggggcaagaucagcguccaguacaaccucucccacagcuacgccggggacgcggccaaccacugcggcaccaucgccaacggggugcugcagacguucaugcggauggccuggggcggcuccuacaucgcgcuggacagcgggugcgaccggugggacugcaucaugaccuccuaccaguaccucaucauccagaacaccaccugggaggaccacugccaguucagccgccccucccccaucggcuaccuggggcugcucagccagcggacgcgcgacaucuacaucagccggcgccugcugggcaccuucaccuggacccucuccgacagcgagggcaaggacacgcccgggggcuacugccugacccgguggaugcugaucgaggccgagcucaagugcuucgggaacaccgccguggccaagugcaacgagaagcacgacgaggaguucugcgacaugcugcgccuguucgacuucaacaagcaggccauccagcggcucaaggcggaggcccagauguccauccagcugaucaacaaggccgucaacgcccugaucaacgaccagcucaucaugaagaaccaccuccgcgacaucaugugcauccccuacugcaacuacagcaaguacugguaccugaaccacaccacgaccgggaagaccucccugcccaagugcuggcuggugagcaacggcuccuaccugaacgagacccacuucagcgacgacaucgagcagcaggccgacaacaugaucacggagaugcuccagaaggaguacauggagcggcagggcaagaccccgcuggggcugguggaccucuucgucuucuccaccagcuucuaccugaucuccaucuuccugcaccuggugaagaucccgacccaccgccacguggucggcaagagcugccccaagccccaccggcucaaccacauggggaucugcuccugcggccuguacgggcagcccggcgugccggugaaguggaagcgcugaggacuaguuauaagacugacuagcccgaugggccucccaacgggcccuccuccccuccuugcaccgagauuaaucaaaggcucuuuucagagccaccaaaaaaaaaaaaaaaaaaaaaaaaaaaaaaaaaaaaaaaaaaaaaaaaaaaaaaaaaaaaaaaaaaaaaaaaaaaaaaaaaaaaaaaaaaaaaaaaaaaaa

SEQ ID NO: 36288 - RNA, 1689 nt, Artificial Sequence
  mRNA product Design i-3 (hSL-A100) comprising derived and/or modified sequence from MOPV/LASV reassortant(IGS-1;Clade IV)__AFY05576__GPCmut9 (opt1)
aggagaaagcuuaccaugggccagaucgugaccuucuuccaggaggucccccacgugaucgaggaggugaugaacaucguccugaucgcccucagcgugcuggccgugcugaaggggcucuacaacuucgcgaccugcggccuggucgggcuggugacguuccuccugcugugcggccgcuccugcaccaccagccucuacaaggggguguacgagcugcagacccuggagcucaacauggagacgcugaacaugaccaugccgcuguccugcaccaagaacaacagccaccacuacaucauggucggcaacgagaccggccucgagcugacgcugaccaacaccuccaucaucaaccacaaguucugcaaccucagcgacgcccacaagaagaaccuguacgaccacgcccugauguccaucaucagcaccuuccaccucuccauccccaacuucaaccaguacgaggccaugagcugcgacuucaacgggggcaagaucuccgugcaguacaaccugagccacuccuacgccggggacgcggccaaccacugcggcacgguggccaacgggguccugcagaccuucaugcggauggccuggggcggcagcuacaucgcgcucgacuccgggugcggcaacugggacugcaucaugaccagcuaccaguaccugaucauccagaacaccacgugggaggaccacugccaguucucccggcccagccccaucggguaccugggccuccugucccagcgcacccgggacaucuacaucagccgccggcugcucggcaccuucaccuggacgcugagcgacuccgagggggaggacaccccgggcggguacugccugacccgcuggaugcucaucgaggccgagcugaagugcuucggcaacaccgccguggccaagugcaacgagaagcacgacgaggaguucugcgacaugcugcggcuguucgacuucaacaagcaggccauccagcgccugaaggcggaggcccagaugagcauccagcugaucaacaaggccgugaacgcccucaucaacgaccagcugaucaugaagaaccaccuccgggacaucaugugcauccccuacugcaacuacuccaaguacugguaccucaaccacacgaccaccggccgcaccagccugcccaagugcuggcuggucuccaacggcagcuaccucaacgagacgcacuucuccgacgacaucgagcagcaggccgacaacaugaucaccgagaugcugcagaaggaguacauggagcggcaggggaagacgccccugggccucguggaccuguucguguucagcaccuccuucuaccugaucagcaucuuccugcaccucgucaagaucccgacccaccgccacaucguggggaaguccugccccaagccccaccggcugaaccacaugggcaucugcagcugcgggcuguacaagcagcccggcgugccggucaaguggaagcgcugaggacuaguuauaagacugacuagcccgaugggccucccaacgggcccuccuccccuccuugcaccgagauuaaucaaaggcucuuuucagagccaccaaaaaaaaaaaaaaaaaaaaaaaaaaaaaaaaaaaaaaaaaaaaaaaaaaaaaaaaaaaaaaaaaaaaaaaaaaaaaaaaaaaaaaaaaaaaaaaaaaaaa

SEQ ID NO: 36289 - RNA, 1689 nt, Artificial Sequence
  mRNA product Design i-3 (hSL-A100) comprising derived and/or modified sequence from LASV(LM765-SLE-2012;Clade IV)__AIT17814__GPCmut9 (opt1)
aggagaaagcuuaccaugggccagaucgugaccuucuuccaggaggucccccacgugaucgaggaggugaugaacaucguccugaucgcccucagcauccuggccgugcugaaggggcucuacaacuucgcgaccugcggccugguggggcuggucacguuccuccugcugugcggccgcuccugcaccaccagccucuacaaggggguguacgagcugcagacccuggagcucaacauggagacgcugaacaugaccaugccgcuguccugcaccaagaacaacagccaccacuacaucauggugggcaacgagaccggccucgagcugacgcugaccaacaccuccaucaucgaccacaaguucugcaaccucagcgacgcccaccggaagaaccuguacgaccacgcccugauguccaucaucagcaccuuccaccucuccauccccaacuucaaccaguacgaggccaugagcugcgacuucaacgggggcaagaucuccguccaguacaaccugagccacuccuacgccaaggacgcggccgaccacugcgggacgguggccaacggcgugcugcagaccuucaugcgcauggccuggggcgggagcuacaucgcgcucgacuccggcugcgggcgcugggacugcaucaugaccagcuaccaguaccugaucauccagaacaccacgugggaggaccacugccaguucucccggcccagccccaucggcuaccuggggcuccugucccagcgcacccgggacaucuacaucagccgccggcugcucggcaccuucaccuggacgcugagcgacuccgagggcaaggacacccccgggggcuacugccugacccgcuggaugcucaucgaggccgagcugaagugcuucgggaacaccgccgucgccaagugcaacgagaagcacgacgaggaguucugcgacaugcugcggcuguucgacuucaacaagcaggccauccagcgccugaaggcggaggcccagaugagcauccagcugaucaacaaggccgugaacgcccucaucaacgaccagcugaucaugaagaaccaccuccgggacaucaugugcauccccuacugcaacuacuccaaguacugguaccucaaccacacgaccaccgggaagaccagccugcccaagugcuggcugguguccaacggcagcuaccucaacgagacgcacuucuccgacgacaucgagcagcaggccgacaacaugaucaccgagaugcugcagaaggaguacauggagcgccagggcaagaccccgcuggggcucgucgaccuguucguguucagcaccuccuucuaccugaucagcaucuuccugcaccucgugaagaucccgacgcaccggcacaucgucggcaagcccugccccaagccccaccgccugaaccacauggggaucugcuccugcggccuguacaagcagccgggggugcccgugaaguggaagcggugaggacuaguuauaagacugacuagcccgaugggccucccaacgggcccuccuccccuccuugcaccgagauuaaucaaaggcucuuuucagagccaccaaaaaaaaaaaaaaaaaaaaaaaaaaaaaaaaaaaaaaaaaaaaaaaaaaaaaaaaaaaaaaaaaaaaaaaaaaaaaaaaaaaaaaaaaaaaaaaaaaaaa

SEQ ID NO: 36290 - RNA, 1689 nt, Artificial Sequence
  mRNA product Design i-3 (hSL-A100) comprising derived and/or modified sequence from LASV(LM776-SLE-2012;Clade IV)__AIT17824__GPCmut9 (opt1)
aggagaaagcuuaccaugggccagaucgugaccuucuuccaggaggucccccacgugaucgaggaggugaugaacaucguccugaucgcccucagcauccuggccgugcugaaggggcucuacaacuucgcgaccugcggccugguggggcuggucacguuccuccugcugugcggccgcuccugcaccaccagcguguacaaggggguguacgagcuccagacccuggagcugaacauggagacgcucaacaugaccaugccgcuguccugcaccaagaacaacagccaccacuacaucauggucggcaacgagaccggccuggagcucacgcugaccaacaccuccaucaucaaccacaaguucugcaaccugagcgacgcccacaagaagaaccucuacgaccacgcccugauguccaucaucagcaccuuccaccuguccauccccaacuucaaccaguacgaggccaugagcugcgacuucaacgggggcaagaucuccgugcaguacaaccucagccacuccuacgccggggacgcggccaaccacugcggcacgguggccaacgggguccugcagaccuucaugcggauggccuggggcggcagcuacaucgcgcuggacuccgggugcggcaagugggacugcaucaugaccagcuaccaguaccucaucauccagaacaccacgugggaggaccacugccaguucucccgccccagccccaucggguaccugggccugcucucccagcggacccgcgacaucuacaucagccggcgccugcugggcaccuucaccuggacgcucagcgacuccgaggggaaggacaccccgggcggguacugccugacccgguggaugcugaucgaggccgagcucaagugcuucggcaacaccgccguggccaagugcaacgagaagcacgacgaggaguucugcgacaugcugcgccuguucgacuucaacaagcaggccauccagcggcucaaggcggaggcccagaugagcauccagcugaucaacaaggccgugaacgcccugaucaacgaccagcucaucaugaagaaccaccuccgcgacaucaugugcauccccuacugcaacuacuccaaguacugguaccugaaccacacgaccaccggcaagaccagccugcccaagugcuggcuggucuccaacggcagcuaccugaacgagacgcacuucuccgacgacaucgagcagcaggccgacaacaugaucaccgagaugcuccagaaggaguacauggagcggcaggggaagacgccccugggccugguggaccucuucguguucagcaccuccuucuaccugaucagcaucuuccugcaccuggucaagaucccgacccaccgccacaucguggggaaguccugccccaagccccaccggcucaaccacaugggcaucugcagcugcgggcuguacaagcagcccggcgugccgguccgcuggaagcggugaggacuaguuauaagacugacuagcccgaugggccucccaacgggcccuccuccccuccuugcaccgagauuaaucaaaggcucuuuucagagccaccaaaaaaaaaaaaaaaaaaaaaaaaaaaaaaaaaaaaaaaaaaaaaaaaaaaaaaaaaaaaaaaaaaaaaaaaaaaaaaaaaaaaaaaaaaaaaaaaaaaaa

SEQ ID NO: 36291 - RNA, 1689 nt, Artificial Sequence
  mRNA product Design i-3 (hSL-A100) comprising derived and/or modified sequence from LASV(Mad39;Clade IV)__ANH09722__GPCmut9 (opt1)
aggagaaagcuuaccaugggccagaucgugaccuucuuccaggaggucccccacgugaucgaggaggugaugaacaucguccugaucgcccucagcauccuggccgugcugaaggggcucuacaacguggcgaccugcggccugaucgggcuggucacguuccuccugcugugcggccgcuccugcaccaccacccucuacaaggggguguacgagcugcaggcccuggagcucaacauggagacgcugaacaugaccaugccgcugagcugcaccaagaacaacucccaccacuacauccgggugggcaacgagaccggccucgagcugacgcugaccaacaccagccucaucaaccacaaguucugcaaccuguccgacgcccacaagaagaaccuguacgaccacgcccucaugagcaucaucuccaccuuccaccugagcauccccaacuucaaccaguacgaggccauguccugcgacuucaacgacgggaagaucagcguccaguacaaccugucccacacguacgcgggcgacaccgccaaccacugcgggaccguggccaacggcgugcuccagaccuucaugcgcauggccuggggcgggagcuacaucgcgcuggacuccggcugcgggggcugggacugcaucaugacgagcuaccaguaccugaucauccagaacaccaccugggaggaccacugccaguucucccggcccagccccaucggguaccucggccugcugucccagcggacccgcgacaucuacaucagccggcgccuccugggcacguucaccuggacccuguccgacagcgaggggaaggacaccccgggcggguacugccucacgcgguggaugcugaucgaggccgagcugaagugcuucggcaacaccgccgucgccaagugcaacgagaagcacgacgaggaguucugcgacaugcuccgccuguucgacuucaacaagcaggccauccagcggcugaaggcggaggcccagaugagcauccagcucaucaacaaggccgugaacgcccugaucaacgaccagcugaucaugaagaaccaccuccgcgacaucaugugcauccccuacugcaacuacuccaaguacugguaccugaaccacaccgugaccggcaagacgagccugcccaagugcuggcucgucuccaacggcagcuaccugaacgagacccacuucuccgacgacaucgagcagcaggccgacaacaugaucaccgagaugcugcagaaggaguacauggagcggcaggggaagacgccccucggccugguggaccuguucguguucagcaccuccuucuaccugaucagcaucuuccuccaccuggucaagaucccgacccaccgccacgugguggggaagcccugccccaagccccaccggcugaaccacaugggcaucugcuccugcggguucuacaagcagccgggcguccccgugcgcuggaagcggugaggacuaguuauaagacugacuagcccgaugggccucccaacgggcccuccuccccuccuugcaccgagauuaaucaaaggcucuuuucagagccaccaaaaaaaaaaaaaaaaaaaaaaaaaaaaaaaaaaaaaaaaaaaaaaaaaaaaaaaaaaaaaaaaaaaaaaaaaaaaaaaaaaaaaaaaaaaaaaaaaaaaa

SEQ ID NO: 36292 - RNA, 1689 nt, Artificial Sequence
  mRNA product Design i-3 (hSL-A100) comprising derived and/or modified sequence from LASV(Z0947-SLE-2011;Clade IV)__AIT17840__GPCmut9 (opt1)
aggagaaagcuuaccaugggccagaucgugaccuucuuccaggaggucccccacgugaucgaggaggugaugaacaucguccugaucgcccucagcauccuggccgugcugaaggggcucuacaacuucgcgaccugcggccugguggggcuggucacguuccuccugcugugcggccgcuccugcaccaucagccucuacaaggggguguacgagcugcagacccuggagcucaacauggagacccugaacaugacgaugccgcuguccugcaccaagaacaacagccaccacuacaucauggugggcaacgagaccggccucgagcugacccugacgaacaccuccaucaucaaccacaaguucugcaaccucagcgacgcccacaagaagaaccuguacgaccacgcccugauguccaucaucagcaccuuccaccucuccauccccaacuucaaccaguacgaggccaugagcugcgacuucaacgggggcaagaucuccguccaguacaaccugagccacuccuacgccggggacgcggccaaccacugcggcaccguggccaacggggugcugcagacguucaugcggauggccuggggcggcagcuacaucgcgcucgacuccgggugcgaccggugggacugcaucaugaccagcuaccaguaccugaucauccagaacaccaccugggaggaccacugccaguucucccgccccagccccaucggcuaccuggggcuccugucccagcggacgcgcgacaucuacaucagccggcgccugcucggcaccuucaccuggacccugagcgacuccgagggcaaggacacgcccgggggcuacugccugacccgguggaugcucaucgaggccgagcugaagugcuucgggaacaccgccgucgccaagugcaacgagaagcacgacgaggaguucugcgacaugcugcgccucuucgacuucaacaagcaggccauccagcggcugaaggcggaggcccagaugagcauccagcugaucaacaaggccgugaacgcccucaucaacgaccagcugaucaugaagaaccaccuccgcgacaucaugugcauccccuacugcaacuacuccaaguacugguaccugaaccacaccacgaccgggaagaccagccugcccaagugcuggcugguguccaacggcagcuaccucaacgagacccacuucuccgacgacaucgagcagcaggccgacaacaugaucacggagaugcugcagaaggaguacauggagcggcagggcaagaccccgcuggggcucgucgaccuguucguguucagcaccuccuucuaccugaucagcaucuuccugcaccucgugaagaucccgacccaccgccacaucgucggcaagcccugccccaagccccaccggcugaaccacauggggaucugcuccugcggccuguacaagcagccgggggugcccgugaaguggaagcgcugaggacuaguuauaagacugacuagcccgaugggccucccaacgggcccuccuccccuccuugcaccgagauuaaucaaaggcucuuuucagagccaccaaaaaaaaaaaaaaaaaaaaaaaaaaaaaaaaaaaaaaaaaaaaaaaaaaaaaaaaaaaaaaaaaaaaaaaaaaaaaaaaaaaaaaaaaaaaaaaaaaaaa

SEQ ID NO: 36293 - RNA, 1689 nt, Artificial Sequence
  mRNA product Design i-3 (hSL-A100) comprising derived and/or modified sequence from LASV(Josiah;Clade IV)__NP_694870__GPCmut9 (opt1)
aggagaaagcuuaccaugggccagaucgugaccuucuuccaggaggucccccacgugaucgaggaggugaugaacaucguccugaucgcccucagcgugcuggccgugcugaaggggcucuacaacuucgcgaccugcggccuggucgggcuggugacguuccuccugcugugcggccgcuccugcaccaccagccucuacaaggggguguacgagcugcagacccuggagcucaacauggagacgcugaacaugaccaugccgcuguccugcaccaagaacaacagccaccacuacaucauggucggcaacgagaccggccucgagcugacgcugaccaacaccuccaucaucaaccacaaguucugcaaccucagcgacgcccacaagaagaaccuguacgaccacgcccugauguccaucaucagcaccuuccaccucuccauccccaacuucaaccaguacgaggccaugagcugcgacuucaacgggggcaagaucuccgugcaguacaaccugagccacuccuacgccggggacgcggccaaccacugcggcacgguggccaacgggguccugcagaccuucaugcggauggccuggggcggcagcuacaucgcgcucgacuccgggugcggcaacugggacugcaucaugaccagcuaccaguaccugaucauccagaacaccacgugggaggaccacugccaguucucccgccccagccccaucggguaccugggccuccugucccagcggacccgcgacaucuacaucagccggcgccugcucggcaccuucaccuggacgcugagcgacuccgaggggaaggacaccccgggcggguacugccugacccgguggaugcucaucgaggccgagcugaagugcuucggcaacaccgccguggccaagugcaacgagaagcacgacgaggaguucugcgacaugcugcgccucuucgacuucaacaagcaggccauccagcggcugaaggcggaggcccagaugagcauccagcugaucaacaaggccgugaacgcccucaucaacgaccagcugaucaugaagaaccaccuccgcgacaucaugugcauccccuacugcaacuacuccaaguacugguaccugaaccacacgaccaccgggcggaccagccugcccaagugcuggcuggucuccaacggcagcuaccucaacgagacgcacuucuccgacgacaucgagcagcaggccgacaacaugaucaccgagaugcugcagaaggaguacauggagcgccagggcaagacgccccuggggcugguggaccucuucguguucagcaccuccuucuaccugaucagcaucuuccugcaccucgucaagaucccgacccaccggcacaucgugggcaaguccugccccaagccccaccgccugaaccacauggggaucugcagcugcggccuguacaagcagcccggggugccggucaaguggaagcggugaggacuaguuauaagacugacuagcccgaugggccucccaacgggcccuccuccccuccuugcaccgagauuaaucaaaggcucuuuucagagccaccaaaaaaaaaaaaaaaaaaaaaaaaaaaaaaaaaaaaaaaaaaaaaaaaaaaaaaaaaaaaaaaaaaaaaaaaaaaaaaaaaaaaaaaaaaaaaaaaaaaaa

SEQ ID NO: 36294 - RNA, 1686 nt, Artificial Sequence
  mRNA product Design i-3 (hSL-A100) comprising derived and/or modified sequence from LASV(LP;Clade I)__AAF86701__GPCmut9 (opt1)
aggagaaagcuuaccaugggccagaucaucaccuucuuccaggaggugccccacgucaucgaggaggugaugaacaucgugcugaucgcccucagccugcuggccauccucaaggggcuguacaacaucgcgaccugcggcaucaucgggcuggucgccuuccucuuccugugcggcaaguccugcagccugacgcucaagggcggguacgagcugcagacccuggagcucaacauggagacccugaacaugaccaugccgcuguccugcacgaagaacagcucccaccacuacauccgcgugggcaacgagaccgggcucgagcugacccugaccaacacgagcaucaucaaccacaaguucugcaaccucuccgacgcccacaagaagaaccuguacgaccacgcccugaugagcaucaucuccaccuuccaccucagcauccccaacuucaaccaguacgaggccauguccugcgacuucaacggcgggaagaucagcgugcaguacaaccugucccacagcuacgcgggcgacgccgccgagcacugcgggaccgucgccaacggcgugcugcagaccuucaugcggauggcguggggcgggcgcuacaucgcccucgacuccggcugcgggaacugggacugcaucaugacgagcuaccaguaccugaucauccagaacaccaccugggaggaccacugccaguucucccggcccagccccaucggcuaccugggccuccugucccagcgcacccgggacaucuacaucagccgccggcugcucgggacguucaccuggacccugagcgacuccgagggcaacgagacccccgggggcuacugccugacgcgcuggaugcucaucgaggccgagcugaagugcuucgggaacaccgccguggccaagugcaacgagaagcacgacgaggaguucugcgacaugcugcggcuguucgacuucaacaagcaggcgauccgccggcugaaggccgaggcccagaugagcauccagcugaucaacaaggccgucaacgcccucaucaacgaccagcugaucaugaagaaccaccuccgcgacaucaugugcauccccuacugcaacuacuccaaguacugguaccucaaccacaccagcuccggccggaccagccugcccaagugcuggcugaucuccaacggcagcuaccucaacgagacgcaguucuccgacgacaucgagcagcaggcggacaacaugaucaccgagaugcugcagaaggaguacaucgagcgccaggggaagaccccgcugggccugguggacaucuucaucuucagcaccuccuucuaccucaucagcaucuuccugcaccugaucaagaucccgacgcaccggcacaucguggggaagcccugccccaagccccaccgccucaaccacaugggcgucugcuccugcgggcuguacaagcacccgggcgugcccaccaaguggaagcggugaggacuaguuauaagacugacuagcccgaugggccucccaacgggcccuccuccccuccuugcaccgagauuaaucaaaggcucuuuucagagccaccaaaaaaaaaaaaaaaaaaaaaaaaaaaaaaaaaaaaaaaaaaaaaaaaaaaaaaaaaaaaaaaaaaaaaaaaaaaaaaaaaaaaaaaaaaaaaaaaaaaaa

SEQ ID NO: 36295 - RNA, 1686 nt, Artificial Sequence
  mRNA product Design i-3 (hSL-A100) comprising derived and/or modified sequence from LASV(803213;Clade II)__AAF86703__GPCmut9 (opt1)
aggagaaagcuuaccaugggccagaucaucaccuucuuccaggaggugccccacgucaucgaggaggugaugaacaucgugcugaucgcccucagccugcuggccauccucaaggggaucuacaacgucgcgaccugcggccuguucgggcugaucuccuuccuccugcugugcggccgcagcugcuccgugacguacaaggggguguacgagcuccagacccuggagcugaacauggccaaccucaacaugaccaugccgcugagcugcaccaagaacaacucccaccacuacaucauggucggcaacgagacgggccuggagcucacccugaccaacaccagcaucaucaaccacaaguucugcaaccuguccgacgcccacaagaagaaccucuacgaccacgcccugaugagcaucaucuccacguuccaccugagcauccccaacuucaaccaguacgaggccauguccugcgacuucaacgggggcaagaucagcgugcaguacaaccucucccacagcuucgcgguggacgccgccaaccacugcgggaccaucgccaacggcguccugcagaccuucaugcggauggcguggggcggguccuacaucgcccuggacagcggcugcgggaacugggacugcaucaugaccuccuaccaguaccucaucauccagaacacgaccugggaggaccacugccaguucagccgccccucccccaucggcuaccuggggcugcucagccagcggacccgcgacaucuacaucagccggcgccugcugggcaccuucacguggacccucuccgacagcgagggcaacgaggcccccgggggcuacugccugacccgguggaugcugaucgaggccgagcucaagugcuucgggaacaccgccguggcgaagugcaacgagaagcacgacgaggaguucugcgacaugcugcgccuguucgacuucaacaagcaggccaucaagcggcucaagacggaggcccagauguccauccagcugaucaacaaggccgugaacgcccugaucaacgaccagcucaucaugaagaaccaccuccgcgacaucaugugcauccccuacugcaacuacagccgguacugguaccugaaccacaccgucaccggcaagaccucccugccccgcugcuggcuggugagcaacggguccuaccugaacgagacgcacuucagcgacgacaucgagcagcaggcggacaacaugaucaccgagaugcuccagaaggaguacauggaccggcagggcaagaccccgcugggccugguggaccuguucgucuucuccaccagcuucuaccucaucuccaucuuccugcaccuggugaagaucccgacgcaccgccacaucguggggaagcccugccccaagccccaccggcucaaccacaugggcaucugcagcugcgggcuguacaagcacccgggcguccccgugaaguggaagcgcugaggacuaguuauaagacugacuagcccgaugggccucccaacgggcccuccuccccuccuugcaccgagauuaaucaaaggcucuuuucagagccaccaaaaaaaaaaaaaaaaaaaaaaaaaaaaaaaaaaaaaaaaaaaaaaaaaaaaaaaaaaaaaaaaaaaaaaaaaaaaaaaaaaaaaaaaaaaaaaaaaaaaa

SEQ ID NO: 36296 - RNA, 1686 nt, Artificial Sequence
  mRNA product Design i-3 (hSL-A100) comprising derived and/or modified sequence from LASV(GA391;Clade III)__CAA36645__GPCmut9 (opt1)
aggagaaagcuuaccaugggccagaucgugaccuucuuccaggaggucccccacgugaucgaggaggugaugaacaucguccugaucgcccucagcauccuggccauccugaaggggcucuacaacguggcgaccugcggccugaucgggcuggugacguuccuccugcuguccggccgcagcugcucccucaucuacaaggggaccuacgagcugcagacccuggagcucaacauggagacccugaacaugacgaugccgcugagcugcaccaagaacaacucccaccacuacauccgggucggcaacgagaccggccucgagcugacccugacgaacaccagcauccucaaccacaaguucugcaaccuguccgacgcccacaagcgcaaccuguacgaccacagccucauguccaucaucagcaccuuccaccuguccauccccaacuucaaccaguacgaggccaugagcugcgacuucaacgggggcaagaucaccgugcaguacaaccugucccacagcuucgccguggacgccgcggggcacugcggcacgcucgccaacgggguccugcagaccuucaugcggauggccuggggcggcuccuacaucgcccuggacagcgggugcggcaacugggacugcaucaugaccuccuaccaguaccucaucauccagaacaccacgugggacgaccacugccaguucagccgccccucccccaucggguaccugggccugcucagccagcggacccgcgacaucuacaucagccggcgccugcugggcaccuucaccuggacgcucuccgacagcgaggggaacgagaccccgggcggguacugccugacccgguggaugcugaucgaggcggagcucaagugcuucggcaacaccgccguggccaagugcaacgagaagcacgacgaggaguucugcgacaugcugcgccuguucgacuucaacaagcaggccauccggcgccucaagacggaggcccagauguccauccagcugaucaacaaggcggugaacgcccugaucaacgaccagcucaucaugaagaaccaccuccgggacaucaugugcauccccuacugcaacuacagccgcuacugguaccugaaccacaccuccaccgggaagaccagccugccccggugcuggcugaucuccaacggcagcuaccugaacgagacgaaguucuccgacgacaucgagcagcaggccgacaacaugaucaccgagaugcugcagaaggaguacaucgaccgccagggcaagacgccccucgggcuggucgaccuguucguguucagcaccuccuucuaccucaucagcaucuuccugcaccuggugaagaucccgacccaccggcacaucgucggcaagcccugccccaagccccaccgccucaaccacauggggaucugcuccugcggccuguacaagcagccgggggugcccgugcgguggaagcgcugaggacuaguuauaagacugacuagcccgaugggccucccaacgggcccuccuccccuccuugcaccgagauuaaucaaaggcucuuuucagagccaccaaaaaaaaaaaaaaaaaaaaaaaaaaaaaaaaaaaaaaaaaaaaaaaaaaaaaaaaaaaaaaaaaaaaaaaaaaaaaaaaaaaaaaaaaaaaaaaaaaaaa

SEQ ID NO: 36297 - RNA, 1689 nt, Artificial Sequence
  mRNA product Design i-3 (hSL-A100) comprising derived and/or modified sequence from LASV(AV;Clade V)__CCA30314__GPCmut9 (opt1)
aggagaaagcuuaccaugggccagaucgugaccuucuuccaggaggucccccacgugaucgaggaggugaugaacaucguccugaucgcccucagcauccuggccgugcugaaggggcucuacaacaucgcgaccugcggccugaucgggcugaucacguuccuccugcugugcggccgcuccugcagcuccaaccucuacaaggggguguacgagcugcagagccuggaccucaacauggagacccugaacaugaccaugccgcuguccugcaccaagaacaacagccaccacuacauccgggucggcaacgacacgggccucgagcugacccugaccaacaccuccauccucaaccacaaguucugcaaccugagcgacgcccacaagaaggaccuguacgaccacgcccucauguccaucaucagcacguuccaccuguccauccccaacuucaaccaguacgaggccaugagcugcgacuucaacgggggcaagaucuccgugcaguacaaccugagccacuccuacgccaucgacgcggccaaccacugcgggaccguggccaacggcauccuccagaccuucaugcgcauggccuggggcgggagcuacaucgcgcuggacuccggcugcgggaacugggacugcaucaugaccagcuaccaguaccugaucauccagaacacgaccugggagaaccacugccaguucucccggcccagccccaucggcuaccucgggcugcugagccagcgcacccgggacaucuacaucucccgccggcuccugggcaccuucacguggacccugagcgacuccgagggcaacgccacccccgggggcuacugccucacccgcuggaugcugaucgaggccgagcugaagugcuucgggaacacggccgucgccaagugcaacgagaagcacgacgaggaguucugcgacaugcuccggcuguucgacuucaacaagcaggcgaucagccgccugaaguccgaggcccagaugagcauccagcucaucaacaaggccgugaacgcccugaucaacgaccagcugaucaugaagaaccaccuccgggacaucaugugcauccccuacugcaacuacuccaaguacugguaccugaaccacaccaucaccggcaagaccagccugcccaagugcuggcucguguccaacgggagcuaccugaacgagacgcacuucuccgacgacaucgagcagcaggccgacaacaugaucaccgagaugcugcagaaggaguacauggagcgccagggcaagaccccgcugggccucgucgaccuguucguguucagcaccuccuucuaccugaucagcaucuuccuccggcuggugaagaucccgacgcaccgccacaucgucgggaagcccugccccaagccccaccggcugaaccacaugggcaucugcuccugcgggcucuacaagcagccgggcgugcccgugcgcuggaagcggugaggacuaguuauaagacugacuagcccgaugggccucccaacgggcccuccuccccuccuugcaccgagauuaaucaaaggcucuuuucagagccaccaaaaaaaaaaaaaaaaaaaaaaaaaaaaaaaaaaaaaaaaaaaaaaaaaaaaaaaaaaaaaaaaaaaaaaaaaaaaaaaaaaaaaaaaaaaaaaaaaaaaa

SEQ ID NO: 36298 - RNA, 1686 nt, Artificial Sequence
  mRNA product Design i-3 (hSL-A100) comprising derived and/or modified sequence from LASV(Togo/2016/7082;Clade VI)__AMR44577__GPCmut9 (opt1)
aggagaaagcuuaccaugggccagaucaucaccuucuuccaggaggugccccacgucaucgaggaggugaugaacaucgugcugaucgcccucagccugcuggccauccucaagggggucuacaacguggcgaccugcggcaucaucgggcuggugacguuccuguuccucugcggccgcuccugcagccugaucuacaagggguccuacgagcugcagacccucgagcugaacauggagacccugaacaugaccaugccgcucagcugcacgaagaacuccagccaccacuacauccgggucggcaacgagaccggccuggagcugacccucaccaacacguccaucaucaaccacaaguucugcaaccugagcgacgcccacaagcgcaaccuguacgaccacgcccucauguccauccugagcaccuuccaccuguccauccccaacuucaaccaguacgaggccaugagcugcgacuucaacgggggcaagaucuccgugcaguacaaccucagccacgccuacgcgguggacgccgccgagcacugcgggaccgucgccaacggcgugcugcagaccuucaugcggauggcguggggcggguccuacaucgcccuggacagcggcugcgggaacugggacugcaucaugacguccuaccaguaccucaucauccagaacaccaccugggaggaccacugccaguucagccgccccucccccaucggcuaccuggggcugcucagccagcggacccgcgacaucuacaucagccggcgccugcugggcacguucaccuggacccucuccgacagcgagggcaacgagacccccgggggcuacugccugacgcgguggaugcugaucgaggccgagcucaagugcuucgggaacaccgccguggccaagugcaacgagaagcacgacgaggaguucugcgacaugcugcgccuguucgacuucaacaagcaggcgauccagcggcucaaguccgaggcccagaugagcauccagcugaucaacaaggccgucaacgcccugaucaacgaccagcucaucaugaagaaccaccuccgcgacaugaugugcauccccuacugcaacuacuccaaguacugguaccugaaccacaccagcuccggccggaccagccugcccaagugcuggcugguguccaacgggagcuaccugaacgagacgcacuucuccgacgacaucgagcagcaggccgacaacaugaucaccgagaugcuccagaaggaguacaucgaccgccagggcaagaccccgcugggccugguggaccuguucgucuucagcaccuccuucuaccucaucagcaucuuccugcaccugaucaagaucccgacgcaccggcacaucguggggaagcccugccccaagccccaccgccucaaccacaugggcaucugcuccugcgggcuguacaagcagccgggcgugcccacccgguggaagcgcugaggacuaguuauaagacugacuagcccgaugggccucccaacgggcccuccuccccuccuugcaccgagauuaaucaaaggcucuuuucagagccaccaaaaaaaaaaaaaaaaaaaaaaaaaaaaaaaaaaaaaaaaaaaaaaaaaaaaaaaaaaaaaaaaaaaaaaaaaaaaaaaaaaaaaaaaaaaaaaaaaaaaa

SEQ ID NO: 36299 - RNA, 1686 nt, Artificial Sequence
  mRNA product Design i-3 (hSL-A100) comprising derived and/or modified sequence from LASV(KAK-428;Clade n.d. (VII))__ANH09740__GPCmut9 (opt1)
aggagaaagcuuaccaugggccagaucgugaccuucuuccaggaggucccccacgugaucgaggaggugaugaacaucguccugaucgcccucagccugcuggccauccucaaggggcuguacaacuucgcgaccugcggcgugaucgggcugaucacguuccuccugcugugcggccgcuccugcagcgccaccuacaaggggcaguacgagcuccagacccuggagcugaacauggagucccucaacaugaccaugccgcugagcugcacgaagaacaacucccaccacuacauccgggccggcaacaacaccggccuggagcucacccugaccaacacgagcaucaucucccacaaguucugcaaccugagcgacgcccacaagaagaaccucuacgaccacacccugauguccaucaucaccaccuuccaccugagcauccccaacuucaaccaguacgaggccauguccugcgacuucaacgggggcaagaucagcauccaguacaaccucucccacagcuacgcgggggacgccgcccagcacugcggcacgguggccaacgggguccugcagaccuucaugcgcauggcguggggcggcuccuaccuggcccucgacagcgggugccggggcugggacugcaucaucuccagcuaccaguaccugaucauccagaacaccaccugggacgaccacugccaguucucccgccccagccccaucggguaccugggcuucgugagccagaagacgcgggacaucuacaucucccgccggcuccugggcaccuucaccuggacccugagcgacuccgaggggcacgacaugccgggcggguacugccucacgcgcuggaugcugaucgaggccgaccugaagugcuucggcaacaccgccguggccaagugcaacgagaagcacgacgaggaguucugcgacauguggcggcuguucgacuucaacaagcaggcgauccagcgccugaaggccgaggcccagaugaacauccagcugaucaacaaggccgucaacgcccucaucaacgaccagcugaugaugaagaaccaccuccgggacaucaugugcauccccuacugcaacuacagcaaguucugguaccucaacaacaccaccacggggcgcaccucccugccccggugcuggcugaucagcaacggcuccuaccucaacgagacccacuucagcgacgacaucgagcagcaggcggacaacaugaucaccgagaugcugcagaaggaguacauggaccgccagggcaagacgccccuggggcucguggaccuguucguguucuccaccagcuucuaccugaucaccaucuuccugcaccucgucaagaucccgacccaccggcacaucgugggcaagcccugccccaagccccaccgccugaaccacauggggaucugcuccugcggccuguacaagcagccgggggugcccguccgguggaagcgcugaggacuaguuauaagacugacuagcccgaugggccucccaacgggcccuccuccccuccuugcaccgagauuaaucaaaggcucuuuucagagccaccaaaaaaaaaaaaaaaaaaaaaaaaaaaaaaaaaaaaaaaaaaaaaaaaaaaaaaaaaaaaaaaaaaaaaaaaaaaaaaaaaaaaaaaaaaaaaaaaaaaaa

SEQ ID NO: 36300 - RNA, 1686 nt, Artificial Sequence; identical to SEQ ID NO: 36294
  mRNA product Design i-3 (hSL-A100) comprising derived and/or modified sequence from LASV(Pinneo-NIG-1969;Clade I)__AIT17836__GPCmut9 (opt1)

SEQ ID NO: 36301 - RNA, 1686 nt, Artificial Sequence
  mRNA product Design i-3 (hSL-A100) comprising derived and/or modified sequence from LASV(ISTH0009-NIG-2011;Clade II)__AIT17404__GPCmut9 (opt1)
aggagaaagcuuaccaugggccagaucaucaccuucuuccaggaggugccccacgucaucgaggaggugaugaacaucgugcugaucgcccucagccugcuggccauccucaaggggaucuacaacgucgcgaccugcggccuguucgggcugguguccuuccuccugcugugcggccgcagcugcuccacgaccuacaaggggguguacgagcuccagacccuggagcuggacauggccagccucaacaugaccaugccgcuguccugcacgaagaacaacagccaccacuacaucauggucggcaacgagaccggccuggagcucacccugaccaacacguccaucaucaaccacaaguucugcaaccugagcgacgcccacaagaagaaccucuacgaccacgcccugauguccaucaucagcaccuuccaccuguccauccccaacuucaaccaguacgaggccaugagcugcgacuucaacgggggcaagaucuccgugcaguacaaccucagccacgcguacgccguggacgccgccaaccacugcgggaccaucgcgaacggcguccugcagaccuucaugcggauggccuggggcggguccuacaucgcccuggacagcggcugcggguccugggacugcaucaugacgagcuaccaguaccucaucauccagaacaccaccugggaggaccacugccaguucucccgccccagccccaucggcuaccuggggcugcucagccagcggacccgcgacaucuacaucucccggcgccugcugggcacguucaccuggacccucagcgacuccgagggcaacgagacccccgggggcuacugccugacgcgguggaugcugaucgaggccgagcucaagugcuucgggaacaccgccguggcgaagugcaacgagaagcacgacgaggaguucugcgacaugcugcgccuguucgacuucaacaagcaggccauccggcgccucaagaccgaggcccagaugagcauccagcugaucaacaaggccgugaacgcccugaucaacgaccagcucaucaugaagaaccaccuccgggacaucaugugcaucccguacugcaacuacuccaaguacugguaccugaaccacaccgucacgggcaagaccagccugccccgcugcuggcugguguccaacgggagcuaccugaacgagacccacuucuccgacgacaucgagcagcaggcggacaacaugaucaccgagcuccugcagaaggaguacauggaccggcagggcaagacgccccugggccugguggaccucuucgucuucagcaccuccuucuaccugaucagcaucuuccugcaccucaucaagaucccgacccaccgccacaucaccgggaagcccugccccaagccccaccggcugaaccacaugggcaucugcuccugcgggcuguacaagcacccgggcgugcccgugaaguggaagcgcugaggacuaguuauaagacugacuagcccgaugggccucccaacgggcccuccuccccuccuugcaccgagauuaaucaaaggcucuuuucagagccaccaaaaaaaaaaaaaaaaaaaaaaaaaaaaaaaaaaaaaaaaaaaaaaaaaaaaaaaaaaaaaaaaaaaaaaaaaaaaaaaaaaaaaaaaaaaaaaaaaaaaa

SEQ ID NO: 36302 - RNA, 1686 nt, Artificial Sequence
  mRNA product Design i-3 (hSL-A100) comprising derived and/or modified sequence from LASV(ISTH2010-NIG-2012;Clade II)__AIT17482__GPCmut9 (opt1)
aggagaaagcuuaccaugggccagaucaucaccuucuuccaggaggugccccacgucaucgaggaggugaugaacaucgugcugaucgcccucagccugcuggccauccucaaggggaucuacaacgucgcgaccugcggccuguucgggcugguguccuuccuccugcugugcggccgcagcugcuccacgaccuacaaggggguguacgagcuccagacccuggagcuggacauggccagccucaacaugaccaugccgcuguccugcacgaagaacaacagccaccacuacaucauggucggcaacgagaccggccuggagcucacccugaccaacacguccaucaucaaccacaaguucugcaaccugagcgacgcccacaagaagaaccucuacgaccacgcccugauguccaucaucagcaccuuccaccuguccauccccaacuucaaccaguacgaggccaugagcugcgacuucaacgggggcaagaucuccgugcaguacaaccucagccacgcguacgccguggacgccgccaaccacugcgggaccaucgcgaacggcguccugcagaccuucaugcggauggccuggggcggguccuacaucgcccuggacagcggcugcggguccugggacugcaucaugacgagcuaccaguaccucaucauccagaacaucaccugggaggaccacugccaguucucccgccccagccccaucggcuaccuggggcugcucagccagcggacccgcgacaucuacaucucccggcgccugcugggcaccuucacguggacccucagcgacuccgagggcaacgagacccccgggggcuacugccugacccgguggaugcugaucgaggccgagcucaagugcuucgggaacacggccguggcgaagugcaacgagaagcacgacgaggaguucugcgacaugcugcgccuguucgacuucaacaagcaggccauccggcgccucaagaccgaggcccagaugagcauccagcugaucaacaaggccgugaacgcccugaucaacgaccagcucaucaugaagaaccaccuccgggacaucaugugcauccccuacugcaacuacuccaaguacugguaccugaaccacaccgucaccggcaagacgagccugccccgcugcuggcugguguccaacgggagcuaccugaacgagacccacuucuccgacgacaucgagcagcaggcggacaacaugaucaccgagcuccugcagaaggaguacaucgaccggcagggcaagaccccgcugggccugguggaccucuucgucuucagcacguccuucuaccugaucagcaucuuccugcaccucgugaagaucccgacccaccgccacguggucgggaagcccugccccaagccccaccggcugaaccacaugggcaucugcuccugcgggcuguacaagcacccgggcgugcccgugaaguggaagcgcugaggacuaguuauaagacugacuagcccgaugggccucccaacgggcccuccuccccuccuugcaccgagauuaaucaaaggcucuuuucagagccaccaaaaaaaaaaaaaaaaaaaaaaaaaaaaaaaaaaaaaaaaaaaaaaaaaaaaaaaaaaaaaaaaaaaaaaaaaaaaaaaaaaaaaaaaaaaaaaaaaaaaa

SEQ ID NO: 36303 - RNA, 1686 nt, Artificial Sequence
  mRNA product Design i-3 (hSL-A100) comprising derived and/or modified sequence from LASV(Lassa virus/H.sapiens-wt/NGA/2015/ISTH_0543;Clade II)__AVO03639__GPCmut9 (opt1)
aggagaaagcuuaccaugggccagaucaucaccuucuuccaggaggugccccacgucaucgaggaggugaugaacaucgugcugaucgcccucagccugcuggccauccucaaggggaucuacaacgucgcgaccugcggccuguucgggcugguguccuuccuccugcugugcggccgcagcugcuccacgaccuacaaggggguguacgagcuccagacccuggagcuggacauggccaaccucaacaugaccaugccgcugagcugcacgaagaacaacucccaccacuacaucauggucggcaacgagaccggccuggagcucacccugaccaacacgagcaucaucaaccacaaguucugcaaccuguccgacgcccacaagaagaaccucuacgaccacgcccugaugagcaucaucuccaccuuccaccugagcauccccaacuucaaccaguacgaggccauguccugcgacuucaacgggggcaagaucagcgugcaguacaaccucucccacaccuacgcgguggacgccgccaaccacugcgggaccaucgccaacggcguccugcagacguucaugcggauggcguggggcgggagcuacaucgcccuggacuccggcugcgggagcugggacugcaucaugaccuccuaccaguaccucgugauccagaacaccaccugggaggaccacugccaguucagccgccccucccccaucggcuaccuggggcugcucagccagcggacgcgcgacaucuacaucagccggcgccugcugggcaccuucaccuggacccucuccgacagcgagggcaacgagacgcccgggggcuacugccugacccgguggaugcugaucgaggccgagcucaagugcuucgggaacaccgccguggccaagugcaacgagaagcacgacgaggaguucugcgacaugcugcgccuguucgacuucaacaagcaggcgauccggcgccucaagaccgaggcccagauguccauccagcugaucaacaaggccgucaacgcccugaucaacgaccagcucaucaugaagaaccaccuccgggacaucaugugcauccccuacugcaacuacagcaaguacugguaccugaaccacacggugaccggcaagaccucccugccccgcugcuggcuggugagcaacggguccuaccugaacgagacccacuucagcgacgacaucgagcagcaggccgacaacaugaucacggagcuccugcagaaggaguacaucgaccggcagggcaagaccccgcugggccuggucgaccucuucguguucuccaccagcuucuaccugaucuccaucuuccugcaccucgugaagaucccgacccaccgccacaucacggggaagcccugccccaagccccaccggcugaaccacaugggcaucugcagcugcgggcuguacaagcacccgggcguccccgugaaguggaagcgcugaggacuaguuauaagacugacuagcccgaugggccucccaacgggcccuccuccccuccuugcaccgagauuaaucaaaggcucuuuucagagccaccaaaaaaaaaaaaaaaaaaaaaaaaaaaaaaaaaaaaaaaaaaaaaaaaaaaaaaaaaaaaaaaaaaaaaaaaaaaaaaaaaaaaaaaaaaaaaaaaaaaaa

SEQ ID NO: 36304 - RNA, 1686 nt, Artificial Sequence
  mRNA product Design i-3 (hSL-A100) comprising derived and/or modified sequence from LASV(Lassa virus/H.sapiens-wt/NGA/2016/ISTH_0009;Clade II)__AVO03571__GPCmut9 (opt1)
aggagaaagcuuaccaugggccagaucaucaccuucuuccaggaggugccccacgucaucgaggaggugaugaacaucgugcugaucgcccucagccugcuggccauccucaaggggaucuacaacgucgcgaccugcggccugcuggggcucguguccuuccugcugcucugcggccgcagcugcuccacgaccuacaaggggguguacgagcugcagacccuggagcucgacauggccagccugaacaugaccaugccgcuguccugcacgaagaacaacagccaccacuacaucauggucggcaacgagaccggccucgagcugacccugaccaacacguccaucaucaaccacaaguucugcaaccucagcgacgcccacaagaagaaccuguacgaccacgcccugauguccaucaucagcaccuuccaccucuccauccccaacuucaaccaguacgaggccaugagcugcgacuucaacgggggccggaucuccgugcaguacaaccugagccacuccuacgcgguggacgccgccaaccacugcgggaccaucgccaacggcguccugcagaccuucaugcgcauggcguggggcgggagcuacaucgcccucgacuccggcugcgggagcugggacugcaucaugacguccuaccaguaccugaucauccagaacaccaccugggaggaccacugccaguucagccggcccagccccaucggcuaccuggggcuccugucccagcgcacccgggacaucuacaucagccgccggcugcucggcacguucaccuggacccuguccgacagcgagggcaacgagacccccgggggcuacugccugacgcgcuggaugcucaucgaggccgagcugaagugcuucgggaacaccgccguggccaagugcaacgagaagcacgacgaggaguucugcgacaugcugcggcuguucgacuucaacaagcaggcgauccgccggcugaagaccgaggcccagauguccauccagcugaucaacaaggccgugaacgcccucaucaacgaccagcugaucaugaagaaccaccuccgcgacaucaugugcaucccguacugcaacuacagcaaguacugguaccucaaccacaccgucacgggcaagaccucccugccccggugcuggcuggugagcaacggguccuaccucaacgagacccacuucagcgacgacaucgagcagcaggccgacaacaugaucaccgagcugcugcagaaggaguacaucgaccgccagggcaagacgccccugggccucguggaccuguucgucuucuccaccagcuucuaccugaucuccaucuuccuccaccuggugaagaucccgacccaccggcacaucaccgggaagcccugccccaagccccaccgccugaaccacaugggcaucugcagcugcgggcucuacaaccacccgggcgugcccgucaaguggaagcggugaggacuaguuauaagacugacuagcccgaugggccucccaacgggcccuccuccccuccuugcaccgagauuaaucaaaggcucuuuucagagccaccaaaaaaaaaaaaaaaaaaaaaaaaaaaaaaaaaaaaaaaaaaaaaaaaaaaaaaaaaaaaaaaaaaaaaaaaaaaaaaaaaaaaaaaaaaaaaaaaaaaaa

SEQ ID NO: 36305 - RNA, 1686 nt, Artificial Sequence
  mRNA product Design i-3 (hSL-A100) comprising derived and/or modified sequence from LASV(Lassa virus/H.sapiens-wt/NGA/2016/ISTH_0017;Clade II)__AVO03567__GPCmut9 (opt1)
aggagaaagcuuaccaugggccagaucaucaccuucuuccaggaggugccccacgucaucgaggaggugaugaacaucgugcugaucgcccucagccugcuggccauccucaaggggaucuacaacgucgcgaccugcggccuguucgggcugguguccuuccuccugcugugcggccgcagcugcuccacgaccuacaaggggguguacgagcuccagacccuggagcuggacauggccagccucaacaugaccaugccgcuguccugcacgaagaacaacagccaccacuacaucauggucggcaacgagaccggccuggagcucacccugaccaacacguccaucaucaaccacaaguucugcaaccugagcgacgcccacaagaagaaccucuacgaccacgcccugauguccaucaucagcaccuuccaccuguccauccccaacuucaaccaguacgaggccaugagcugcgacuucaacgggggcaagaucuccgugcaguacaaccucagccacaccuacgcgaucgacgccgccaaccacugcgggaccaucgccaacggcgugcugcagacguucaugcggauggcguggggcggguccuacaucgcccuggacagcggcugcggguccugggacugcaucaugaccagcuaccaguaccucaucauccagaacaccaccugggaggaccacugccaguucucccgccccagccccaucggcuaccuggggcugcucagccagcggacgcgcgacaucuacaucucccggcgccugcugggcaccuucaccuggacccucagcgacuccgagggcaacgagacgcccgggggcuacugccugacccgguggaugcugaucgaggccgagcucaagugcuucgggaacaccgccgucgccaagugcaacgagaagcacgacgaggaguucugcgacaugcugcgccuguucgacuucaacaagcaggcgauccggcgccucaagaccgaggcccagaugagcauccagcugaucaacaaggccgugaacgcccugaucaacgaccagcucaucaugaagaaccaccuccgggacaucaugugcauccccuacugcaacuacuccaaguacugguaccugaaccacacggugaccggcaagaccagccugccccgcugcuggcuggucuccaacgggagcuaccugaacgagacccacuucuccgacgacaucgagcagcaggccgacaacaugaucacggagcuccugcagaaggaguacauggaccggcagggcaagaccccgcugggccugguggaccucuucguguucagcaccuccuucuaccugaucagcaucuuccugcaccucguccgcaucccgacccaccggcacgugaucgggaagcccugccccaagccccaccgccugaaccacaugggcaucugcuccugcgggcuguacaagcacccgggcgugcccgucaaguggaagcggugaggacuaguuauaagacugacuagcccgaugggccucccaacgggcccuccuccccuccuugcaccgagauuaaucaaaggcucuuuucagagccaccaaaaaaaaaaaaaaaaaaaaaaaaaaaaaaaaaaaaaaaaaaaaaaaaaaaaaaaaaaaaaaaaaaaaaaaaaaaaaaaaaaaaaaaaaaaaaaaaaaaaa

SEQ ID NO: 36306 - RNA, 1686 nt, Artificial Sequence
  mRNA product Design i-3 (hSL-A100) comprising derived and/or modified sequence from LASV(Lassa virus/H.sapiens-wt/NGA/2018/ISTH_0959;Clade II)__AVV65099__GPCmut9 (opt1)
aggagaaagcuuaccaugggccagaucaucaccuucuuccaggaggugccccacgucaucgaggaggugaugaacaucgugcugaucgcccucagccugcuggccauccucaaggggaucuacaacgucgugaccugcggccuguucgggcugguguccuuccuccugcugugcggccgcagcugcuccacgaccuacaagggggucuacgagcuccagacccuggagcuggacauggcgagccucaacaugaccaugccgcuguccugcacgaagaacaacagccaccacuacaucauggugggcaacgagaccggccuggagcucacccugaccaacacguccaucaucaaccacaaguucugcaaccugagcgacgcccacaagaagaaccucuacgaccacgcccugauguccaucaucagcaccuuccaccuguccauccccaacuucaaccaguacgaggccaugagcugcgacuucaacgggggcaagaucuccgugcaguacaaccucagccacgccuacgcgaucgacgccgccaaccacugcgggaccaucgccaacggcguccugcagaccuucaugcggauggcguggggcggguccuacaucgcccuggacagcggcugcggguccugggacugcaucaugacgagcuaccaguaccucaucauccagaacaccaccugggaggaccacugccaguucucccgccccagccccaucggcuaccuggggcugcucagccagcggacccgcgacaucuacaucucccggcgccugcugggcacguucaccuggacccucagcgacuccgagggcaacgagacccccgggggcuacugccugacgcgguggaugcugaucgaggccgagcucaagugcuucgggaacaccgccguggccaagugcaacgagaagcacgacgaggaguucugcgacaugcugcgccuguucgacuucaacaagcaggcgauccggcgccucaagaccgaggcccagaugagcauccagcugaucaacaaggccgugaacgcccugaucaacgaccagcucaucaugaagaaccaccuccgggacaucaugugcaucccguacugcaacuacuccaaguacugguaccugaaccacaccgucacgggcaagaccagccugccccgcugcuggcugguguccaacgggagcuaccugaacgagacccacuucuccgacgacaucgagcagcaggccgacaacaugaucaccgagcuccugcagaaggaguacaucgaccggcagggcaagacgccccugggccugguggaccucuucgucuucagcaccuccuucuaccugaucagcaucuuccugcaccucgugaagaucccgacccaccgccacgugaucgggaagcccugccccaagccccaccggcugaaccacaugggcaucugcuccugcgggcuguacaagcacccgggcguccccgugaaguggaagcgcugaggacuaguuauaagacugacuagcccgaugggccucccaacgggcccuccuccccuccuugcaccgagauuaaucaaaggcucuuuucagagccaccaaaaaaaaaaaaaaaaaaaaaaaaaaaaaaaaaaaaaaaaaaaaaaaaaaaaaaaaaaaaaaaaaaaaaaaaaaaaaaaaaaaaaaaaaaaaaaaaaaaaa

SEQ ID NO: 36307 - RNA, 1686 nt, Artificial Sequence
  mRNA product Design i-3 (hSL-A100) comprising derived and/or modified sequence from LASV(LASV003-NIG-2008;Clade II)__AIT17580__GPCmut9 (opt1)
aggagaaagcuuaccaugggccagaucaucaccuucuuccaggaggugccccacgucaucgaggaggugaugaacaucgugcugaucgcccucagccugcuggccauccucaaggggaucuacaacgucgcgaccugcggccuguucgggcugguguccuuccuccugcugugcggccgcagcugcuccacgaccuacaaggggguguacgagcuccagacccuggagcuggacauggccagccucaacaugaccaugccgcuguccugcacgaagaacaacagccaccacuacaucauggucggcaacgagaccggccuggagcucacccugaccaacacguccaucaucaaccacaaguucugcaaccugagcgacgcccacaagaagaaccucuacgaccacgcccugauguccaucaucagcaccuuccaccuguccauccccaacuucaaccaguacgaggccaugagcugcgacuucaacgggggcaagaucuccgugcaguacaaccucagccacaccuacgcgguggacgccgccaaccacugcgggaccaucgccaacggcguccugcagacguucaugcggauggcguggggcggguccuacaucgcccuggacagcggcugcggguccugggacugcaucaugaccagcuaccaguaccucaucauccagaacaccaccugggaggaccacugccaguucucccgccccagccccaucggcuaccuggggcugcucagccagcggacgcgcgacaucuacaucucccggcgccugcugggcaccuucaccuggacccucagcgacuccgagagcaacgagacgccgggcggguacugccugacccgguggaugcugaucgaggccgagcucaagugcuucggcaacaccgccguggccaagugcaacgagaagcacgacgaggaguucugcgacaugcugcgccuguucgacuucaacaagcaggcgauccggcgccucaaggccgaggcccagauguccauccagcugaucaacaaggccgugaacgcccugaucaacgaccagcucaucaugaagaaccaccuccgggacaucaugugcauccccuacugcaacuacagcaaguacugguaccugaaccacaccgucacggggcgcaccucccugccccggugcuggcuggugagcaacggcuccuaccugaacgagacccacuucagcgacgacaucgagcagcaggcggacaacaugaucaccgagcuccugcagaaggaguacauggaccgccaggggaagacgccccugggccugguggaccucuucgucuucuccaccagcuucuaccugaucuccaucuuccugcaccucgugaagaucccgacccaccggcacgugaucggcaagcccugccccaagccccaccgccugaaccacauggggaucugcagcugcggccuguacaagcacccggggguccccgugaaguggaagcggugaggacuaguuauaagacugacuagcccgaugggccucccaacgggcccuccuccccuccuugcaccgagauuaaucaaaggcucuuuucagagccaccaaaaaaaaaaaaaaaaaaaaaaaaaaaaaaaaaaaaaaaaaaaaaaaaaaaaaaaaaaaaaaaaaaaaaaaaaaaaaaaaaaaaaaaaaaaaaaaaaaaaa

SEQ ID NO: 36308 - RNA, 1686 nt, Artificial Sequence
  mRNA product Design i-3 (hSL-A100) comprising derived and/or modified sequence from LASV(LASV035-NIG-2009;Clade II)__AIT17588__GPCmut9 (opt1)
aggagaaagcuuaccaugggccagaucaucaccuucuuccaggaggugccccacgucaucgaggaggugaugaacaucgugcugaucgcccucagccugcuggccauccucaaggggaucuacaacgucgcgaccugcggccuguucgggcugguguccuuccuccugcugugcggccgcagcugcuccacgaccuacaaggggguguacgagcuccagacccuggagcuggacauggccagccucaacaugaccaugccgcuguccugcacgaagaacaacagccaccacuacaucauggucggcaacgagaccggccuggagcucacccugaccaacacguccaucaucaaccacaaguucugcaaccugagcgacgcccacaagaagaaccucuacgaccacgcccugauguccaucaucagcaccuuccaccuguccauccccaacuucaaccaguacgaggccaugagcugcgacuucaacgggggcaagaucuccgugcaguacaaccucagccacgcguacgccguggacgccgccaaccacugcgggaccaucgcgaacggcguccugcagaccuucaugcggauggccuggggcggguccuacaucgcccuggacagcggcugcggguccugggacugcaucaugacgagcuaccaguaccucaucauccagaacaccaccugggaggaccacugccaguucucccgccccagccccaucggcuaccuggggcugcucagccagcggacccgcgacaucuacaucucccggcgccugcugggcacguucaccuggacccucagcgacuccgagggcaacgagacccccgggggcuacugccugacgcgguggaugcugaucgaggccgagcucaagugcuucgggaacaccgccguggcgaagugcaacgagaagcacgacgaggaguucugcgacaugcugcgccuguucgacuucaacaagcaggccauccggcgccucaaggccgaggcccagaugagcauccagcugaucaacaaggccgugaacgcgcugaucaacgaccagcucaucaugaagaaccaccuccgggacaucaugugcauccccuacugcaacuacuccaaguacugguaccugaaccacaccgucaccggcaagacgagccugccccgcugcuggcugguguccaacgggagcuaccugaacgagacccacuucuccgacgacaucgagcagcaggccgacaacaugaucaccgagcuccugcagaaggaguacaucgaccggcagggcaagaccccgcugggccugguggaccucuucgucuucagcacguccuucuaccugaucagcaucuuccugcaccucgugaagaucccgacccaccgccacgugaucgggaagcccugccccaagccccaccggcugaaccacaugggcaucugcuccugcgggcuguacaagcacccgggcguccccgugaaguggaagcgcugaggacuaguuauaagacugacuagcccgaugggccucccaacgggcccuccuccccuccuugcaccgagauuaaucaaaggcucuuuucagagccaccaaaaaaaaaaaaaaaaaaaaaaaaaaaaaaaaaaaaaaaaaaaaaaaaaaaaaaaaaaaaaaaaaaaaaaaaaaaaaaaaaaaaaaaaaaaaaaaaaaaaa

SEQ ID NO: 36309 - RNA, 1686 nt, Artificial Sequence
  mRNA product Design i-3 (hSL-A100) comprising derived and/or modified sequence from LASV(LASV1000-NIG-2009;Clade II)__AIT17782__GPCmut9 (opt1)
aggagaaagcuuaccaugggccagaucaucaccuucuuccaggaggugccccacgucaucgaggaggugaugaacaucgugcugaucgcccucagccugcuggccauccucaaggggaucuacaacgucgcgaccugcggccuguucgggcugguguccuuccuccugcugugcggccgcagcugcuccacgaccuacaaggggguguacgagcuccagacccuggagcuggacauggccagccucaacaugaccaugccgcuguccugcacgaagaacaacagccaccacuacaucauggucggcaacgagaccggccuggagcucacccugaccaacacguccaucaucaaccacaaguucugcaaccugagcgacgcccacaagaagaaccucuacgaccacgcccugauguccaucaucagcaccuuccaccuguccauccccaacuucaaccaguacgaggccaugagcugcgacuucaacgggggcaagaucuccgugcaguacaaccucagccacaccuacgcgguggacgccgccaaccacugcgggaccaucgccaacggcguccugcagacguucaugcggauggcguggggcggguccuacaucgcccuggacagcggcugcggguccugggacugcaucaugaccagcuaccaguaccucaucauccagaacaccaccugggaggaccacugccaguucucccgccccagccccaucggcuaccuggggcugcucagccagcggacgcgcgacaucuacaucucccggcgccugcugggcaccuucaccuggacccucagcgacuccgagggcaacgagacgcccgggggcuacugccugacccgguggaugcugaucgaggccgagcucaagugcuucgggaacaccgccguggccaagugcaacgagaagcacgacgaggaguucugcgacaugcugcgccuguucgacuucaacaagcaggcgaucaagcggcucaagaccgaggcccagaugagcauccagcugaucaacaaggccgugaacgcccugaucaacgaccagcucaucaugaagaaccaccuccgcgacaucaugugcauccccuacugcaacuacuccaaguacugguaccugaaccacacggucaccggcaagaccagccugccccggugcuggcugguguccaacgggagcuaccugaacgagacccacuucuccgacgacaucgagcagcaggccgacaacaugaucacggagcuccugcagaaggaguacaucgaccgccagggcaagaccccgcugggccugguggaccucuucgucuucagcaccuccuucuaccugaucagcaucuuccugcaccucgugaagaucccgacccaccggcacguggucgggaagcccugccccaagccccaccgccugaaccacaugggcaucugcuccugcgggcuguacaagcacccgggcgugcccgugaaguggaagcggugaggacuaguuauaagacugacuagcccgaugggccucccaacgggcccuccuccccuccuugcaccgagauuaaucaaaggcucuuuucagagccaccaaaaaaaaaaaaaaaaaaaaaaaaaaaaaaaaaaaaaaaaaaaaaaaaaaaaaaaaaaaaaaaaaaaaaaaaaaaaaaaaaaaaaaaaaaaaaaaaaaaaa

SEQ ID NO: 36310 - RNA, 1686 nt, Artificial Sequence
  mRNA product Design i-3 (hSL-A100) comprising derived and/or modified sequence from LASV(LASV221-NIG-2010;Clade II)__AIT17624__GPCmut9 (opt1)
aggagaaagcuuaccaugggccagaucaucaccuucuuccaggaggugccccacgucaucgaggaggugaugaacaucgugcugaucgcccucagccugcuggccauccucaaggggaucuacaacgucgcgaccugcggccuguucgggcugguguccuuccuccugcugugcggccgcagcugcuccacgaccuacaaggggguguacgagcuccagacccuggagcuggacauggccagccucaacaugaccaugccgcuguccugcacgaagaacaacagccaccacuacaucauggucggcaacgagaccggccuggagcucacccugaccaacacguccaucaucaaccacaaguucugcaaccugagcgacgcccacaagaagaaccucuacgaccacgcccugauguccaucaucagcaccuuccaccuguccauccccaacuucaaccaguacgaggccaugagcugcgacuucaacgggggcaagaucuccgugcaguacaaccucagccacaccuacgcgaucgacgccgccaaccacugcgggaccaucgccaacggcgugcugcagacguucaugcggauggcguggggcggguccuacaucgcccuggacagcggcugcggguccugggacugcaucaugaccagcuaccaguaccucaucauccagaacaccaccugggaggaccacugccaguucucccgccccagccccaucggcuaccuggggcugcucagccagcggacgcgcgacaucuacaucucccggcgccugcugggcaccuucaccuggacccucagcgacuccgagggcaacgagacgcccgggggcuacugccugacccgguggaugcugaucgaggccgagcucaagugcuucgggaacaccgccgucgccaagugcaacgagaagcacgacgaggaguucugcgacaugcugcgccuguucgacuucaacaagcaggcgauccggcgccucaagaccgaggcccagaugagcauccagcugaucaacaaggccgugaacgcccugaucaacgaccagcucaucaugaagaaccaccuccgggacaucaugugcauccccuacugcaacuacuccaaguacugguaccugaaccacacggugaccggcaagaccagccugccccgcugcuggcuggucuccaacgggagcuaccugaacgagacccacuucuccgacgacaucgagcagcaggccgacaacaugaucacggagaugcuccagaaggaguacauggaccggcagggcaagaccccgcugggccugguggaccuguucguguucagcaccuccuucuaccucaucagcaucuuccugcaccuggucaagaucccgacccaccgccacgugaucgggaagcccugccccaagccccaccggcucaaccacaugggcaucugcuccugcgggcuguacaagcacccgggcgugcccgucaaguggaagcgcugaggacuaguuauaagacugacuagcccgaugggccucccaacgggcccuccuccccuccuugcaccgagauuaaucaaaggcucuuuucagagccaccaaaaaaaaaaaaaaaaaaaaaaaaaaaaaaaaaaaaaaaaaaaaaaaaaaaaaaaaaaaaaaaaaaaaaaaaaaaaaaaaaaaaaaaaaaaaaaaaaaaaa

SEQ ID NO: 36311 - RNA, 1686 nt, Artificial Sequence
  mRNA product Design i-3 (hSL-A100) comprising derived and/or modified sequence from LASV(LASV237-NIG-2010;Clade II)__AIT17638__GPCmut9 (opt1)
aggagaaagcuuaccaugggccagaucaucaccuucuuccaggaggugccccacgucaucgaggaggugaugaacaucgugcugaucgcccucagccugcuggccauccucaaggggaucuacaacgucgcgaccugcggccuguucgggcugguguccuuccuccugcugugcggccgcagcugcuccacgaccuacaaggggguguacgagcuccagacccuggagcuggacauggccagccucaacaugaccaugccgcuguccugcacgaagaacaacagccaccacuacaucauggucggcaacgagaccggccuggagcucacccugaccaacacguccaucaucaaccacaaguucugcaaccugagcgacgcccacaagaaggaccucuacgaccacgcccugauguccaucaucagcaccuuccaccuguccauccccaacuucaaccaguacgaggccaugagcugcgacuucaacgggggcaagaucuccgugcaguacaaccucagccacaccuacgcgguggacgccgccaaccacugcgggaccaucgccaacggcguccugcagacguucaugcggauggcguggggcggguccuacaucgcccuggacagcggcugcggguccugggacugcaucaugaccagcuaccaguaccucaucauccagaacaccaccugggaggaccacugccaguucucccgccccagccccaucggcuaccuggggcugcucagccagcggacgcgcgacaucuacaucucccggcgccugcugggcaccuucaccuggacccucagcgacuccgagggcaacgagacgcccgggggcuacugccugacccgguggaugcugaucgaggccgagcucaagugcuucgggaacaccgccguggccaagugcaacgagaagcacgacgaggaguucugcgacaugcugcgccuguucgacuucaacaagcaggcgauccggcgccucaagaccgaggcccagaugagcauccagcugaucaacaaggccgugaacgcccugaucaacgaccagcucaucaugaagaaccaccuccgggacaucaugugcauccccuacugcaacuacuccaaguacugguaccugaaccacacggucaccggcaagaccagccugccccgcugcuggcugguguccaacgggagcuaccugaacgagacccacuucuccgacgacaucgagcagcaggccgacaacaugaucacggagcuccugcagaaggaguacauggaccggcagggcaagaccccgcugggccugguggaccucuucgucuucagcaccuccuucuaccugaucagcaucuuccugcaccucaucaagaucccgacccaccgccacaucacggggaagcccugccccaagccccaccggcugaaccacaugggcaucugcuccugcgggcuguacaagcacccgggcgugcccgugaaguggaagcgcugaggacuaguuauaagacugacuagcccgaugggccucccaacgggcccuccuccccuccuugcaccgagauuaaucaaaggcucuuuucagagccaccaaaaaaaaaaaaaaaaaaaaaaaaaaaaaaaaaaaaaaaaaaaaaaaaaaaaaaaaaaaaaaaaaaaaaaaaaaaaaaaaaaaaaaaaaaaaaaaaaaaaa

SEQ ID NO: 36312 - RNA, 1686 nt, Artificial Sequence
  mRNA product Design i-3 (hSL-A100) comprising derived and/or modified sequence from LASV(LASV253-NIG-2011;Clade II)__AIT17670__GPCmut9 (opt1)
aggagaaagcuuaccaugggccagaucaucaccuucuuccaggaggugccccacgucaucgaggaggugaugaacaucgugcugaucgcccucagccugcuggccauccucaaggggaucuacaacgucgcgaccugcggccuguucgggcugguguccuuccuccugcugugcggccgcagcugcuccacgaccuacaaggggguguacgagcuccagacccuggagcuggacauggccagccucaacaugaccaugccgcuguccugcacgaagaacaacagccaccacuacaucauggucggcaacgagaccggccuggagcucacccugaccaacacguccaucaucaaccacaaguucugcaaccugagcgacgcccacaagaagaaccucuacgaccacgcccugauguccaucaucagcaccuuccaccuguccauccccaacuucaaccaguacgaggccaugagcugcgacuucaacgggggcaagaucuccgugcaguacaaccucagccacaccuacgcgguggacgccgccaaccacugcgggaccaucgccaacggcguccugcagacguucaugcggauggcguggggcggguccuacaucgcccuggacagcggcugcggguccugggacugcaucaugaccagcuaccaguaccucaucauccagaacaccaccugggaggaccacugccaguucucccgccccagccccaucggcuaccuggggcugcucagccagcggacgcgcgacaucuacaucucccggcgccugcugggcaccuucaccuggacccucagcgacuccgagggcaacgagacgcccgggggcuacugccugacccgguggaugcugaucgaggccgagcucaagugcuucgggaacaccgccguggccaagugcaacgagaagcacgacgaggaguucugcgacaugcugcgccuguucgacuucaacaagcaggcgauccggcgccucaaggccgaggcccagaugagcauccagcugaucaacaaggccgugaacgcccugaucaacgaccagcucaucaugaagaaccaccuccgggacaucaugugcaucccguacugcaacuacuccaaguacugguaccugaaccacaccgucacgggccgcaccagccugccccggugcuggcugguguccaacgggagcuaccugaacgagacccacuucuccgacgacaucgagcagcaggcggacaacaugaucaccgagcuccugcagaaggaguacaucgaccgccagggcaagacgccccugggccugguggaccucuucgucuucagcaccuccuucuaccugaucagcaucuuccugcaccucgugaagaucccgacccaccggcacaucaucgggaagcccugccccaagccccaccgccugaaccacaugggcaucugcuccugcgggcuguacaagcacccgggcgugcccgucaaguggaagcggugaggacuaguuauaagacugacuagcccgaugggccucccaacgggcccuccuccccuccuugcaccgagauuaaucaaaggcucuuuucagagccaccaaaaaaaaaaaaaaaaaaaaaaaaaaaaaaaaaaaaaaaaaaaaaaaaaaaaaaaaaaaaaaaaaaaaaaaaaaaaaaaaaaaaaaaaaaaaaaaaaaaaa

SEQ ID NO: 36313 - RNA, 1686 nt, Artificial Sequence
  mRNA product Design i-3 (hSL-A100) comprising derived and/or modified sequence from LASV(LASV254-NIG-2011;Clade II)__AIT17674__GPCmut9 (opt1)
aggagaaagcuuaccaugggccagaucaucaccuucuuccaggaggugccccacgucaucgaggaggugaugaacaucgugcugaucgcccucagccugcuggccauccucaaggggaucuacaacgucgcgaccugcggccuguucgggcugguguccuuccuccugcugugcggccgcagcugcuccacgaccuacaaggggguguacgagcuccagacccuggagcuggacaugaccaaccucaacaugacgaugccgcugagcugcaccaagaacaacucccaccacuacaucauggucggcaacgagaccggccuggagcucacccugacgaacaccagcaucaucaaccacaaguucugcaaccuguccgacgcccacaagaagaaccucuacaaccacgcccugaugagcaucaucuccaccuuccaccugagcauccccaacuucaaccaguacgaggccauguccugcgacuucaacgggggcaagaucagcgugcaguacaaccucucccacagcuacgccguggacgcggccaaccacugcgggaccaucgccaacggcguccugcagacguucaugcggauggccuggggcggguccuacaucgcgcuggacagcggcugcgggaacugggacugcaucaugaccuccuaccaguaccucaucauccagaacaccaccugggaggaccacugccaguucagccgccccucccccaucggcuaccuggggcugcucagccagcggacgcgcgacaucuacaucagccggcgccugcugggcaccuucaccuggacccucuccgacagcgagggcaacgagacgcccgggggcuacugccugacccgguggaugcugaucgaggccgagcucaagugcuucgggaacaccgccguggccaagugcaacgagaagcacgacgaggaguucugcgacaugcugcgccuguucgacuucaacaagcaggccauccggcgccucaagaccgaggcgcaggccaacauccagcugaucaacaaggccgugaacgcccugaucaacgaccagcucaucaugaagaaccaccuccgggacaucaugugcauccccuacugcaacuacuccaaguacugguaccugaaccacacggucaccggcaagaccagccugccccgcugcuggcugguguccaacgggagcuaccugaacgagacccacuucuccgacgacaucgagcagcaggccgacaacaugaucacggagcuccugcagaaggaguacauggaccggcagggcaagaccccgcugggccugguggaccucuucgucuucagcaccuccuucuaccugaucagcaucuuccugcaccucgugaagaucccgacccaccgccacgugaucgggaagcccugccccaagccccaccggcugaaccacaugggcaucugcuccugcgggcuguacaagcacccgggcguccccgugaaguggaagcgcugaggacuaguuauaagacugacuagcccgaugggccucccaacgggcccuccuccccuccuugcaccgagauuaaucaaaggcucuuuucagagccaccaaaaaaaaaaaaaaaaaaaaaaaaaaaaaaaaaaaaaaaaaaaaaaaaaaaaaaaaaaaaaaaaaaaaaaaaaaaaaaaaaaaaaaaaaaaaaaaaaaaaa

SEQ ID NO: 36314 - RNA, 1686 nt, Artificial Sequence
  mRNA product Design i-3 (hSL-A100) comprising derived and/or modified sequence from LASV(Nig08-A19;Clade III)__ADU56618__GPCmut9 (opt1)
aggagaaagcuuaccaugggccagaucgugaccuucuuccaggaggucccccacgugaucgaggaggugaugaacaucguccugaucgcccucagcauccuggccauccugaaggggcucuacaacaucgcgaccugcggccugaucgggcuggugacguuccuccugcuguccggccgcagcugcuccaugaccuacaaggggguguacgagcuccagacccuggagcugaacaugaacacccucaacaugacgaugccgcugagcugcaccaagaacaacucccaccacuacaucauggucggcaacgagaccggccuggagcucacccugacgaacaccagccugcuccaccacaaguucugcaaccuguccgacgcccacaagaagaaccuguacgaccacacccucaugagcaucaucuccaccuuccaccugagcauccccaacuucaaccaguacgaggccauguccugcgacuucaacgggggcaagaucacggugcaguacaaccugagccacuccuacgccaucgacgccgcgaaccacugcgggaccguggccaacggcguccuccagaccuucaugcggauggccuggggcgggagcuacaucgcccuggacuccggcugcgggaagugggacugcaucaugaccagcuaccaguaccugaucauccagaacacgaccugggaggaccacugccaguucucccgccccagccccaucggcuaccucgggcugcugucccagcggacccgcgacaucuacaucagccggcgccuccugggcaccuucacguggacccugagcgacuccgagggcaacgagacccccgggggcuacugccucacccgguggaugcugaucgaggcggagcugaagugcuucgggaacacggccguggccaagugcaacgagaagcacgacgaggaguucugcgacaugcuccgccuguucgacuucaacaagcaggccauccggcgccugaaggccgaggcgcagaugagcauccagcucaucaacaaggccgugaacgcccugaucaacgaccagcugaucaugaagaaccaccuccgggacaucaugugcauccccuacugcaacuacuccaaguacugguaccugaaccacaccagcaccggccgcaccucccugccccggugcuggcucgucagcaacggguccuaccugaacgagacgcacuucagcgacgacaucgagcagcaggccgacaacaugaucaccgagaugcugcagaaggaguaccuggaccgccagggcaagaccccgcucggccugguggaccuguucguguucuccaccagcuucuaccucaucuccaucuuccugcaccuggucaagaucccgacgcaccggcacaucguggggaagcccugccccaagccccaccgccucaaccacaugggcaucugcagcugcgggcuguacaagcagccgggcgugcccguccgguggaagcgcugaggacuaguuauaagacugacuagcccgaugggccucccaacgggcccuccuccccuccuugcaccgagauuaaucaaaggcucuuuucagagccaccaaaaaaaaaaaaaaaaaaaaaaaaaaaaaaaaaaaaaaaaaaaaaaaaaaaaaaaaaaaaaaaaaaaaaaaaaaaaaaaaaaaaaaaaaaaaaaaaaaaaa

SEQ ID NO: 36315 - RNA, 1689 nt, Artificial Sequence
  mRNA product Design i-3 (hSL-A100) comprising derived and/or modified sequence from LASV(G1180-SLE-2010;Clade IV)__AIT17168__GPCmut9 (opt1)
aggagaaagcuuaccaugggccagaucgugaccuucuuccaggaggucccccacgugaucgaggaggugaugaacaucguccugaucgcccucagcauccuggccgugcugaaggggcucuacaacuucgcgaccugcggccugguggggcugcucaccuuccugcugcucugcggccgcuccugcaccgccagccgguacaagggggucuacgagcugcagacccuggagcucaacauggagacccugaacaugacgaugccgcuguccugcaccaagaacaacagccaccacuacaucauggugggcaacgagaccggccucgagcugacccugacgaacaccuccaucaucaaccacaaguucugcaaccucagcgacgcccacaagaagaaccuguacgaccacgcccugauguccaucaucagcaccuuccaccucuccauccccaacuucaaccaguacgaggccaugagcugcgacuucaacgggggcaagaucuccgugcaguacaaccugagccacuccuacgcgggggacgccgccaaccacugcggcaccgucgccaacggggugcugcagacguucaugcgcauggcguggggcggcagcuacaucgcccucgacuccgggugcggcagcugggacugcaucaugaccuccuaccaguaccugaucauccagaacaccaccugggaggaccacugccaguucagccggcccucccccaucggguaccugggccuccugagccagcgcacgcgggacaucuacaucagccgccggcugcucggcaccuucaccuggacccuguccgacagcgaggggaaggacacgccgggcggguacugccugacccgcuggaugcucaucgaggccgagcugaagugcuucggcaacaccgccguggccaagugcaacgagaagcacgacgaggaguucugcgacaugcugcggcuguucgacuucaacaagcaggcgauccagcgccugaaggccgaggcccagauguccauccagcugaucaacaaggccgucaacgcccucaucaacgaccagcugaucaugaagaaccaccuccgggacaucaugugcauccccuacugcaacuacagcaaguacugguaccucaaccacaccacgaccgggaagaccucccugcccaagugcuggcuggugagcaacggcuccuaccucaacgagacccacuucagcgacgacaucgagcagcaggcggacaacaugaucacggagaugcugcagaaggaguacauggagcgccagggcaagacgccccuggggcugguggaccucuucgucuucuccaccagcuucuaccugaucuccaucuuccugcaccucgugaagaucccgacccaccggcacaucgugggcaagagcugccccaagccccaccgccugaaccacauggggaucugcuccugcggccuguacaagcagcccggggucccggugaaguggaagcggugaggacuaguuauaagacugacuagcccgaugggccucccaacgggcccuccuccccuccuugcaccgagauuaaucaaaggcucuuuucagagccaccaaaaaaaaaaaaaaaaaaaaaaaaaaaaaaaaaaaaaaaaaaaaaaaaaaaaaaaaaaaaaaaaaaaaaaaaaaaaaaaaaaaaaaaaaaaaaaaaaaaaa

SEQ ID NO: 36316 - RNA, 1689 nt, Artificial Sequence
  mRNA product Design i-3 (hSL-A100) comprising derived and/or modified sequence from LASV(G1442-SLE-2011;Clade IV)__AIT17180__GPCmut9 (opt1)
aggagaaagcuuaccaugggccagaucgugaccuucuuccaggaggucccccacgugaucgaggaggugaugaacaucguccugaucgcccucagcauccuggccgugcugaaggggcucuacaacguggcgaccugcggccugaucgggcuggucacguuccuccugcugugcggccgcuccugcaccaccacccucuacaaggggguguacgagcugcagacgcuggagcucaacauggagacccugaacaugaccaugccgcugagcugcaccaagaacaacucccaccacuacauccgggugggcaacgagacgggccucgagcugacccugaccaacaccagcaucaucaaccacaaguucugcaaccucuccgacgcccacaagaagaaccuguacgaccacgcccugaugagcaucaucuccacguuccaccucagcauccccaacuucaaccaguacgaggccauguccugcgacuucaacgggggcaagaucagcguccaguacaaccugucccacagcuacgccggggacgcggccaaccacugcggcaccguggccaacggggugcugcagaccuucaugcgcauggccuggggcggcuccuacaucgcgcucgacagcgggugcggcaacugggacugcaucaugaccuccuaccaguaccugaucauccagaacacgaccugggacgaccacugccaguucagccggcccucccccaucggguaccugggccuccugagccagcgcacccgggacgucuacaucucccgccggcugcucggcaccuucacguggacccugagcgacagcgaggggaaggacaccccgggcggguacugccugacccgcuggaugcucaucgaggccgagcugaagugcuucggcaacacggccguggccaagugcaacgagaagcacgacgaggaguucugcgacaugcugcggcuguucgacuucaacaagcaggccauccagcgccugaaggcggaggcccagauguccauccagcugaucaacaaggccgugaacgcccucaucaacgaccagcugaucaugaagaaccaccuccgggacaucaugugcauccccuacugcaacuacagcaaguacugguaccucaacaacaccgccaccgggaagaccucccugcccaagugcuggcugaucagcaacggcuccuaccucaacgagacgcacuucagcgacgacaucgagcaggaggcggacaacaugaucaccgagaugcugcagaaggaguacauggagcgccagggcaagacgccccuggggcuggucgaccucuucguguucuccaccagcuucuaccugaucuccaucuuccugcaccucgugaagaucccgacccaccggcacaucgucggcaagagcugccccaagccccaccgccugaaccacauggggaucugcuccugcggccuguacaagcagcccggggugccggugcgguggaagcgcugaggacuaguuauaagacugacuagcccgaugggccucccaacgggcccuccuccccuccuugcaccgagauuaaucaaaggcucuuuucagagccaccaaaaaaaaaaaaaaaaaaaaaaaaaaaaaaaaaaaaaaaaaaaaaaaaaaaaaaaaaaaaaaaaaaaaaaaaaaaaaaaaaaaaaaaaaaaaaaaaaaaaa

SEQ ID NO: 36317 - RNA, 1689 nt, Artificial Sequence
  mRNA product Design i-3 (hSL-A100) comprising derived and/or modified sequence from LASV(G3010-SLE-2013;Clade IV)__AIT17344__GPCmut9 (opt1)
aggagaaagcuuaccaugggccagaucgugaccuucuuccaggaggucccccacgugaucgaggaggugaugaacaucguccugaucgcccucagcauccuggccgugcugaaggggcucuacaacuucgcgaccugcggccugguggggcuggucacguuccuccugcugugcggccgcuccugcaccaccagccucuacaaggggguguacgagcugcagacccuggagcucaacauggagacgcugaacaugaccaugccgcuguccugcaccaagaacaacagccaccacuacaucauggugggcaacgagaccggccucgagcugacgcugaccaacaccuccaucaucaaccacaaguucugcaaccucagcgacgcccacaagaagaaccuguacaaccacgcccugauguccaucaucagcaccuuccaccucuccauccccaacuucaaccaguacgaggccaugagcugcgacuucaacgggggcaagaucuccguccaguacaaccugagccacuccuacgccggggacgcggccagccacugcggcacgguggccaacggggugcugcagaccuucaugcggauggccuggggcggcuccuacaucgcgcucgacagcgggugcggcaagugggacugcaucaugaccuccuaccaguaccugaucauccagaacaccacgugggaggaccacugccaguucagccgccccucccccaucggguaccugggccuccugagccagcggacccgcgacaucuacaucagccggcgccugcucggcaccuucaccuggacgcuguccgacagcgaggggaaggacaccccgggcggguacugccugacccgguggaugcucaucgaggccgagcugaagugcuucggcaacaccgccgucgccaagugcaacgagaagcacgacgaggaguucugcgacaugcugcgccucuucgacuucaacaagcaggccauccagcggcugaagacggaggcgcagauguccauccagcugaucaacaaggccgugaacgcccucaucaacgaccagcugaucaugaagaaccaccuccgcgacaucaugugcauccccuacugcaacuacagcaaguacugguaccugaaccacaccaccaccgggaagacgucccugcccaagugcuggcuggugagcaacggcuccuaccucaacgagacccacuucagcgacgacaucgagcagcaggccgacaacaugaucaccgagaugcugcagaaggaguacauggagcggcagggcaagacgccccuggggcuggucgaccucuucguguucuccaccagcuucuaccugaucuccaucuuccugcaccucgugaagaucccgacccaccgccacaucgucggcaagagcugccccaagccccaccggcugaaccacauggggaucugcuccugcggccuguacaagcagcccggggugccggugcgcuggaagcggugaggacuaguuauaagacugacuagcccgaugggccucccaacgggcccuccuccccuccuugcaccgagauuaaucaaaggcucuuuucagagccaccaaaaaaaaaaaaaaaaaaaaaaaaaaaaaaaaaaaaaaaaaaaaaaaaaaaaaaaaaaaaaaaaaaaaaaaaaaaaaaaaaaaaaaaaaaaaaaaaaaaaa

SEQ ID NO: 36318 - RNA, 1689 nt, Artificial Sequence
  mRNA product Design i-3 (hSL-A100) comprising derived and/or modified sequence from LASV(G502-SLE-2009;Clade IV)__AIT17126__GPCmut9 (opt1)
aggagaaagcuuaccaugggccagaucgugaccuucuuccaggaggucccccacgugaucgaggaggugaugaacaucguccugaucgcccucagcauccuggccgugcugaaggggcucuacaacuucgcgaccugcggccugguggggcugcucacguuccugcugcucugcggccgcuccugcaccaccgggcuguacaagggcgucuacgagcugcagacccucgagcugaacauggagacgcugaacaugaccaugccgcucagcugcaccaagaacaacucccaccacuacaucauggugggcaacgagaccgggcuggagcugacgcucaccaacaccagcaucaucaaccacaaguucugcaaccuguccgacgcccacaagaagaaccuguacgaccacgcccucaugagcaucaucuccaccuuccaccugagcauccccaacuucaaccaguacgaggccauguccugcgacuucaacggcgggaagaucagcgugcaguacaaccugucccacagcuacgccggcgacgcggccgaccacugcgggacggucgccaacggcgugcuccagaccuucaugcggauggccuggggcggguccuacaucgcgcuggacagcggcugcgggcgcugggacugcaucaugaccuccuaccaguaccugaucauccagaacaccacgugggaggaccacugccaguucagccggcccucccccaucggcuaccucggccugcugagccagcgcacccgggacaucuacaucucccgccggcuccuggggaccuucaccuggacgcugagcgacagcgagggcaaggacacccccgggggcuacugccucacccgcuggaugcugaucgaggccgagcugaagugcuucgggaacaccgccguggccaagugcaacgagaagcacgacgaggaguucugcgacaugcuccggcuguucgacuucaacaagcaggccauccagcgccugaaggcggaggcccagauguccauccagcucaucaacaaggccgucaacgcccugaucaacgaccagcuggugaugaagaaccaccuccgggacaucaugugcauccccuacugcaacuacagccgcuacugguaccugaaccacacgaccaccggccggaccucccugcccaagugcuggcucgugagcaacggcuccuaccugaacgagacgcacuucagcgacgacaucgagcagcaggccgacaacaugaucaccgagaugcugcagaaggaguacauggagcgccaggggaagaccccgcugggccucgucgaccuguucguguucuccaccagcuucuaccugaucuccaucuuccuccaccuggugaagaucccgacgcaccggcacaucgucggcaagagcugccccaagccccaccgccugaaccacauggggaucugcuccugcgggcucuacaagcagcccggcgugccggugaaguggaagcggugaggacuaguuauaagacugacuagcccgaugggccucccaacgggcccuccuccccuccuugcaccgagauuaaucaaaggcucuuuucagagccaccaaaaaaaaaaaaaaaaaaaaaaaaaaaaaaaaaaaaaaaaaaaaaaaaaaaaaaaaaaaaaaaaaaaaaaaaaaaaaaaaaaaaaaaaaaaaaaaaaaaaa

SEQ ID NO: 36319 - RNA, 1689 nt, Artificial Sequence
  mRNA product Design i-3 (hSL-A100) comprising derived and/or modified sequence from LASV(G733-SLE-2010;Clade IV)__AIT17154__GPCmut9 (opt1)
aggagaaagcuuaccaugggccagaucgugaccuucuuccaggaggucccccacgugaucgaggaggugaugaacaucguccugaucgcccucagcauccuggccgugcugaaggggcucuacaacuucgcgaccugcggcaucguggggcuggucuccuuccugcuccugugcggccgcagcugcacgaccucccuguacaaggggguguacgagcuccagacccuggagcugaacauggagacccucaacaugacgaugccgcugagcugcaccaagaacaacucccaccacuacaucauggugggcaacgagaccggccuggagcucacccugacgaacaccagcaucaucaaccacaaguucugcaaccuguccgacgcccacaagaagaaccucuacgaccacgcccugaugagcaucaucuccaccuuccaccugagcauccccaacuucaaccaguacgaggccauguccugcgacuucaacgggggcaagaucagcguccaguacaaccucucccacagcuacgccggggacgcggccaaccacugcggcaccaucgccaacggggugcugcagacguucaugcggauggccuggggcggcuccuacaucgcgcuggacagcgggugcgaccgcugggacugcaucaugaccuccuaccaguaccucaucauccagaacaccaccugggaggaccacugccaguucagccggcccucccccaucggcuaccuggggcugcucagccagcgcacgcgggacaucuacaucagccgccggcugcugggcaccuucaccuggacccucuccgacagcgagggcaaggacacgcccgggggcuacugccugacccgcuggaugcugaucgaggccgagcucaagugcuucgggaacaccgccguggccaagugcaacgagaagcacgacgaggaguucugcgacaugcugcggcuguucgacuucaacaagcaggccauccagcgccucaaggcggaggcccagauguccauccagcugaucaacaaggccgucaacgcccugaucaacgaccagcucaucaugaagaaccaccuccgggacaucaugugcauccccuacugcaacuacagcaaguacugguaccugaaccacaccacgaccggcaagaccucccugcccaagugcuggcuggugagcaacggguccuaccugaacgagacccacuucagcgacgacaucgagcagcaggccgacaacaugaucacggagaugcuccagaaggaguacauggagcgccagggcaagaccccgcugggccugguggaccuguucgucuucuccaccagcuucuaccucaucuccaucuuccugcaccuggugaagaucccgacccaccggcacguggucggcaagagcugccccaagccccaccgccucaaccacauggggaucugcuccugcgggcuguacggccagcccggggugccggugaaguggaagcggugaggacuaguuauaagacugacuagcccgaugggccucccaacgggcccuccuccccuccuugcaccgagauuaaucaaaggcucuuuucagagccaccaaaaaaaaaaaaaaaaaaaaaaaaaaaaaaaaaaaaaaaaaaaaaaaaaaaaaaaaaaaaaaaaaaaaaaaaaaaaaaaaaaaaaaaaaaaaaaaaaaaaa

SEQ ID NO: 36320 - RNA, 1689 nt, Artificial Sequence
  mRNA product Design i-3 (hSL-A100) comprising derived and/or modified sequence from MOPV/LASV reassortant(IGS-1;Clade IV)__AFY05576__GPCmut9 (opt1)
aggagaaagcuuaccaugggccagaucgugaccuucuuccaggaggucccccacgugaucgaggaggugaugaacaucguccugaucgcccucagcgugcuggccgugcugaaggggcucuacaacuucgcgaccugcggccuggucgggcuggugacguuccuccugcugugcggccgcuccugcaccaccagccucuacaaggggguguacgagcugcagacccuggagcucaacauggagacgcugaacaugaccaugccgcuguccugcaccaagaacaacagccaccacuacaucauggucggcaacgagaccggccucgagcugacgcugaccaacaccuccaucaucaaccacaaguucugcaaccucagcgacgcccacaagaagaaccuguacgaccacgcccugauguccaucaucagcaccuuccaccucuccauccccaacuucaaccaguacgaggccaugagcugcgacuucaacgggggcaagaucuccgugcaguacaaccugagccacuccuacgccggggacgcggccaaccacugcggcacgguggccaacgggguccugcagaccuucaugcggauggccuggggcggcagcuacaucgcgcucgacuccgggugcggcaacugggacugcaucaugaccagcuaccaguaccugaucauccagaacaccacgugggaggaccacugccaguucucccgccccagccccaucggguaccugggccuccugucccagcggacccgcgacaucuacaucagccggcgccugcucggcaccuucaccuggacgcugagcgacuccgagggggaggacaccccgggcggguacugccugacccgguggaugcucaucgaggccgagcugaagugcuucggcaacaccgccguggccaagugcaacgagaagcacgacgaggaguucugcgacaugcugcgccucuucgacuucaacaagcaggccauccagcggcugaaggcggaggcccagaugagcauccagcugaucaacaaggccgugaacgcccucaucaacgaccagcugaucaugaagaaccaccuccgcgacaucaugugcauccccuacugcaacuacuccaaguacugguaccugaaccacacgaccaccgggcggaccagccugcccaagugcuggcuggucuccaacggcagcuaccucaacgagacgcacuucuccgacgacaucgagcagcaggccgacaacaugaucaccgagaugcugcagaaggaguacauggagcgccagggcaagacgccccuggggcugguggaccucuucguguucagcaccuccuucuaccugaucagcaucuuccugcaccucgucaagaucccgacccaccggcacaucgugggcaaguccugccccaagccccaccgccugaaccacauggggaucugcagcugcggccuguacaagcagcccggggugccggucaaguggaagcggugaggacuaguuauaagacugacuagcccgaugggccucccaacgggcccuccuccccuccuugcaccgagauuaaucaaaggcucuuuucagagccaccaaaaaaaaaaaaaaaaaaaaaaaaaaaaaaaaaaaaaaaaaaaaaaaaaaaaaaaaaaaaaaaaaaaaaaaaaaaaaaaaaaaaaaaaaaaaaaaaaaaaa

SEQ ID NO: 36321 - RNA, 1689 nt, Artificial Sequence
  mRNA product Design i-3 (hSL-A100) comprising derived and/or modified sequence from LASV(LM765-SLE-2012;Clade IV)__AIT17814__GPCmut9 (opt1)
aggagaaagcuuaccaugggccagaucgugaccuucuuccaggaggucccccacgugaucgaggaggugaugaacaucguccugaucgcccucagcauccuggccgugcugaaggggcucuacaacuucgcgaccugcggccugguggggcuggucacguuccuccugcugugcggccgcuccugcaccaccagccucuacaaggggguguacgagcugcagacccuggagcucaacauggagacgcugaacaugaccaugccgcuguccugcaccaagaacaacagccaccacuacaucauggugggcaacgagaccggccucgagcugacgcugaccaacaccuccaucaucgaccacaaguucugcaaccucagcgacgcccaccggaagaaccuguacgaccacgcccugauguccaucaucagcaccuuccaccucuccauccccaacuucaaccaguacgaggccaugagcugcgacuucaacgggggcaagaucuccguccaguacaaccugagccacuccuacgccaaggacgcggccgaccacugcgggacgguggccaacggcgugcugcagaccuucaugcgcauggccuggggcgggagcuacaucgcgcucgacuccggcugcgggcggugggacugcaucaugaccagcuaccaguaccugaucauccagaacaccacgugggaggaccacugccaguucucccgccccagccccaucggcuaccuggggcuccugucccagcggacccgcgacaucuacaucagccggcgccugcucggcaccuucaccuggacgcugagcgacuccgagggcaaggacacccccgggggcuacugccugacccgguggaugcucaucgaggccgagcugaagugcuucgggaacaccgccgucgccaagugcaacgagaagcacgacgaggaguucugcgacaugcugcgccucuucgacuucaacaagcaggccauccagcggcugaaggcggaggcccagaugagcauccagcugaucaacaaggccgugaacgcccucaucaacgaccagcugaucaugaagaaccaccuccgcgacaucaugugcauccccuacugcaacuacuccaaguacugguaccugaaccacacgaccaccggcaagaccagccugcccaagugcuggcugguguccaacgggagcuaccucaacgagacgcacuucuccgacgacaucgagcagcaggccgacaacaugaucaccgagaugcugcagaaggaguacauggagcggcagggcaagaccccgcugggccuggucgaccucuucguguucagcaccuccuucuaccugaucagcaucuuccugcaccucgugaagaucccgacgcaccgccacaucgucgggaagcccugccccaagccccaccggcugaaccacaugggcaucugcuccugcgggcuguacaagcagccgggcgugcccgugaaguggaagcgcugaggacuaguuauaagacugacuagcccgaugggccucccaacgggcccuccuccccuccuugcaccgagauuaaucaaaggcucuuuucagagccaccaaaaaaaaaaaaaaaaaaaaaaaaaaaaaaaaaaaaaaaaaaaaaaaaaaaaaaaaaaaaaaaaaaaaaaaaaaaaaaaaaaaaaaaaaaaaaaaaaaaaa

SEQ ID NO: 36322 - RNA, 1689 nt, Artificial Sequence
  mRNA product Design i-3 (hSL-A100) comprising derived and/or modified sequence from LASV(LM776-SLE-2012;Clade IV)__AIT17824__GPCmut9 (opt1)
aggagaaagcuuaccaugggccagaucgugaccuucuuccaggaggucccccacgugaucgaggaggugaugaacaucguccugaucgcccucagcauccuggccgugcugaaggggcucuacaacuucgcgaccugcggccugguggggcuggucacguuccuccugcugugcggccgcuccugcaccaccagcguguacaaggggguguacgagcuccagacccuggagcugaacauggagacgcucaacaugaccaugccgcuguccugcaccaagaacaacagccaccacuacaucauggucggcaacgagaccggccuggagcucacgcugaccaacaccuccaucaucaaccacaaguucugcaaccugagcgacgcccacaagaagaaccucuacgaccacgcccugauguccaucaucagcaccuuccaccuguccauccccaacuucaaccaguacgaggccaugagcugcgacuucaacgggggcaagaucuccgugcaguacaaccucagccacuccuacgccggggacgcggccaaccacugcggcacgguggccaacgggguccugcagaccuucaugcggauggccuggggcggcagcuacaucgcgcuggacuccgggugcggcaagugggacugcaucaugaccagcuaccaguaccucaucauccagaacaccacgugggaggaccacugccaguucucccgccccagccccaucggguaccugggccugcucucccagcggacccgcgacaucuacaucagccggcgccugcugggcaccuucaccuggacgcucagcgacuccgaggggaaggacaccccgggcggguacugccugacccgguggaugcugaucgaggccgagcucaagugcuucggcaacaccgccguggccaagugcaacgagaagcacgacgaggaguucugcgacaugcugcgccuguucgacuucaacaagcaggccauccagcggcucaaggcggaggcccagaugagcauccagcugaucaacaaggccgugaacgcccugaucaacgaccagcucaucaugaagaaccaccuccgcgacaucaugugcauccccuacugcaacuacuccaaguacugguaccugaaccacacgaccaccgggaagaccagccugcccaagugcuggcuggucuccaacggcagcuaccugaacgagacgcacuucuccgacgacaucgagcagcaggccgacaacaugaucaccgagaugcuccagaaggaguacauggagcggcagggcaagacgccccuggggcugguggaccuguucguguucagcaccuccuucuaccucaucagcaucuuccugcaccuggucaagaucccgacccaccgccacaucgugggcaaguccugccccaagccccaccggcucaaccacauggggaucugcagcugcggccuguacaagcagcccggggugccgguccgcuggaagcggugaggacuaguuauaagacugacuagcccgaugggccucccaacgggcccuccuccccuccuugcaccgagauuaaucaaaggcucuuuucagagccaccaaaaaaaaaaaaaaaaaaaaaaaaaaaaaaaaaaaaaaaaaaaaaaaaaaaaaaaaaaaaaaaaaaaaaaaaaaaaaaaaaaaaaaaaaaaaaaaaaaaaa

SEQ ID NO: 36323 - RNA, 1689 nt, Artificial Sequence
  mRNA product Design i-3 (hSL-A100) comprising derived and/or modified sequence from LASV(Mad39;Clade IV)__ANH09722__GPCmut9 (opt1)
aggagaaagcuuaccaugggccagaucgugaccuucuuccaggaggucccccacgugaucgaggaggugaugaacaucguccugaucgcccucagcauccuggccgugcugaaggggcucuacaacguggcgaccugcggccugaucgggcuggucacguuccuccugcugugcggccgcuccugcaccaccacccucuacaaggggguguacgagcugcaggcccuggagcucaacauggagacgcugaacaugaccaugccgcugagcugcaccaagaacaacucccaccacuacauccgggugggcaacgagaccggccucgagcugacgcugaccaacaccagccucaucaaccacaaguucugcaaccuguccgacgcccacaagaagaaccuguacgaccacgcccucaugagcaucaucuccaccuuccaccugagcauccccaacuucaaccaguacgaggccauguccugcgacuucaacgacgggaagaucagcguccaguacaaccugucccacacguacgcgggcgacaccgccaaccacugcgggaccguggccaacggcgugcuccagaccuucaugcgcauggccuggggcgggagcuacaucgcgcuggacuccggcugcgggggcugggacugcaucaugacgagcuaccaguaccugaucauccagaacaccaccugggaggaccacugccaguucucccggcccagccccaucggguaccucggccugcugucccagcgcacccgggacaucuacaucagccgccggcuccugggcacguucaccuggacccuguccgacagcgaggggaaggacaccccgggcggguacugccucacgcgcuggaugcugaucgaggccgagcugaagugcuucggcaacaccgccgucgccaagugcaacgagaagcacgacgaggaguucugcgacaugcuccggcuguucgacuucaacaagcaggccauccagcgccugaaggcggaggcccagaugagcauccagcucaucaacaaggccgugaacgcccugaucaacgaccagcugaucaugaagaaccaccuccgggacaucaugugcauccccuacugcaacuacuccaaguacugguaccugaaccacaccgugaccgggaagacgagccugcccaagugcuggcucgucuccaacggcagcuaccugaacgagacccacuucuccgacgacaucgagcagcaggccgacaacaugaucaccgagaugcugcagaaggaguacauggagcgccagggcaagacgccccuggggcucguggaccuguucguguucagcaccuccuucuaccugaucagcaucuuccuccaccuggucaagaucccgacccaccggcacguggugggcaagcccugccccaagccccaccgccugaaccacauggggaucugcuccugcggcuucuacaagcagccggggguccccgugcgguggaagcgcugaggacuaguuauaagacugacuagcccgaugggccucccaacgggcccuccuccccuccuugcaccgagauuaaucaaaggcucuuuucagagccaccaaaaaaaaaaaaaaaaaaaaaaaaaaaaaaaaaaaaaaaaaaaaaaaaaaaaaaaaaaaaaaaaaaaaaaaaaaaaaaaaaaaaaaaaaaaaaaaaaaaaa

SEQ ID NO: 36324 - RNA, 1689 nt, Artificial Sequence
  mRNA product Design i-3 (hSL-A100) comprising derived and/or modified sequence from LASV(Z0947-SLE-2011;Clade IV)__AIT17840__GPCmut9 (opt1)
aggagaaagcuuaccaugggccagaucgugaccuucuuccaggaggucccccacgugaucgaggaggugaugaacaucguccugaucgcccucagcauccuggccgugcugaaggggcucuacaacuucgcgaccugcggccugguggggcuggucacguuccuccugcugugcggccgcuccugcaccaucagccucuacaaggggguguacgagcugcagacccuggagcucaacauggagacccugaacaugacgaugccgcuguccugcaccaagaacaacagccaccacuacaucauggugggcaacgagaccggccucgagcugacccugacgaacaccuccaucaucaaccacaaguucugcaaccucagcgacgcccacaagaagaaccuguacgaccacgcccugauguccaucaucagcaccuuccaccucuccauccccaacuucaaccaguacgaggccaugagcugcgacuucaacgggggcaagaucuccguccaguacaaccugagccacuccuacgccggggacgcggccaaccacugcggcaccguggccaacggggugcugcagacguucaugcggauggccuggggcggcagcuacaucgcgcucgacuccgggugcgaccgcugggacugcaucaugaccagcuaccaguaccugaucauccagaacaccaccugggaggaccacugccaguucucccggcccagccccaucggcuaccuggggcuccugucccagcgcacgcgggacaucuacaucagccgccggcugcucggcaccuucaccuggacccugagcgacuccgagggcaaggacacgcccgggggcuacugccugacccgcuggaugcucaucgaggccgagcugaagugcuucgggaacaccgccgucgccaagugcaacgagaagcacgacgaggaguucugcgacaugcugcggcuguucgacuucaacaagcaggccauccagcgccugaaggcggaggcccagaugagcauccagcugaucaacaaggccgugaacgcccucaucaacgaccagcugaucaugaagaaccaccuccgggacaucaugugcauccccuacugcaacuacuccaaguacugguaccucaaccacaccacgaccggcaagaccagccugcccaagugcuggcugguguccaacgggagcuaccucaacgagacccacuucuccgacgacaucgagcagcaggccgacaacaugaucacggagaugcugcagaaggaguacauggagcgccagggcaagaccccgcugggccuggucgaccucuucguguucagcaccuccuucuaccugaucagcaucuuccugcaccucgugaagaucccgacccaccggcacaucgucgggaagcccugccccaagccccaccgccugaaccacaugggcaucugcuccugcgggcuguacaagcagccgggcgugcccgugaaguggaagcggugaggacuaguuauaagacugacuagcccgaugggccucccaacgggcccuccuccccuccuugcaccgagauuaaucaaaggcucuuuucagagccaccaaaaaaaaaaaaaaaaaaaaaaaaaaaaaaaaaaaaaaaaaaaaaaaaaaaaaaaaaaaaaaaaaaaaaaaaaaaaaaaaaaaaaaaaaaaaaaaaaaaaa

SEQ ID NO: 36325 - RNA, 1689 nt, Artificial Sequence
  mRNA product Design i-3 (hSL-A100) comprising derived and/or modified sequence from LASV(Josiah;Clade IV)__NP_694870__GPCmut9 (opt4)
aggagaaagcuuaccaugggccagaucgugaccuucuuccaggaggugccccacgugaucgaggaggugaugaacaucgugcugaucgcccugagcgugcuggccgugcugaagggccuguacaacuucgccaccugcggccuggugggccuggugaccuuccugcugcugugcggcagaagcugcaccaccagccuguacaagggcguguacgagcugcagacccuggagcugaacauggagacccugaacaugaccaugccccugagcugcaccaagaacaacagccaccacuacaucauggugggcaacgagaccggccuggagcugacccugaccaacaccagcaucaucaaccacaaguucugcaaccugagcgacgcccacaagaagaaccuguacgaccacgcccugaugagcaucaucagcaccuuccaccugagcauccccaacuucaaccaguacgaggccaugagcugcgacuucaacggcggcaagaucagcgugcaguacaaccugagccacagcuacgccggcgacgccgccaaccacugcggcaccguggccaacggcgugcugcagaccuucaugagaauggccuggggcggcagcuacaucgcccuggacagcggcugcggcaacugggacugcaucaugaccagcuaccaguaccugaucauccagaacaccaccugggaggaccacugccaguucagcagacccagccccaucggcuaccugggccugcugagccagagaaccagagacaucuacaucagcagaagacugcugggcaccuucaccuggacccugagcgacagcgagggcaaggacacccccggcggcuacugccugaccagauggaugcugaucgaggccgagcugaagugcuucggcaacaccgccguggccaagugcaacgagaagcacgacgaggaguucugcgacaugcugagacuguucgacuucaacaagcaggccauccagagacugaaggccgaggcccagaugagcauccagcugaucaacaaggccgugaacgcccugaucaacgaccagcugaucaugaagaaccaccugagagacaucaugugcauccccuacugcaacuacagcaaguacugguaccugaaccacaccaccaccggcagaaccagccugcccaagugcuggcuggugagcaacggcagcuaccugaacgagacccacuucagcgacgacaucgagcagcaggccgacaacaugaucaccgagaugcugcagaaggaguacauggagagacagggcaagaccccccugggccugguggaccuguucguguucagcaccagcuucuaccugaucagcaucuuccugcaccuggugaagauccccacccacagacacaucgugggcaagagcugccccaagccccacagacugaaccacaugggcaucugcagcugcggccuguacaagcagcccggcgugcccgugaaguggaagagaugaggacuaguuauaagacugacuagcccgaugggccucccaacgggcccuccuccccuccuugcaccgagauuaaucaaaggcucuuuucagagccaccaaaaaaaaaaaaaaaaaaaaaaaaaaaaaaaaaaaaaaaaaaaaaaaaaaaaaaaaaaaaaaaaaaaaaaaaaaaaaaaaaaaaaaaaaaaaaaaaaaaaa

SEQ ID NO: 36326 - RNA, 1686 nt, Artificial Sequence
  mRNA product Design i-3 (hSL-A100) comprising derived and/or modified sequence from LASV(LP;Clade I)__AAF86701__GPCmut9 (opt4)
aggagaaagcuuaccaugggccagaucaucaccuucuuccaggaggugccccacgugaucgaggaggugaugaacaucgugcugaucgcccugagccugcuggccauccugaagggccuguacaacaucgccaccugcggcaucaucggccugguggccuuccuguuccugugcggcaagagcugcagccugacccugaagggcggcuacgagcugcagacccuggagcugaacauggagacccugaacaugaccaugccccugagcugcaccaagaacagcagccaccacuacaucagagugggcaacgagaccggccuggagcugacccugaccaacaccagcaucaucaaccacaaguucugcaaccugagcgacgcccacaagaagaaccuguacgaccacgcccugaugagcaucaucagcaccuuccaccugagcauccccaacuucaaccaguacgaggccaugagcugcgacuucaacggcggcaagaucagcgugcaguacaaccugagccacagcuacgccggcgacgccgccgagcacugcggcaccguggccaacggcgugcugcagaccuucaugagaauggccuggggcggcagauacaucgcccuggacagcggcugcggcaacugggacugcaucaugaccagcuaccaguaccugaucauccagaacaccaccugggaggaccacugccaguucagcagacccagccccaucggcuaccugggccugcugagccagagaaccagagacaucuacaucagcagaagacugcugggcaccuucaccuggacccugagcgacagcgagggcaacgagacccccggcggcuacugccugaccagauggaugcugaucgaggccgagcugaagugcuucggcaacaccgccguggccaagugcaacgagaagcacgacgaggaguucugcgacaugcugagacuguucgacuucaacaagcaggccaucagaagacugaaggccgaggcccagaugagcauccagcugaucaacaaggccgugaacgcccugaucaacgaccagcugaucaugaagaaccaccugagagacaucaugugcauccccuacugcaacuacagcaaguacugguaccugaaccacaccagcagcggcagaaccagccugcccaagugcuggcugaucagcaacggcagcuaccugaacgagacccaguucagcgacgacaucgagcagcaggccgacaacaugaucaccgagaugcugcagaaggaguacaucgagagacagggcaagaccccccugggccugguggacaucuucaucuucagcaccagcuucuaccugaucagcaucuuccugcaccugaucaagauccccacccacagacacaucgugggcaagcccugccccaagccccacagacugaaccacaugggcgugugcagcugcggccuguacaagcaccccggcgugcccaccaaguggaagagaugaggacuaguuauaagacugacuagcccgaugggccucccaacgggcccuccuccccuccuugcaccgagauuaaucaaaggcucuuuucagagccaccaaaaaaaaaaaaaaaaaaaaaaaaaaaaaaaaaaaaaaaaaaaaaaaaaaaaaaaaaaaaaaaaaaaaaaaaaaaaaaaaaaaaaaaaaaaaaaaaaaaaa

SEQ ID NO: 36327 - RNA, 1686 nt, Artificial Sequence
  mRNA product Design i-3 (hSL-A100) comprising derived and/or modified sequence from LASV(803213;Clade II)__AAF86703__GPCmut9 (opt4)
aggagaaagcuuaccaugggccagaucaucaccuucuuccaggaggugccccacgugaucgaggaggugaugaacaucgugcugaucgcccugagccugcuggccauccugaagggcaucuacaacguggccaccugcggccuguucggccugaucagcuuccugcugcugugcggcagaagcugcagcgugaccuacaagggcguguacgagcugcagacccuggagcugaacauggccaaccugaacaugaccaugccccugagcugcaccaagaacaacagccaccacuacaucauggugggcaacgagaccggccuggagcugacccugaccaacaccagcaucaucaaccacaaguucugcaaccugagcgacgcccacaagaagaaccuguacgaccacgcccugaugagcaucaucagcaccuuccaccugagcauccccaacuucaaccaguacgaggccaugagcugcgacuucaacggcggcaagaucagcgugcaguacaaccugagccacagcuucgccguggacgccgccaaccacugcggcaccaucgccaacggcgugcugcagaccuucaugagaauggccuggggcggcagcuacaucgcccuggacagcggcugcggcaacugggacugcaucaugaccagcuaccaguaccugaucauccagaacaccaccugggaggaccacugccaguucagcagacccagccccaucggcuaccugggccugcugagccagagaaccagagacaucuacaucagcagaagacugcugggcaccuucaccuggacccugagcgacagcgagggcaacgaggcccccggcggcuacugccugaccagauggaugcugaucgaggccgagcugaagugcuucggcaacaccgccguggccaagugcaacgagaagcacgacgaggaguucugcgacaugcugagacuguucgacuucaacaagcaggccaucaagagacugaagaccgaggcccagaugagcauccagcugaucaacaaggccgugaacgcccugaucaacgaccagcugaucaugaagaaccaccugagagacaucaugugcauccccuacugcaacuacagcagauacugguaccugaaccacaccgugaccggcaagaccagccugcccagaugcuggcuggugagcaacggcagcuaccugaacgagacccacuucagcgacgacaucgagcagcaggccgacaacaugaucaccgagaugcugcagaaggaguacauggacagacagggcaagaccccccugggccugguggaccuguucguguucagcaccagcuucuaccugaucagcaucuuccugcaccuggugaagauccccacccacagacacaucgugggcaagcccugccccaagccccacagacugaaccacaugggcaucugcagcugcggccuguacaagcaccccggcgugcccgugaaguggaagagaugaggacuaguuauaagacugacuagcccgaugggccucccaacgggcccuccuccccuccuugcaccgagauuaaucaaaggcucuuuucagagccaccaaaaaaaaaaaaaaaaaaaaaaaaaaaaaaaaaaaaaaaaaaaaaaaaaaaaaaaaaaaaaaaaaaaaaaaaaaaaaaaaaaaaaaaaaaaaaaaaaaaaa

SEQ ID NO: 36328 - RNA, 1686 nt, Artificial Sequence
  mRNA product Design i-3 (hSL-A100) comprising derived and/or modified sequence from LASV(GA391;Clade III)__CAA36645__GPCmut9 (opt4)
aggagaaagcuuaccaugggccagaucgugaccuucuuccaggaggugccccacgugaucgaggaggugaugaacaucgugcugaucgcccugagcauccuggccauccugaagggccuguacaacguggccaccugcggccugaucggccuggugaccuuccugcugcugagcggcagaagcugcagccugaucuacaagggcaccuacgagcugcagacccuggagcugaacauggagacccugaacaugaccaugccccugagcugcaccaagaacaacagccaccacuacaucagagugggcaacgagaccggccuggagcugacccugaccaacaccagcauccugaaccacaaguucugcaaccugagcgacgcccacaagagaaaccuguacgaccacagccugaugagcaucaucagcaccuuccaccugagcauccccaacuucaaccaguacgaggccaugagcugcgacuucaacggcggcaagaucaccgugcaguacaaccugagccacagcuucgccguggacgccgccggccacugcggcacccuggccaacggcgugcugcagaccuucaugagaauggccuggggcggcagcuacaucgcccuggacagcggcugcggcaacugggacugcaucaugaccagcuaccaguaccugaucauccagaacaccaccugggacgaccacugccaguucagcagacccagccccaucggcuaccugggccugcugagccagagaaccagagacaucuacaucagcagaagacugcugggcaccuucaccuggacccugagcgacagcgagggcaacgagacccccggcggcuacugccugaccagauggaugcugaucgaggccgagcugaagugcuucggcaacaccgccguggccaagugcaacgagaagcacgacgaggaguucugcgacaugcugagacuguucgacuucaacaagcaggccaucagaagacugaagaccgaggcccagaugagcauccagcugaucaacaaggccgugaacgcccugaucaacgaccagcugaucaugaagaaccaccugagagacaucaugugcauccccuacugcaacuacagcagauacugguaccugaaccacaccagcaccggcaagaccagccugcccagaugcuggcugaucagcaacggcagcuaccugaacgagaccaaguucagcgacgacaucgagcagcaggccgacaacaugaucaccgagaugcugcagaaggaguacaucgacagacagggcaagaccccccugggccugguggaccuguucguguucagcaccagcuucuaccugaucagcaucuuccugcaccuggugaagauccccacccacagacacaucgugggcaagcccugccccaagccccacagacugaaccacaugggcaucugcagcugcggccuguacaagcagcccggcgugcccgugagauggaagagaugaggacuaguuauaagacugacuagcccgaugggccucccaacgggcccuccuccccuccuugcaccgagauuaaucaaaggcucuuuucagagccaccaaaaaaaaaaaaaaaaaaaaaaaaaaaaaaaaaaaaaaaaaaaaaaaaaaaaaaaaaaaaaaaaaaaaaaaaaaaaaaaaaaaaaaaaaaaaaaaaaaaaa

SEQ ID NO: 36329 - RNA, 1689 nt, Artificial Sequence
  mRNA product Design i-3 (hSL-A100) comprising derived and/or modified sequence from LASV(AV;Clade V)__CCA30314__GPCmut9 (opt4)
aggagaaagcuuaccaugggccagaucgugaccuucuuccaggaggugccccacgugaucgaggaggugaugaacaucgugcugaucgcccugagcauccuggccgugcugaagggccuguacaacaucgccaccugcggccugaucggccugaucaccuuccugcugcugugcggcagaagcugcagcagcaaccuguacaagggcguguacgagcugcagagccuggaccugaacauggagacccugaacaugaccaugccccugagcugcaccaagaacaacagccaccacuacaucagagugggcaacgacaccggccuggagcugacccugaccaacaccagcauccugaaccacaaguucugcaaccugagcgacgcccacaagaaggaccuguacgaccacgcccugaugagcaucaucagcaccuuccaccugagcauccccaacuucaaccaguacgaggccaugagcugcgacuucaacggcggcaagaucagcgugcaguacaaccugagccacagcuacgccaucgacgccgccaaccacugcggcaccguggccaacggcauccugcagaccuucaugagaauggccuggggcggcagcuacaucgcccuggacagcggcugcggcaacugggacugcaucaugaccagcuaccaguaccugaucauccagaacaccaccugggagaaccacugccaguucagcagacccagccccaucggcuaccugggccugcugagccagagaaccagagacaucuacaucagcagaagacugcugggcaccuucaccuggacccugagcgacagcgagggcaacgccacccccggcggcuacugccugaccagauggaugcugaucgaggccgagcugaagugcuucggcaacaccgccguggccaagugcaacgagaagcacgacgaggaguucugcgacaugcugagacuguucgacuucaacaagcaggccaucagcagacugaagagcgaggcccagaugagcauccagcugaucaacaaggccgugaacgcccugaucaacgaccagcugaucaugaagaaccaccugagagacaucaugugcauccccuacugcaacuacagcaaguacugguaccugaaccacaccaucaccggcaagaccagccugcccaagugcuggcuggugagcaacggcagcuaccugaacgagacccacuucagcgacgacaucgagcagcaggccgacaacaugaucaccgagaugcugcagaaggaguacauggagagacagggcaagaccccccugggccugguggaccuguucguguucagcaccagcuucuaccugaucagcaucuuccugagacuggugaagauccccacccacagacacaucgugggcaagcccugccccaagccccacagacugaaccacaugggcaucugcagcugcggccuguacaagcagcccggcgugcccgugagauggaagagaugaggacuaguuauaagacugacuagcccgaugggccucccaacgggcccuccuccccuccuugcaccgagauuaaucaaaggcucuuuucagagccaccaaaaaaaaaaaaaaaaaaaaaaaaaaaaaaaaaaaaaaaaaaaaaaaaaaaaaaaaaaaaaaaaaaaaaaaaaaaaaaaaaaaaaaaaaaaaaaaaaaaaa

SEQ ID NO: 36330 - RNA, 1686 nt, Artificial Sequence
  mRNA product Design i-3 (hSL-A100) comprising derived and/or modified sequence from LASV(Togo/2016/7082;Clade VI)__AMR44577__GPCmut9 (opt4)
aggagaaagcuuaccaugggccagaucaucaccuucuuccaggaggugccccacgugaucgaggaggugaugaacaucgugcugaucgcccugagccugcuggccauccugaagggcguguacaacguggccaccugcggcaucaucggccuggugaccuuccuguuccugugcggcagaagcugcagccugaucuacaagggcagcuacgagcugcagacccuggagcugaacauggagacccugaacaugaccaugccccugagcugcaccaagaacagcagccaccacuacaucagagugggcaacgagaccggccuggagcugacccugaccaacaccagcaucaucaaccacaaguucugcaaccugagcgacgcccacaagagaaaccuguacgaccacgcccugaugagcauccugagcaccuuccaccugagcauccccaacuucaaccaguacgaggccaugagcugcgacuucaacggcggcaagaucagcgugcaguacaaccugagccacgccuacgccguggacgccgccgagcacugcggcaccguggccaacggcgugcugcagaccuucaugagaauggccuggggcggcagcuacaucgcccuggacagcggcugcggcaacugggacugcaucaugaccagcuaccaguaccugaucauccagaacaccaccugggaggaccacugccaguucagcagacccagccccaucggcuaccugggccugcugagccagagaaccagagacaucuacaucagcagaagacugcugggcaccuucaccuggacccugagcgacagcgagggcaacgagacccccggcggcuacugccugaccagauggaugcugaucgaggccgagcugaagugcuucggcaacaccgccguggccaagugcaacgagaagcacgacgaggaguucugcgacaugcugagacuguucgacuucaacaagcaggccauccagagacugaagagcgaggcccagaugagcauccagcugaucaacaaggccgugaacgcccugaucaacgaccagcugaucaugaagaaccaccugagagacaugaugugcauccccuacugcaacuacagcaaguacugguaccugaaccacaccagcagcggcagaaccagccugcccaagugcuggcuggugagcaacggcagcuaccugaacgagacccacuucagcgacgacaucgagcagcaggccgacaacaugaucaccgagaugcugcagaaggaguacaucgacagacagggcaagaccccccugggccugguggaccuguucguguucagcaccagcuucuaccugaucagcaucuuccugcaccugaucaagauccccacccacagacacaucgugggcaagcccugccccaagccccacagacugaaccacaugggcaucugcagcugcggccuguacaagcagcccggcgugcccaccagauggaagagaugaggacuaguuauaagacugacuagcccgaugggccucccaacgggcccuccuccccuccuugcaccgagauuaaucaaaggcucuuuucagagccaccaaaaaaaaaaaaaaaaaaaaaaaaaaaaaaaaaaaaaaaaaaaaaaaaaaaaaaaaaaaaaaaaaaaaaaaaaaaaaaaaaaaaaaaaaaaaaaaaaaaaa

SEQ ID NO: 36331 - RNA, 1686 nt, Artificial Sequence
  mRNA product Design i-3 (hSL-A100) comprising derived and/or modified sequence from LASV(KAK-428;Clade n.d. (VII))__ANH09740__GPCmut9 (opt4)
aggagaaagcuuaccaugggccagaucgugaccuucuuccaggaggugccccacgugaucgaggaggugaugaacaucgugcugaucgcccugagccugcuggccauccugaagggccuguacaacuucgccaccugcggcgugaucggccugaucaccuuccugcugcugugcggcagaagcugcagcgccaccuacaagggccaguacgagcugcagacccuggagcugaacauggagagccugaacaugaccaugccccugagcugcaccaagaacaacagccaccacuacaucagagccggcaacaacaccggccuggagcugacccugaccaacaccagcaucaucagccacaaguucugcaaccugagcgacgcccacaagaagaaccuguacgaccacacccugaugagcaucaucaccaccuuccaccugagcauccccaacuucaaccaguacgaggccaugagcugcgacuucaacggcggcaagaucagcauccaguacaaccugagccacagcuacgccggcgacgccgcccagcacugcggcaccguggccaacggcgugcugcagaccuucaugagaauggccuggggcggcagcuaccuggcccuggacagcggcugcagaggcugggacugcaucaucagcagcuaccaguaccugaucauccagaacaccaccugggacgaccacugccaguucagcagacccagccccaucggcuaccugggcuucgugagccagaagaccagagacaucuacaucagcagaagacugcugggcaccuucaccuggacccugagcgacagcgagggccacgacaugcccggcggcuacugccugaccagauggaugcugaucgaggccgaccugaagugcuucggcaacaccgccguggccaagugcaacgagaagcacgacgaggaguucugcgacauguggagacuguucgacuucaacaagcaggccauccagagacugaaggccgaggcccagaugaacauccagcugaucaacaaggccgugaacgcccugaucaacgaccagcugaugaugaagaaccaccugagagacaucaugugcauccccuacugcaacuacagcaaguucugguaccugaacaacaccaccaccggcagaaccagccugcccagaugcuggcugaucagcaacggcagcuaccugaacgagacccacuucagcgacgacaucgagcagcaggccgacaacaugaucaccgagaugcugcagaaggaguacauggacagacagggcaagaccccccugggccugguggaccuguucguguucagcaccagcuucuaccugaucaccaucuuccugcaccuggugaagauccccacccacagacacaucgugggcaagcccugccccaagccccacagacugaaccacaugggcaucugcagcugcggccuguacaagcagcccggcgugcccgugagauggaagagaugaggacuaguuauaagacugacuagcccgaugggccucccaacgggcccuccuccccuccuugcaccgagauuaaucaaaggcucuuuucagagccaccaaaaaaaaaaaaaaaaaaaaaaaaaaaaaaaaaaaaaaaaaaaaaaaaaaaaaaaaaaaaaaaaaaaaaaaaaaaaaaaaaaaaaaaaaaaaaaaaaaaaa

SEQ ID NO: 36332 - RNA, 1686 nt, Artificial Sequence; identical to SEQ ID NO: 36326
  mRNA product Design i-3 (hSL-A100) comprising derived and/or modified sequence from LASV(Pinneo-NIG-1969;Clade I)__AIT17836__GPCmut9 (opt4)

SEQ ID NO: 36333 - RNA, 1686 nt, Artificial Sequence
  mRNA product Design i-3 (hSL-A100) comprising derived and/or modified sequence from LASV(ISTH0009-NIG-2011;Clade II)__AIT17404__GPCmut9 (opt4)
aggagaaagcuuaccaugggccagaucaucaccuucuuccaggaggugccccacgugaucgaggaggugaugaacaucgugcugaucgcccugagccugcuggccauccugaagggcaucuacaacguggccaccugcggccuguucggccuggugagcuuccugcugcugugcggcagaagcugcagcaccaccuacaagggcguguacgagcugcagacccuggagcuggacauggccagccugaacaugaccaugccccugagcugcaccaagaacaacagccaccacuacaucauggugggcaacgagaccggccuggagcugacccugaccaacaccagcaucaucaaccacaaguucugcaaccugagcgacgcccacaagaagaaccuguacgaccacgcccugaugagcaucaucagcaccuuccaccugagcauccccaacuucaaccaguacgaggccaugagcugcgacuucaacggcggcaagaucagcgugcaguacaaccugagccacgccuacgccguggacgccgccaaccacugcggcaccaucgccaacggcgugcugcagaccuucaugagaauggccuggggcggcagcuacaucgcccuggacagcggcugcggcagcugggacugcaucaugaccagcuaccaguaccugaucauccagaacaccaccugggaggaccacugccaguucagcagacccagccccaucggcuaccugggccugcugagccagagaaccagagacaucuacaucagcagaagacugcugggcaccuucaccuggacccugagcgacagcgagggcaacgagacccccggcggcuacugccugaccagauggaugcugaucgaggccgagcugaagugcuucggcaacaccgccguggccaagugcaacgagaagcacgacgaggaguucugcgacaugcugagacuguucgacuucaacaagcaggccaucagaagacugaagaccgaggcccagaugagcauccagcugaucaacaaggccgugaacgcccugaucaacgaccagcugaucaugaagaaccaccugagagacaucaugugcauccccuacugcaacuacagcaaguacugguaccugaaccacaccgugaccggcaagaccagccugcccagaugcuggcuggugagcaacggcagcuaccugaacgagacccacuucagcgacgacaucgagcagcaggccgacaacaugaucaccgagcugcugcagaaggaguacauggacagacagggcaagaccccccugggccugguggaccuguucguguucagcaccagcuucuaccugaucagcaucuuccugcaccugaucaagauccccacccacagacacaucaccggcaagcccugccccaagccccacagacugaaccacaugggcaucugcagcugcggccuguacaagcaccccggcgugcccgugaaguggaagagaugaggacuaguuauaagacugacuagcccgaugggccucccaacgggcccuccuccccuccuugcaccgagauuaaucaaaggcucuuuucagagccaccaaaaaaaaaaaaaaaaaaaaaaaaaaaaaaaaaaaaaaaaaaaaaaaaaaaaaaaaaaaaaaaaaaaaaaaaaaaaaaaaaaaaaaaaaaaaaaaaaaaaa

SEQ ID NO: 36334 - RNA, 1686 nt, Artificial Sequence
  mRNA product Design i-3 (hSL-A100) comprising derived and/or modified sequence from LASV(ISTH2010-NIG-2012;Clade II)__AIT17482__GPCmut9 (opt4)
aggagaaagcuuaccaugggccagaucaucaccuucuuccaggaggugccccacgugaucgaggaggugaugaacaucgugcugaucgcccugagccugcuggccauccugaagggcaucuacaacguggccaccugcggccuguucggccuggugagcuuccugcugcugugcggcagaagcugcagcaccaccuacaagggcguguacgagcugcagacccuggagcuggacauggccagccugaacaugaccaugccccugagcugcaccaagaacaacagccaccacuacaucauggugggcaacgagaccggccuggagcugacccugaccaacaccagcaucaucaaccacaaguucugcaaccugagcgacgcccacaagaagaaccuguacgaccacgcccugaugagcaucaucagcaccuuccaccugagcauccccaacuucaaccaguacgaggccaugagcugcgacuucaacggcggcaagaucagcgugcaguacaaccugagccacgccuacgccguggacgccgccaaccacugcggcaccaucgccaacggcgugcugcagaccuucaugagaauggccuggggcggcagcuacaucgcccuggacagcggcugcggcagcugggacugcaucaugaccagcuaccaguaccugaucauccagaacaucaccugggaggaccacugccaguucagcagacccagccccaucggcuaccugggccugcugagccagagaaccagagacaucuacaucagcagaagacugcugggcaccuucaccuggacccugagcgacagcgagggcaacgagacccccggcggcuacugccugaccagauggaugcugaucgaggccgagcugaagugcuucggcaacaccgccguggccaagugcaacgagaagcacgacgaggaguucugcgacaugcugagacuguucgacuucaacaagcaggccaucagaagacugaagaccgaggcccagaugagcauccagcugaucaacaaggccgugaacgcccugaucaacgaccagcugaucaugaagaaccaccugagagacaucaugugcauccccuacugcaacuacagcaaguacugguaccugaaccacaccgugaccggcaagaccagccugcccagaugcuggcuggugagcaacggcagcuaccugaacgagacccacuucagcgacgacaucgagcagcaggccgacaacaugaucaccgagcugcugcagaaggaguacaucgacagacagggcaagaccccccugggccugguggaccuguucguguucagcaccagcuucuaccugaucagcaucuuccugcaccuggugaagauccccacccacagacacguggugggcaagcccugccccaagccccacagacugaaccacaugggcaucugcagcugcggccuguacaagcaccccggcgugcccgugaaguggaagagaugaggacuaguuauaagacugacuagcccgaugggccucccaacgggcccuccuccccuccuugcaccgagauuaaucaaaggcucuuuucagagccaccaaaaaaaaaaaaaaaaaaaaaaaaaaaaaaaaaaaaaaaaaaaaaaaaaaaaaaaaaaaaaaaaaaaaaaaaaaaaaaaaaaaaaaaaaaaaaaaaaaaaa

SEQ ID NO: 36335 - RNA, 1686 nt, Artificial Sequence
  mRNA product Design i-3 (hSL-A100) comprising derived and/or modified sequence from LASV(Lassa virus/H.sapiens-wt/NGA/2015/ISTH_0543;Clade II)__AVO03639__GPCmut9 (opt4)
aggagaaagcuuaccaugggccagaucaucaccuucuuccaggaggugccccacgugaucgaggaggugaugaacaucgugcugaucgcccugagccugcuggccauccugaagggcaucuacaacguggccaccugcggccuguucggccuggugagcuuccugcugcugugcggcagaagcugcagcaccaccuacaagggcguguacgagcugcagacccuggagcuggacauggccaaccugaacaugaccaugccccugagcugcaccaagaacaacagccaccacuacaucauggugggcaacgagaccggccuggagcugacccugaccaacaccagcaucaucaaccacaaguucugcaaccugagcgacgcccacaagaagaaccuguacgaccacgcccugaugagcaucaucagcaccuuccaccugagcauccccaacuucaaccaguacgaggccaugagcugcgacuucaacggcggcaagaucagcgugcaguacaaccugagccacaccuacgccguggacgccgccaaccacugcggcaccaucgccaacggcgugcugcagaccuucaugagaauggccuggggcggcagcuacaucgcccuggacagcggcugcggcagcugggacugcaucaugaccagcuaccaguaccuggugauccagaacaccaccugggaggaccacugccaguucagcagacccagccccaucggcuaccugggccugcugagccagagaaccagagacaucuacaucagcagaagacugcugggcaccuucaccuggacccugagcgacagcgagggcaacgagacccccggcggcuacugccugaccagauggaugcugaucgaggccgagcugaagugcuucggcaacaccgccguggccaagugcaacgagaagcacgacgaggaguucugcgacaugcugagacuguucgacuucaacaagcaggccaucagaagacugaagaccgaggcccagaugagcauccagcugaucaacaaggccgugaacgcccugaucaacgaccagcugaucaugaagaaccaccugagagacaucaugugcauccccuacugcaacuacagcaaguacugguaccugaaccacaccgugaccggcaagaccagccugcccagaugcuggcuggugagcaacggcagcuaccugaacgagacccacuucagcgacgacaucgagcagcaggccgacaacaugaucaccgagcugcugcagaaggaguacaucgacagacagggcaagaccccccugggccugguggaccuguucguguucagcaccagcuucuaccugaucagcaucuuccugcaccuggugaagauccccacccacagacacaucaccggcaagcccugccccaagccccacagacugaaccacaugggcaucugcagcugcggccuguacaagcaccccggcgugcccgugaaguggaagagaugaggacuaguuauaagacugacuagcccgaugggccucccaacgggcccuccuccccuccuugcaccgagauuaaucaaaggcucuuuucagagccaccaaaaaaaaaaaaaaaaaaaaaaaaaaaaaaaaaaaaaaaaaaaaaaaaaaaaaaaaaaaaaaaaaaaaaaaaaaaaaaaaaaaaaaaaaaaaaaaaaaaaa

SEQ ID NO: 36336 - RNA, 1686 nt, Artificial Sequence
  mRNA product Design i-3 (hSL-A100) comprising derived and/or modified sequence from LASV(Lassa virus/H.sapiens-wt/NGA/2016/ISTH_0009;Clade II)__AVO03571__GPCmut9 (opt4)
aggagaaagcuuaccaugggccagaucaucaccuucuuccaggaggugccccacgugaucgaggaggugaugaacaucgugcugaucgcccugagccugcuggccauccugaagggcaucuacaacguggccaccugcggccugcugggccuggugagcuuccugcugcugugcggcagaagcugcagcaccaccuacaagggcguguacgagcugcagacccuggagcuggacauggccagccugaacaugaccaugccccugagcugcaccaagaacaacagccaccacuacaucauggugggcaacgagaccggccuggagcugacccugaccaacaccagcaucaucaaccacaaguucugcaaccugagcgacgcccacaagaagaaccuguacgaccacgcccugaugagcaucaucagcaccuuccaccugagcauccccaacuucaaccaguacgaggccaugagcugcgacuucaacggcggcagaaucagcgugcaguacaaccugagccacagcuacgccguggacgccgccaaccacugcggcaccaucgccaacggcgugcugcagaccuucaugagaauggccuggggcggcagcuacaucgcccuggacagcggcugcggcagcugggacugcaucaugaccagcuaccaguaccugaucauccagaacaccaccugggaggaccacugccaguucagcagacccagccccaucggcuaccugggccugcugagccagagaaccagagacaucuacaucagcagaagacugcugggcaccuucaccuggacccugagcgacagcgagggcaacgagacccccggcggcuacugccugaccagauggaugcugaucgaggccgagcugaagugcuucggcaacaccgccguggccaagugcaacgagaagcacgacgaggaguucugcgacaugcugagacuguucgacuucaacaagcaggccaucagaagacugaagaccgaggcccagaugagcauccagcugaucaacaaggccgugaacgcccugaucaacgaccagcugaucaugaagaaccaccugagagacaucaugugcauccccuacugcaacuacagcaaguacugguaccugaaccacaccgugaccggcaagaccagccugcccagaugcuggcuggugagcaacggcagcuaccugaacgagacccacuucagcgacgacaucgagcagcaggccgacaacaugaucaccgagcugcugcagaaggaguacaucgacagacagggcaagaccccccugggccugguggaccuguucguguucagcaccagcuucuaccugaucagcaucuuccugcaccuggugaagauccccacccacagacacaucaccggcaagcccugccccaagccccacagacugaaccacaugggcaucugcagcugcggccuguacaaccaccccggcgugcccgugaaguggaagagaugaggacuaguuauaagacugacuagcccgaugggccucccaacgggcccuccuccccuccuugcaccgagauuaaucaaaggcucuuuucagagccaccaaaaaaaaaaaaaaaaaaaaaaaaaaaaaaaaaaaaaaaaaaaaaaaaaaaaaaaaaaaaaaaaaaaaaaaaaaaaaaaaaaaaaaaaaaaaaaaaaaaaa

SEQ ID NO: 36337 - RNA, 1686 nt, Artificial Sequence
  mRNA product Design i-3 (hSL-A100) comprising derived and/or modified sequence from LASV(Lassa virus/H.sapiens-wt/NGA/2016/ISTH_0017;Clade II)__AVO03567__GPCmut9 (opt4)
aggagaaagcuuaccaugggccagaucaucaccuucuuccaggaggugccccacgugaucgaggaggugaugaacaucgugcugaucgcccugagccugcuggccauccugaagggcaucuacaacguggccaccugcggccuguucggccuggugagcuuccugcugcugugcggcagaagcugcagcaccaccuacaagggcguguacgagcugcagacccuggagcuggacauggccagccugaacaugaccaugccccugagcugcaccaagaacaacagccaccacuacaucauggugggcaacgagaccggccuggagcugacccugaccaacaccagcaucaucaaccacaaguucugcaaccugagcgacgcccacaagaagaaccuguacgaccacgcccugaugagcaucaucagcaccuuccaccugagcauccccaacuucaaccaguacgaggccaugagcugcgacuucaacggcggcaagaucagcgugcaguacaaccugagccacaccuacgccaucgacgccgccaaccacugcggcaccaucgccaacggcgugcugcagaccuucaugagaauggccuggggcggcagcuacaucgcccuggacagcggcugcggcagcugggacugcaucaugaccagcuaccaguaccugaucauccagaacaccaccugggaggaccacugccaguucagcagacccagccccaucggcuaccugggccugcugagccagagaaccagagacaucuacaucagcagaagacugcugggcaccuucaccuggacccugagcgacagcgagggcaacgagacccccggcggcuacugccugaccagauggaugcugaucgaggccgagcugaagugcuucggcaacaccgccguggccaagugcaacgagaagcacgacgaggaguucugcgacaugcugagacuguucgacuucaacaagcaggccaucagaagacugaagaccgaggcccagaugagcauccagcugaucaacaaggccgugaacgcccugaucaacgaccagcugaucaugaagaaccaccugagagacaucaugugcauccccuacugcaacuacagcaaguacugguaccugaaccacaccgugaccggcaagaccagccugcccagaugcuggcuggugagcaacggcagcuaccugaacgagacccacuucagcgacgacaucgagcagcaggccgacaacaugaucaccgagcugcugcagaaggaguacauggacagacagggcaagaccccccugggccugguggaccuguucguguucagcaccagcuucuaccugaucagcaucuuccugcaccuggugagaauccccacccacagacacgugaucggcaagcccugccccaagccccacagacugaaccacaugggcaucugcagcugcggccuguacaagcaccccggcgugcccgugaaguggaagagaugaggacuaguuauaagacugacuagcccgaugggccucccaacgggcccuccuccccuccuugcaccgagauuaaucaaaggcucuuuucagagccaccaaaaaaaaaaaaaaaaaaaaaaaaaaaaaaaaaaaaaaaaaaaaaaaaaaaaaaaaaaaaaaaaaaaaaaaaaaaaaaaaaaaaaaaaaaaaaaaaaaaaa

SEQ ID NO: 36338 - RNA, 1686 nt, Artificial Sequence
  mRNA product Design i-3 (hSL-A100) comprising derived and/or modified sequence from LASV(Lassa virus/H.sapiens-wt/NGA/2018/ISTH_0959;Clade II)__AVV65099__GPCmut9 (opt4)
aggagaaagcuuaccaugggccagaucaucaccuucuuccaggaggugccccacgugaucgaggaggugaugaacaucgugcugaucgcccugagccugcuggccauccugaagggcaucuacaacguggugaccugcggccuguucggccuggugagcuuccugcugcugugcggcagaagcugcagcaccaccuacaagggcguguacgagcugcagacccuggagcuggacauggccagccugaacaugaccaugccccugagcugcaccaagaacaacagccaccacuacaucauggugggcaacgagaccggccuggagcugacccugaccaacaccagcaucaucaaccacaaguucugcaaccugagcgacgcccacaagaagaaccuguacgaccacgcccugaugagcaucaucagcaccuuccaccugagcauccccaacuucaaccaguacgaggccaugagcugcgacuucaacggcggcaagaucagcgugcaguacaaccugagccacgccuacgccaucgacgccgccaaccacugcggcaccaucgccaacggcgugcugcagaccuucaugagaauggccuggggcggcagcuacaucgcccuggacagcggcugcggcagcugggacugcaucaugaccagcuaccaguaccugaucauccagaacaccaccugggaggaccacugccaguucagcagacccagccccaucggcuaccugggccugcugagccagagaaccagagacaucuacaucagcagaagacugcugggcaccuucaccuggacccugagcgacagcgagggcaacgagacccccggcggcuacugccugaccagauggaugcugaucgaggccgagcugaagugcuucggcaacaccgccguggccaagugcaacgagaagcacgacgaggaguucugcgacaugcugagacuguucgacuucaacaagcaggccaucagaagacugaagaccgaggcccagaugagcauccagcugaucaacaaggccgugaacgcccugaucaacgaccagcugaucaugaagaaccaccugagagacaucaugugcauccccuacugcaacuacagcaaguacugguaccugaaccacaccgugaccggcaagaccagccugcccagaugcuggcuggugagcaacggcagcuaccugaacgagacccacuucagcgacgacaucgagcagcaggccgacaacaugaucaccgagcugcugcagaaggaguacaucgacagacagggcaagaccccccugggccugguggaccuguucguguucagcaccagcuucuaccugaucagcaucuuccugcaccuggugaagauccccacccacagacacgugaucggcaagcccugccccaagccccacagacugaaccacaugggcaucugcagcugcggccuguacaagcaccccggcgugcccgugaaguggaagagaugaggacuaguuauaagacugacuagcccgaugggccucccaacgggcccuccuccccuccuugcaccgagauuaaucaaaggcucuuuucagagccaccaaaaaaaaaaaaaaaaaaaaaaaaaaaaaaaaaaaaaaaaaaaaaaaaaaaaaaaaaaaaaaaaaaaaaaaaaaaaaaaaaaaaaaaaaaaaaaaaaaaaa

SEQ ID NO: 36339 - RNA, 1686 nt, Artificial Sequence
  mRNA product Design i-3 (hSL-A100) comprising derived and/or modified sequence from LASV(LASV003-NIG-2008;Clade II)__AIT17580__GPCmut9 (opt4)
aggagaaagcuuaccaugggccagaucaucaccuucuuccaggaggugccccacgugaucgaggaggugaugaacaucgugcugaucgcccugagccugcuggccauccugaagggcaucuacaacguggccaccugcggccuguucggccuggugagcuuccugcugcugugcggcagaagcugcagcaccaccuacaagggcguguacgagcugcagacccuggagcuggacauggccagccugaacaugaccaugccccugagcugcaccaagaacaacagccaccacuacaucauggugggcaacgagaccggccuggagcugacccugaccaacaccagcaucaucaaccacaaguucugcaaccugagcgacgcccacaagaagaaccuguacgaccacgcccugaugagcaucaucagcaccuuccaccugagcauccccaacuucaaccaguacgaggccaugagcugcgacuucaacggcggcaagaucagcgugcaguacaaccugagccacaccuacgccguggacgccgccaaccacugcggcaccaucgccaacggcgugcugcagaccuucaugagaauggccuggggcggcagcuacaucgcccuggacagcggcugcggcagcugggacugcaucaugaccagcuaccaguaccugaucauccagaacaccaccugggaggaccacugccaguucagcagacccagccccaucggcuaccugggccugcugagccagagaaccagagacaucuacaucagcagaagacugcugggcaccuucaccuggacccugagcgacagcgagagcaacgagacccccggcggcuacugccugaccagauggaugcugaucgaggccgagcugaagugcuucggcaacaccgccguggccaagugcaacgagaagcacgacgaggaguucugcgacaugcugagacuguucgacuucaacaagcaggccaucagaagacugaaggccgaggcccagaugagcauccagcugaucaacaaggccgugaacgcccugaucaacgaccagcugaucaugaagaaccaccugagagacaucaugugcauccccuacugcaacuacagcaaguacugguaccugaaccacaccgugaccggcagaaccagccugcccagaugcuggcuggugagcaacggcagcuaccugaacgagacccacuucagcgacgacaucgagcagcaggccgacaacaugaucaccgagcugcugcagaaggaguacauggacagacagggcaagaccccccugggccugguggaccuguucguguucagcaccagcuucuaccugaucagcaucuuccugcaccuggugaagauccccacccacagacacgugaucggcaagcccugccccaagccccacagacugaaccacaugggcaucugcagcugcggccuguacaagcaccccggcgugcccgugaaguggaagagaugaggacuaguuauaagacugacuagcccgaugggccucccaacgggcccuccuccccuccuugcaccgagauuaaucaaaggcucuuuucagagccaccaaaaaaaaaaaaaaaaaaaaaaaaaaaaaaaaaaaaaaaaaaaaaaaaaaaaaaaaaaaaaaaaaaaaaaaaaaaaaaaaaaaaaaaaaaaaaaaaaaaaa

SEQ ID NO: 36340 - RNA, 1686 nt, Artificial Sequence
  mRNA product Design i-3 (hSL-A100) comprising derived and/or modified sequence from LASV(LASV035-NIG-2009;Clade II)__AIT17588__GPCmut9 (opt4)
aggagaaagcuuaccaugggccagaucaucaccuucuuccaggaggugccccacgugaucgaggaggugaugaacaucgugcugaucgcccugagccugcuggccauccugaagggcaucuacaacguggccaccugcggccuguucggccuggugagcuuccugcugcugugcggcagaagcugcagcaccaccuacaagggcguguacgagcugcagacccuggagcuggacauggccagccugaacaugaccaugccccugagcugcaccaagaacaacagccaccacuacaucauggugggcaacgagaccggccuggagcugacccugaccaacaccagcaucaucaaccacaaguucugcaaccugagcgacgcccacaagaagaaccuguacgaccacgcccugaugagcaucaucagcaccuuccaccugagcauccccaacuucaaccaguacgaggccaugagcugcgacuucaacggcggcaagaucagcgugcaguacaaccugagccacgccuacgccguggacgccgccaaccacugcggcaccaucgccaacggcgugcugcagaccuucaugagaauggccuggggcggcagcuacaucgcccuggacagcggcugcggcagcugggacugcaucaugaccagcuaccaguaccugaucauccagaacaccaccugggaggaccacugccaguucagcagacccagccccaucggcuaccugggccugcugagccagagaaccagagacaucuacaucagcagaagacugcugggcaccuucaccuggacccugagcgacagcgagggcaacgagacccccggcggcuacugccugaccagauggaugcugaucgaggccgagcugaagugcuucggcaacaccgccguggccaagugcaacgagaagcacgacgaggaguucugcgacaugcugagacuguucgacuucaacaagcaggccaucagaagacugaaggccgaggcccagaugagcauccagcugaucaacaaggccgugaacgcccugaucaacgaccagcugaucaugaagaaccaccugagagacaucaugugcauccccuacugcaacuacagcaaguacugguaccugaaccacaccgugaccggcaagaccagccugcccagaugcuggcuggugagcaacggcagcuaccugaacgagacccacuucagcgacgacaucgagcagcaggccgacaacaugaucaccgagcugcugcagaaggaguacaucgacagacagggcaagaccccccugggccugguggaccuguucguguucagcaccagcuucuaccugaucagcaucuuccugcaccuggugaagauccccacccacagacacgugaucggcaagcccugccccaagccccacagacugaaccacaugggcaucugcagcugcggccuguacaagcaccccggcgugcccgugaaguggaagagaugaggacuaguuauaagacugacuagcccgaugggccucccaacgggcccuccuccccuccuugcaccgagauuaaucaaaggcucuuuucagagccaccaaaaaaaaaaaaaaaaaaaaaaaaaaaaaaaaaaaaaaaaaaaaaaaaaaaaaaaaaaaaaaaaaaaaaaaaaaaaaaaaaaaaaaaaaaaaaaaaaaaaa

SEQ ID NO: 36341 - RNA, 1686 nt, Artificial Sequence
  mRNA product Design i-3 (hSL-A100) comprising derived and/or modified sequence from LASV(LASV1000-NIG-2009;Clade II)__AIT17782__GPCmut9 (opt4)
aggagaaagcuuaccaugggccagaucaucaccuucuuccaggaggugccccacgugaucgaggaggugaugaacaucgugcugaucgcccugagccugcuggccauccugaagggcaucuacaacguggccaccugcggccuguucggccuggugagcuuccugcugcugugcggcagaagcugcagcaccaccuacaagggcguguacgagcugcagacccuggagcuggacauggccagccugaacaugaccaugccccugagcugcaccaagaacaacagccaccacuacaucauggugggcaacgagaccggccuggagcugacccugaccaacaccagcaucaucaaccacaaguucugcaaccugagcgacgcccacaagaagaaccuguacgaccacgcccugaugagcaucaucagcaccuuccaccugagcauccccaacuucaaccaguacgaggccaugagcugcgacuucaacggcggcaagaucagcgugcaguacaaccugagccacaccuacgccguggacgccgccaaccacugcggcaccaucgccaacggcgugcugcagaccuucaugagaauggccuggggcggcagcuacaucgcccuggacagcggcugcggcagcugggacugcaucaugaccagcuaccaguaccugaucauccagaacaccaccugggaggaccacugccaguucagcagacccagccccaucggcuaccugggccugcugagccagagaaccagagacaucuacaucagcagaagacugcugggcaccuucaccuggacccugagcgacagcgagggcaacgagacccccggcggcuacugccugaccagauggaugcugaucgaggccgagcugaagugcuucggcaacaccgccguggccaagugcaacgagaagcacgacgaggaguucugcgacaugcugagacuguucgacuucaacaagcaggccaucaagagacugaagaccgaggcccagaugagcauccagcugaucaacaaggccgugaacgcccugaucaacgaccagcugaucaugaagaaccaccugagagacaucaugugcauccccuacugcaacuacagcaaguacugguaccugaaccacaccgugaccggcaagaccagccugcccagaugcuggcuggugagcaacggcagcuaccugaacgagacccacuucagcgacgacaucgagcagcaggccgacaacaugaucaccgagcugcugcagaaggaguacaucgacagacagggcaagaccccccugggccugguggaccuguucguguucagcaccagcuucuaccugaucagcaucuuccugcaccuggugaagauccccacccacagacacguggugggcaagcccugccccaagccccacagacugaaccacaugggcaucugcagcugcggccuguacaagcaccccggcgugcccgugaaguggaagagaugaggacuaguuauaagacugacuagcccgaugggccucccaacgggcccuccuccccuccuugcaccgagauuaaucaaaggcucuuuucagagccaccaaaaaaaaaaaaaaaaaaaaaaaaaaaaaaaaaaaaaaaaaaaaaaaaaaaaaaaaaaaaaaaaaaaaaaaaaaaaaaaaaaaaaaaaaaaaaaaaaaaaa

SEQ ID NO: 36342 - RNA, 1686 nt, Artificial Sequence
  mRNA product Design i-3 (hSL-A100) comprising derived and/or modified sequence from LASV(LASV221-NIG-2010;Clade II)__AIT17624__GPCmut9 (opt4)
aggagaaagcuuaccaugggccagaucaucaccuucuuccaggaggugccccacgugaucgaggaggugaugaacaucgugcugaucgcccugagccugcuggccauccugaagggcaucuacaacguggccaccugcggccuguucggccuggugagcuuccugcugcugugcggcagaagcugcagcaccaccuacaagggcguguacgagcugcagacccuggagcuggacauggccagccugaacaugaccaugccccugagcugcaccaagaacaacagccaccacuacaucauggugggcaacgagaccggccuggagcugacccugaccaacaccagcaucaucaaccacaaguucugcaaccugagcgacgcccacaagaagaaccuguacgaccacgcccugaugagcaucaucagcaccuuccaccugagcauccccaacuucaaccaguacgaggccaugagcugcgacuucaacggcggcaagaucagcgugcaguacaaccugagccacaccuacgccaucgacgccgccaaccacugcggcaccaucgccaacggcgugcugcagaccuucaugagaauggccuggggcggcagcuacaucgcccuggacagcggcugcggcagcugggacugcaucaugaccagcuaccaguaccugaucauccagaacaccaccugggaggaccacugccaguucagcagacccagccccaucggcuaccugggccugcugagccagagaaccagagacaucuacaucagcagaagacugcugggcaccuucaccuggacccugagcgacagcgagggcaacgagacccccggcggcuacugccugaccagauggaugcugaucgaggccgagcugaagugcuucggcaacaccgccguggccaagugcaacgagaagcacgacgaggaguucugcgacaugcugagacuguucgacuucaacaagcaggccaucagaagacugaagaccgaggcccagaugagcauccagcugaucaacaaggccgugaacgcccugaucaacgaccagcugaucaugaagaaccaccugagagacaucaugugcauccccuacugcaacuacagcaaguacugguaccugaaccacaccgugaccggcaagaccagccugcccagaugcuggcuggugagcaacggcagcuaccugaacgagacccacuucagcgacgacaucgagcagcaggccgacaacaugaucaccgagaugcugcagaaggaguacauggacagacagggcaagaccccccugggccugguggaccuguucguguucagcaccagcuucuaccugaucagcaucuuccugcaccuggugaagauccccacccacagacacgugaucggcaagcccugccccaagccccacagacugaaccacaugggcaucugcagcugcggccuguacaagcaccccggcgugcccgugaaguggaagagaugaggacuaguuauaagacugacuagcccgaugggccucccaacgggcccuccuccccuccuugcaccgagauuaaucaaaggcucuuuucagagccaccaaaaaaaaaaaaaaaaaaaaaaaaaaaaaaaaaaaaaaaaaaaaaaaaaaaaaaaaaaaaaaaaaaaaaaaaaaaaaaaaaaaaaaaaaaaaaaaaaaaaa

SEQ ID NO: 36343 - RNA, 1686 nt, Artificial Sequence
  mRNA product Design i-3 (hSL-A100) comprising derived and/or modified sequence from LASV(LASV237-NIG-2010;Clade II)__AIT17638__GPCmut9 (opt4)
aggagaaagcuuaccaugggccagaucaucaccuucuuccaggaggugccccacgugaucgaggaggugaugaacaucgugcugaucgcccugagccugcuggccauccugaagggcaucuacaacguggccaccugcggccuguucggccuggugagcuuccugcugcugugcggcagaagcugcagcaccaccuacaagggcguguacgagcugcagacccuggagcuggacauggccagccugaacaugaccaugccccugagcugcaccaagaacaacagccaccacuacaucauggugggcaacgagaccggccuggagcugacccugaccaacaccagcaucaucaaccacaaguucugcaaccugagcgacgcccacaagaaggaccuguacgaccacgcccugaugagcaucaucagcaccuuccaccugagcauccccaacuucaaccaguacgaggccaugagcugcgacuucaacggcggcaagaucagcgugcaguacaaccugagccacaccuacgccguggacgccgccaaccacugcggcaccaucgccaacggcgugcugcagaccuucaugagaauggccuggggcggcagcuacaucgcccuggacagcggcugcggcagcugggacugcaucaugaccagcuaccaguaccugaucauccagaacaccaccugggaggaccacugccaguucagcagacccagccccaucggcuaccugggccugcugagccagagaaccagagacaucuacaucagcagaagacugcugggcaccuucaccuggacccugagcgacagcgagggcaacgagacccccggcggcuacugccugaccagauggaugcugaucgaggccgagcugaagugcuucggcaacaccgccguggccaagugcaacgagaagcacgacgaggaguucugcgacaugcugagacuguucgacuucaacaagcaggccaucagaagacugaagaccgaggcccagaugagcauccagcugaucaacaaggccgugaacgcccugaucaacgaccagcugaucaugaagaaccaccugagagacaucaugugcauccccuacugcaacuacagcaaguacugguaccugaaccacaccgugaccggcaagaccagccugcccagaugcuggcuggugagcaacggcagcuaccugaacgagacccacuucagcgacgacaucgagcagcaggccgacaacaugaucaccgagcugcugcagaaggaguacauggacagacagggcaagaccccccugggccugguggaccuguucguguucagcaccagcuucuaccugaucagcaucuuccugcaccugaucaagauccccacccacagacacaucaccggcaagcccugccccaagccccacagacugaaccacaugggcaucugcagcugcggccuguacaagcaccccggcgugcccgugaaguggaagagaugaggacuaguuauaagacugacuagcccgaugggccucccaacgggcccuccuccccuccuugcaccgagauuaaucaaaggcucuuuucagagccaccaaaaaaaaaaaaaaaaaaaaaaaaaaaaaaaaaaaaaaaaaaaaaaaaaaaaaaaaaaaaaaaaaaaaaaaaaaaaaaaaaaaaaaaaaaaaaaaaaaaaa

SEQ ID NO: 36344 - RNA, 1686 nt, Artificial Sequence
  mRNA product Design i-3 (hSL-A100) comprising derived and/or modified sequence from LASV(LASV253-NIG-2011;Clade II)__AIT17670__GPCmut9 (opt4)
aggagaaagcuuaccaugggccagaucaucaccuucuuccaggaggugccccacgugaucgaggaggugaugaacaucgugcugaucgcccugagccugcuggccauccugaagggcaucuacaacguggccaccugcggccuguucggccuggugagcuuccugcugcugugcggcagaagcugcagcaccaccuacaagggcguguacgagcugcagacccuggagcuggacauggccagccugaacaugaccaugccccugagcugcaccaagaacaacagccaccacuacaucauggugggcaacgagaccggccuggagcugacccugaccaacaccagcaucaucaaccacaaguucugcaaccugagcgacgcccacaagaagaaccuguacgaccacgcccugaugagcaucaucagcaccuuccaccugagcauccccaacuucaaccaguacgaggccaugagcugcgacuucaacggcggcaagaucagcgugcaguacaaccugagccacaccuacgccguggacgccgccaaccacugcggcaccaucgccaacggcgugcugcagaccuucaugagaauggccuggggcggcagcuacaucgcccuggacagcggcugcggcagcugggacugcaucaugaccagcuaccaguaccugaucauccagaacaccaccugggaggaccacugccaguucagcagacccagccccaucggcuaccugggccugcugagccagagaaccagagacaucuacaucagcagaagacugcugggcaccuucaccuggacccugagcgacagcgagggcaacgagacccccggcggcuacugccugaccagauggaugcugaucgaggccgagcugaagugcuucggcaacaccgccguggccaagugcaacgagaagcacgacgaggaguucugcgacaugcugagacuguucgacuucaacaagcaggccaucagaagacugaaggccgaggcccagaugagcauccagcugaucaacaaggccgugaacgcccugaucaacgaccagcugaucaugaagaaccaccugagagacaucaugugcauccccuacugcaacuacagcaaguacugguaccugaaccacaccgugaccggcagaaccagccugcccagaugcuggcuggugagcaacggcagcuaccugaacgagacccacuucagcgacgacaucgagcagcaggccgacaacaugaucaccgagcugcugcagaaggaguacaucgacagacagggcaagaccccccugggccugguggaccuguucguguucagcaccagcuucuaccugaucagcaucuuccugcaccuggugaagauccccacccacagacacaucaucggcaagcccugccccaagccccacagacugaaccacaugggcaucugcagcugcggccuguacaagcaccccggcgugcccgugaaguggaagagaugaggacuaguuauaagacugacuagcccgaugggccucccaacgggcccuccuccccuccuugcaccgagauuaaucaaaggcucuuuucagagccaccaaaaaaaaaaaaaaaaaaaaaaaaaaaaaaaaaaaaaaaaaaaaaaaaaaaaaaaaaaaaaaaaaaaaaaaaaaaaaaaaaaaaaaaaaaaaaaaaaaaaa

SEQ ID NO: 36345 - RNA, 1686 nt, Artificial Sequence
  mRNA product Design i-3 (hSL-A100) comprising derived and/or modified sequence from LASV(LASV254-NIG-2011;Clade II)__AIT17674__GPCmut9 (opt4)
aggagaaagcuuaccaugggccagaucaucaccuucuuccaggaggugccccacgugaucgaggaggugaugaacaucgugcugaucgcccugagccugcuggccauccugaagggcaucuacaacguggccaccugcggccuguucggccuggugagcuuccugcugcugugcggcagaagcugcagcaccaccuacaagggcguguacgagcugcagacccuggagcuggacaugaccaaccugaacaugaccaugccccugagcugcaccaagaacaacagccaccacuacaucauggugggcaacgagaccggccuggagcugacccugaccaacaccagcaucaucaaccacaaguucugcaaccugagcgacgcccacaagaagaaccuguacaaccacgcccugaugagcaucaucagcaccuuccaccugagcauccccaacuucaaccaguacgaggccaugagcugcgacuucaacggcggcaagaucagcgugcaguacaaccugagccacagcuacgccguggacgccgccaaccacugcggcaccaucgccaacggcgugcugcagaccuucaugagaauggccuggggcggcagcuacaucgcccuggacagcggcugcggcaacugggacugcaucaugaccagcuaccaguaccugaucauccagaacaccaccugggaggaccacugccaguucagcagacccagccccaucggcuaccugggccugcugagccagagaaccagagacaucuacaucagcagaagacugcugggcaccuucaccuggacccugagcgacagcgagggcaacgagacccccggcggcuacugccugaccagauggaugcugaucgaggccgagcugaagugcuucggcaacaccgccguggccaagugcaacgagaagcacgacgaggaguucugcgacaugcugagacuguucgacuucaacaagcaggccaucagaagacugaagaccgaggcccaggccaacauccagcugaucaacaaggccgugaacgcccugaucaacgaccagcugaucaugaagaaccaccugagagacaucaugugcauccccuacugcaacuacagcaaguacugguaccugaaccacaccgugaccggcaagaccagccugcccagaugcuggcuggugagcaacggcagcuaccugaacgagacccacuucagcgacgacaucgagcagcaggccgacaacaugaucaccgagcugcugcagaaggaguacauggacagacagggcaagaccccccugggccugguggaccuguucguguucagcaccagcuucuaccugaucagcaucuuccugcaccuggugaagauccccacccacagacacgugaucggcaagcccugccccaagccccacagacugaaccacaugggcaucugcagcugcggccuguacaagcaccccggcgugcccgugaaguggaagagaugaggacuaguuauaagacugacuagcccgaugggccucccaacgggcccuccuccccuccuugcaccgagauuaaucaaaggcucuuuucagagccaccaaaaaaaaaaaaaaaaaaaaaaaaaaaaaaaaaaaaaaaaaaaaaaaaaaaaaaaaaaaaaaaaaaaaaaaaaaaaaaaaaaaaaaaaaaaaaaaaaaaaa

SEQ ID NO: 36346 - RNA, 1686 nt, Artificial Sequence
  mRNA product Design i-3 (hSL-A100) comprising derived and/or modified sequence from LASV(Nig08-A19;Clade III)__ADU56618__GPCmut9 (opt4)
aggagaaagcuuaccaugggccagaucgugaccuucuuccaggaggugccccacgugaucgaggaggugaugaacaucgugcugaucgcccugagcauccuggccauccugaagggccuguacaacaucgccaccugcggccugaucggccuggugaccuuccugcugcugagcggcagaagcugcagcaugaccuacaagggcguguacgagcugcagacccuggagcugaacaugaacacccugaacaugaccaugccccugagcugcaccaagaacaacagccaccacuacaucauggugggcaacgagaccggccuggagcugacccugaccaacaccagccugcugcaccacaaguucugcaaccugagcgacgcccacaagaagaaccuguacgaccacacccugaugagcaucaucagcaccuuccaccugagcauccccaacuucaaccaguacgaggccaugagcugcgacuucaacggcggcaagaucaccgugcaguacaaccugagccacagcuacgccaucgacgccgccaaccacugcggcaccguggccaacggcgugcugcagaccuucaugagaauggccuggggcggcagcuacaucgcccuggacagcggcugcggcaagugggacugcaucaugaccagcuaccaguaccugaucauccagaacaccaccugggaggaccacugccaguucagcagacccagccccaucggcuaccugggccugcugagccagagaaccagagacaucuacaucagcagaagacugcugggcaccuucaccuggacccugagcgacagcgagggcaacgagacccccggcggcuacugccugaccagauggaugcugaucgaggccgagcugaagugcuucggcaacaccgccguggccaagugcaacgagaagcacgacgaggaguucugcgacaugcugagacuguucgacuucaacaagcaggccaucagaagacugaaggccgaggcccagaugagcauccagcugaucaacaaggccgugaacgcccugaucaacgaccagcugaucaugaagaaccaccugagagacaucaugugcauccccuacugcaacuacagcaaguacugguaccugaaccacaccagcaccggcagaaccagccugcccagaugcuggcuggugagcaacggcagcuaccugaacgagacccacuucagcgacgacaucgagcagcaggccgacaacaugaucaccgagaugcugcagaaggaguaccuggacagacagggcaagaccccccugggccugguggaccuguucguguucagcaccagcuucuaccugaucagcaucuuccugcaccuggugaagauccccacccacagacacaucgugggcaagcccugccccaagccccacagacugaaccacaugggcaucugcagcugcggccuguacaagcagcccggcgugcccgugagauggaagagaugaggacuaguuauaagacugacuagcccgaugggccucccaacgggcccuccuccccuccuugcaccgagauuaaucaaaggcucuuuucagagccaccaaaaaaaaaaaaaaaaaaaaaaaaaaaaaaaaaaaaaaaaaaaaaaaaaaaaaaaaaaaaaaaaaaaaaaaaaaaaaaaaaaaaaaaaaaaaaaaaaaaaa

SEQ ID NO: 36347 - RNA, 1689 nt, Artificial Sequence
  mRNA product Design i-3 (hSL-A100) comprising derived and/or modified sequence from LASV(G1180-SLE-2010;Clade IV)__AIT17168__GPCmut9 (opt4)
aggagaaagcuuaccaugggccagaucgugaccuucuuccaggaggugccccacgugaucgaggaggugaugaacaucgugcugaucgcccugagcauccuggccgugcugaagggccuguacaacuucgccaccugcggccuggugggccugcugaccuuccugcugcugugcggcagaagcugcaccgccagcagauacaagggcguguacgagcugcagacccuggagcugaacauggagacccugaacaugaccaugccccugagcugcaccaagaacaacagccaccacuacaucauggugggcaacgagaccggccuggagcugacccugaccaacaccagcaucaucaaccacaaguucugcaaccugagcgacgcccacaagaagaaccuguacgaccacgcccugaugagcaucaucagcaccuuccaccugagcauccccaacuucaaccaguacgaggccaugagcugcgacuucaacggcggcaagaucagcgugcaguacaaccugagccacagcuacgccggcgacgccgccaaccacugcggcaccguggccaacggcgugcugcagaccuucaugagaauggccuggggcggcagcuacaucgcccuggacagcggcugcggcagcugggacugcaucaugaccagcuaccaguaccugaucauccagaacaccaccugggaggaccacugccaguucagcagacccagccccaucggcuaccugggccugcugagccagagaaccagagacaucuacaucagcagaagacugcugggcaccuucaccuggacccugagcgacagcgagggcaaggacacccccggcggcuacugccugaccagauggaugcugaucgaggccgagcugaagugcuucggcaacaccgccguggccaagugcaacgagaagcacgacgaggaguucugcgacaugcugagacuguucgacuucaacaagcaggccauccagagacugaaggccgaggcccagaugagcauccagcugaucaacaaggccgugaacgcccugaucaacgaccagcugaucaugaagaaccaccugagagacaucaugugcauccccuacugcaacuacagcaaguacugguaccugaaccacaccaccaccggcaagaccagccugcccaagugcuggcuggugagcaacggcagcuaccugaacgagacccacuucagcgacgacaucgagcagcaggccgacaacaugaucaccgagaugcugcagaaggaguacauggagagacagggcaagaccccccugggccugguggaccuguucguguucagcaccagcuucuaccugaucagcaucuuccugcaccuggugaagauccccacccacagacacaucgugggcaagagcugccccaagccccacagacugaaccacaugggcaucugcagcugcggccuguacaagcagcccggcgugcccgugaaguggaagagaugaggacuaguuauaagacugacuagcccgaugggccucccaacgggcccuccuccccuccuugcaccgagauuaaucaaaggcucuuuucagagccaccaaaaaaaaaaaaaaaaaaaaaaaaaaaaaaaaaaaaaaaaaaaaaaaaaaaaaaaaaaaaaaaaaaaaaaaaaaaaaaaaaaaaaaaaaaaaaaaaaaaaa

SEQ ID NO: 36348 - RNA, 1689 nt, Artificial Sequence
  mRNA product Design i-3 (hSL-A100) comprising derived and/or modified sequence from LASV(G1442-SLE-2011;Clade IV)__AIT17180__GPCmut9 (opt4)
aggagaaagcuuaccaugggccagaucgugaccuucuuccaggaggugccccacgugaucgaggaggugaugaacaucgugcugaucgcccugagcauccuggccgugcugaagggccuguacaacguggccaccugcggccugaucggccuggugaccuuccugcugcugugcggcagaagcugcaccaccacccuguacaagggcguguacgagcugcagacccuggagcugaacauggagacccugaacaugaccaugccccugagcugcaccaagaacaacagccaccacuacaucagagugggcaacgagaccggccuggagcugacccugaccaacaccagcaucaucaaccacaaguucugcaaccugagcgacgcccacaagaagaaccuguacgaccacgcccugaugagcaucaucagcaccuuccaccugagcauccccaacuucaaccaguacgaggccaugagcugcgacuucaacggcggcaagaucagcgugcaguacaaccugagccacagcuacgccggcgacgccgccaaccacugcggcaccguggccaacggcgugcugcagaccuucaugagaauggccuggggcggcagcuacaucgcccuggacagcggcugcggcaacugggacugcaucaugaccagcuaccaguaccugaucauccagaacaccaccugggacgaccacugccaguucagcagacccagccccaucggcuaccugggccugcugagccagagaaccagagacguguacaucagcagaagacugcugggcaccuucaccuggacccugagcgacagcgagggcaaggacacccccggcggcuacugccugaccagauggaugcugaucgaggccgagcugaagugcuucggcaacaccgccguggccaagugcaacgagaagcacgacgaggaguucugcgacaugcugagacuguucgacuucaacaagcaggccauccagagacugaaggccgaggcccagaugagcauccagcugaucaacaaggccgugaacgcccugaucaacgaccagcugaucaugaagaaccaccugagagacaucaugugcauccccuacugcaacuacagcaaguacugguaccugaacaacaccgccaccggcaagaccagccugcccaagugcuggcugaucagcaacggcagcuaccugaacgagacccacuucagcgacgacaucgagcaggaggccgacaacaugaucaccgagaugcugcagaaggaguacauggagagacagggcaagaccccccugggccugguggaccuguucguguucagcaccagcuucuaccugaucagcaucuuccugcaccuggugaagauccccacccacagacacaucgugggcaagagcugccccaagccccacagacugaaccacaugggcaucugcagcugcggccuguacaagcagcccggcgugcccgugagauggaagagaugaggacuaguuauaagacugacuagcccgaugggccucccaacgggcccuccuccccuccuugcaccgagauuaaucaaaggcucuuuucagagccaccaaaaaaaaaaaaaaaaaaaaaaaaaaaaaaaaaaaaaaaaaaaaaaaaaaaaaaaaaaaaaaaaaaaaaaaaaaaaaaaaaaaaaaaaaaaaaaaaaaaaa

SEQ ID NO: 36349 - RNA, 1689 nt, Artificial Sequence
  mRNA product Design i-3 (hSL-A100) comprising derived and/or modified sequence from LASV(G3010-SLE-2013;Clade IV)__AIT17344__GPCmut9 (opt4)
aggagaaagcuuaccaugggccagaucgugaccuucuuccaggaggugccccacgugaucgaggaggugaugaacaucgugcugaucgcccugagcauccuggccgugcugaagggccuguacaacuucgccaccugcggccuggugggccuggugaccuuccugcugcugugcggcagaagcugcaccaccagccuguacaagggcguguacgagcugcagacccuggagcugaacauggagacccugaacaugaccaugccccugagcugcaccaagaacaacagccaccacuacaucauggugggcaacgagaccggccuggagcugacccugaccaacaccagcaucaucaaccacaaguucugcaaccugagcgacgcccacaagaagaaccuguacaaccacgcccugaugagcaucaucagcaccuuccaccugagcauccccaacuucaaccaguacgaggccaugagcugcgacuucaacggcggcaagaucagcgugcaguacaaccugagccacagcuacgccggcgacgccgccagccacugcggcaccguggccaacggcgugcugcagaccuucaugagaauggccuggggcggcagcuacaucgcccuggacagcggcugcggcaagugggacugcaucaugaccagcuaccaguaccugaucauccagaacaccaccugggaggaccacugccaguucagcagacccagccccaucggcuaccugggccugcugagccagagaaccagagacaucuacaucagcagaagacugcugggcaccuucaccuggacccugagcgacagcgagggcaaggacacccccggcggcuacugccugaccagauggaugcugaucgaggccgagcugaagugcuucggcaacaccgccguggccaagugcaacgagaagcacgacgaggaguucugcgacaugcugagacuguucgacuucaacaagcaggccauccagagacugaagaccgaggcccagaugagcauccagcugaucaacaaggccgugaacgcccugaucaacgaccagcugaucaugaagaaccaccugagagacaucaugugcauccccuacugcaacuacagcaaguacugguaccugaaccacaccaccaccggcaagaccagccugcccaagugcuggcuggugagcaacggcagcuaccugaacgagacccacuucagcgacgacaucgagcagcaggccgacaacaugaucaccgagaugcugcagaaggaguacauggagagacagggcaagaccccccugggccugguggaccuguucguguucagcaccagcuucuaccugaucagcaucuuccugcaccuggugaagauccccacccacagacacaucgugggcaagagcugccccaagccccacagacugaaccacaugggcaucugcagcugcggccuguacaagcagcccggcgugcccgugagauggaagagaugaggacuaguuauaagacugacuagcccgaugggccucccaacgggcccuccuccccuccuugcaccgagauuaaucaaaggcucuuuucagagccaccaaaaaaaaaaaaaaaaaaaaaaaaaaaaaaaaaaaaaaaaaaaaaaaaaaaaaaaaaaaaaaaaaaaaaaaaaaaaaaaaaaaaaaaaaaaaaaaaaaaaa

SEQ ID NO: 36350 - RNA, 1689 nt, Artificial Sequence
  mRNA product Design i-3 (hSL-A100) comprising derived and/or modified sequence from LASV(G502-SLE-2009;Clade IV)__AIT17126__GPCmut9 (opt4)
aggagaaagcuuaccaugggccagaucgugaccuucuuccaggaggugccccacgugaucgaggaggugaugaacaucgugcugaucgcccugagcauccuggccgugcugaagggccuguacaacuucgccaccugcggccuggugggccugcugaccuuccugcugcugugcggcagaagcugcaccaccggccuguacaagggcguguacgagcugcagacccuggagcugaacauggagacccugaacaugaccaugccccugagcugcaccaagaacaacagccaccacuacaucauggugggcaacgagaccggccuggagcugacccugaccaacaccagcaucaucaaccacaaguucugcaaccugagcgacgcccacaagaagaaccuguacgaccacgcccugaugagcaucaucagcaccuuccaccugagcauccccaacuucaaccaguacgaggccaugagcugcgacuucaacggcggcaagaucagcgugcaguacaaccugagccacagcuacgccggcgacgccgccgaccacugcggcaccguggccaacggcgugcugcagaccuucaugagaauggccuggggcggcagcuacaucgcccuggacagcggcugcggcagaugggacugcaucaugaccagcuaccaguaccugaucauccagaacaccaccugggaggaccacugccaguucagcagacccagccccaucggcuaccugggccugcugagccagagaaccagagacaucuacaucagcagaagacugcugggcaccuucaccuggacccugagcgacagcgagggcaaggacacccccggcggcuacugccugaccagauggaugcugaucgaggccgagcugaagugcuucggcaacaccgccguggccaagugcaacgagaagcacgacgaggaguucugcgacaugcugagacuguucgacuucaacaagcaggccauccagagacugaaggccgaggcccagaugagcauccagcugaucaacaaggccgugaacgcccugaucaacgaccagcuggugaugaagaaccaccugagagacaucaugugcauccccuacugcaacuacagcagauacugguaccugaaccacaccaccaccggcagaaccagccugcccaagugcuggcuggugagcaacggcagcuaccugaacgagacccacuucagcgacgacaucgagcagcaggccgacaacaugaucaccgagaugcugcagaaggaguacauggagagacagggcaagaccccccugggccugguggaccuguucguguucagcaccagcuucuaccugaucagcaucuuccugcaccuggugaagauccccacccacagacacaucgugggcaagagcugccccaagccccacagacugaaccacaugggcaucugcagcugcggccuguacaagcagcccggcgugcccgugaaguggaagagaugaggacuaguuauaagacugacuagcccgaugggccucccaacgggcccuccuccccuccuugcaccgagauuaaucaaaggcucuuuucagagccaccaaaaaaaaaaaaaaaaaaaaaaaaaaaaaaaaaaaaaaaaaaaaaaaaaaaaaaaaaaaaaaaaaaaaaaaaaaaaaaaaaaaaaaaaaaaaaaaaaaaaa

SEQ ID NO: 36351 - RNA, 1689 nt, Artificial Sequence
  mRNA product Design i-3 (hSL-A100) comprising derived and/or modified sequence from LASV(G733-SLE-2010;Clade IV)__AIT17154__GPCmut9 (opt4)
aggagaaagcuuaccaugggccagaucgugaccuucuuccaggaggugccccacgugaucgaggaggugaugaacaucgugcugaucgcccugagcauccuggccgugcugaagggccuguacaacuucgccaccugcggcaucgugggccuggugagcuuccugcugcugugcggcagaagcugcaccaccagccuguacaagggcguguacgagcugcagacccuggagcugaacauggagacccugaacaugaccaugccccugagcugcaccaagaacaacagccaccacuacaucauggugggcaacgagaccggccuggagcugacccugaccaacaccagcaucaucaaccacaaguucugcaaccugagcgacgcccacaagaagaaccuguacgaccacgcccugaugagcaucaucagcaccuuccaccugagcauccccaacuucaaccaguacgaggccaugagcugcgacuucaacggcggcaagaucagcgugcaguacaaccugagccacagcuacgccggcgacgccgccaaccacugcggcaccaucgccaacggcgugcugcagaccuucaugagaauggccuggggcggcagcuacaucgcccuggacagcggcugcgacagaugggacugcaucaugaccagcuaccaguaccugaucauccagaacaccaccugggaggaccacugccaguucagcagacccagccccaucggcuaccugggccugcugagccagagaaccagagacaucuacaucagcagaagacugcugggcaccuucaccuggacccugagcgacagcgagggcaaggacacccccggcggcuacugccugaccagauggaugcugaucgaggccgagcugaagugcuucggcaacaccgccguggccaagugcaacgagaagcacgacgaggaguucugcgacaugcugagacuguucgacuucaacaagcaggccauccagagacugaaggccgaggcccagaugagcauccagcugaucaacaaggccgugaacgcccugaucaacgaccagcugaucaugaagaaccaccugagagacaucaugugcauccccuacugcaacuacagcaaguacugguaccugaaccacaccaccaccggcaagaccagccugcccaagugcuggcuggugagcaacggcagcuaccugaacgagacccacuucagcgacgacaucgagcagcaggccgacaacaugaucaccgagaugcugcagaaggaguacauggagagacagggcaagaccccccugggccugguggaccuguucguguucagcaccagcuucuaccugaucagcaucuuccugcaccuggugaagauccccacccacagacacguggugggcaagagcugccccaagccccacagacugaaccacaugggcaucugcagcugcggccuguacggccagcccggcgugcccgugaaguggaagagaugaggacuaguuauaagacugacuagcccgaugggccucccaacgggcccuccuccccuccuugcaccgagauuaaucaaaggcucuuuucagagccaccaaaaaaaaaaaaaaaaaaaaaaaaaaaaaaaaaaaaaaaaaaaaaaaaaaaaaaaaaaaaaaaaaaaaaaaaaaaaaaaaaaaaaaaaaaaaaaaaaaaaa

SEQ ID NO: 36352 - RNA, 1689 nt, Artificial Sequence
  mRNA product Design i-3 (hSL-A100) comprising derived and/or modified sequence from MOPV/LASV reassortant(IGS-1;Clade IV)__AFY05576__GPCmut9 (opt4)
aggagaaagcuuaccaugggccagaucgugaccuucuuccaggaggugccccacgugaucgaggaggugaugaacaucgugcugaucgcccugagcgugcuggccgugcugaagggccuguacaacuucgccaccugcggccuggugggccuggugaccuuccugcugcugugcggcagaagcugcaccaccagccuguacaagggcguguacgagcugcagacccuggagcugaacauggagacccugaacaugaccaugccccugagcugcaccaagaacaacagccaccacuacaucauggugggcaacgagaccggccuggagcugacccugaccaacaccagcaucaucaaccacaaguucugcaaccugagcgacgcccacaagaagaaccuguacgaccacgcccugaugagcaucaucagcaccuuccaccugagcauccccaacuucaaccaguacgaggccaugagcugcgacuucaacggcggcaagaucagcgugcaguacaaccugagccacagcuacgccggcgacgccgccaaccacugcggcaccguggccaacggcgugcugcagaccuucaugagaauggccuggggcggcagcuacaucgcccuggacagcggcugcggcaacugggacugcaucaugaccagcuaccaguaccugaucauccagaacaccaccugggaggaccacugccaguucagcagacccagccccaucggcuaccugggccugcugagccagagaaccagagacaucuacaucagcagaagacugcugggcaccuucaccuggacccugagcgacagcgagggcgaggacacccccggcggcuacugccugaccagauggaugcugaucgaggccgagcugaagugcuucggcaacaccgccguggccaagugcaacgagaagcacgacgaggaguucugcgacaugcugagacuguucgacuucaacaagcaggccauccagagacugaaggccgaggcccagaugagcauccagcugaucaacaaggccgugaacgcccugaucaacgaccagcugaucaugaagaaccaccugagagacaucaugugcauccccuacugcaacuacagcaaguacugguaccugaaccacaccaccaccggcagaaccagccugcccaagugcuggcuggugagcaacggcagcuaccugaacgagacccacuucagcgacgacaucgagcagcaggccgacaacaugaucaccgagaugcugcagaaggaguacauggagagacagggcaagaccccccugggccugguggaccuguucguguucagcaccagcuucuaccugaucagcaucuuccugcaccuggugaagauccccacccacagacacaucgugggcaagagcugccccaagccccacagacugaaccacaugggcaucugcagcugcggccuguacaagcagcccggcgugcccgugaaguggaagagaugaggacuaguuauaagacugacuagcccgaugggccucccaacgggcccuccuccccuccuugcaccgagauuaaucaaaggcucuuuucagagccaccaaaaaaaaaaaaaaaaaaaaaaaaaaaaaaaaaaaaaaaaaaaaaaaaaaaaaaaaaaaaaaaaaaaaaaaaaaaaaaaaaaaaaaaaaaaaaaaaaaaaa

SEQ ID NO: 36353 - RNA, 1689 nt, Artificial Sequence
  mRNA product Design i-3 (hSL-A100) comprising derived and/or modified sequence from LASV(LM765-SLE-2012;Clade IV)__AIT17814__GPCmut9 (opt4)
aggagaaagcuuaccaugggccagaucgugaccuucuuccaggaggugccccacgugaucgaggaggugaugaacaucgugcugaucgcccugagcauccuggccgugcugaagggccuguacaacuucgccaccugcggccuggugggccuggugaccuuccugcugcugugcggcagaagcugcaccaccagccuguacaagggcguguacgagcugcagacccuggagcugaacauggagacccugaacaugaccaugccccugagcugcaccaagaacaacagccaccacuacaucauggugggcaacgagaccggccuggagcugacccugaccaacaccagcaucaucgaccacaaguucugcaaccugagcgacgcccacagaaagaaccuguacgaccacgcccugaugagcaucaucagcaccuuccaccugagcauccccaacuucaaccaguacgaggccaugagcugcgacuucaacggcggcaagaucagcgugcaguacaaccugagccacagcuacgccaaggacgccgccgaccacugcggcaccguggccaacggcgugcugcagaccuucaugagaauggccuggggcggcagcuacaucgcccuggacagcggcugcggcagaugggacugcaucaugaccagcuaccaguaccugaucauccagaacaccaccugggaggaccacugccaguucagcagacccagccccaucggcuaccugggccugcugagccagagaaccagagacaucuacaucagcagaagacugcugggcaccuucaccuggacccugagcgacagcgagggcaaggacacccccggcggcuacugccugaccagauggaugcugaucgaggccgagcugaagugcuucggcaacaccgccguggccaagugcaacgagaagcacgacgaggaguucugcgacaugcugagacuguucgacuucaacaagcaggccauccagagacugaaggccgaggcccagaugagcauccagcugaucaacaaggccgugaacgcccugaucaacgaccagcugaucaugaagaaccaccugagagacaucaugugcauccccuacugcaacuacagcaaguacugguaccugaaccacaccaccaccggcaagaccagccugcccaagugcuggcuggugagcaacggcagcuaccugaacgagacccacuucagcgacgacaucgagcagcaggccgacaacaugaucaccgagaugcugcagaaggaguacauggagagacagggcaagaccccccugggccugguggaccuguucguguucagcaccagcuucuaccugaucagcaucuuccugcaccuggugaagauccccacccacagacacaucgugggcaagcccugccccaagccccacagacugaaccacaugggcaucugcagcugcggccuguacaagcagcccggcgugcccgugaaguggaagagaugaggacuaguuauaagacugacuagcccgaugggccucccaacgggcccuccuccccuccuugcaccgagauuaaucaaaggcucuuuucagagccaccaaaaaaaaaaaaaaaaaaaaaaaaaaaaaaaaaaaaaaaaaaaaaaaaaaaaaaaaaaaaaaaaaaaaaaaaaaaaaaaaaaaaaaaaaaaaaaaaaaaaa

SEQ ID NO: 36354 - RNA, 1689 nt, Artificial Sequence
  mRNA product Design i-3 (hSL-A100) comprising derived and/or modified sequence from LASV(LM776-SLE-2012;Clade IV)__AIT17824__GPCmut9 (opt4)
aggagaaagcuuaccaugggccagaucgugaccuucuuccaggaggugccccacgugaucgaggaggugaugaacaucgugcugaucgcccugagcauccuggccgugcugaagggccuguacaacuucgccaccugcggccuggugggccuggugaccuuccugcugcugugcggcagaagcugcaccaccagcguguacaagggcguguacgagcugcagacccuggagcugaacauggagacccugaacaugaccaugccccugagcugcaccaagaacaacagccaccacuacaucauggugggcaacgagaccggccuggagcugacccugaccaacaccagcaucaucaaccacaaguucugcaaccugagcgacgcccacaagaagaaccuguacgaccacgcccugaugagcaucaucagcaccuuccaccugagcauccccaacuucaaccaguacgaggccaugagcugcgacuucaacggcggcaagaucagcgugcaguacaaccugagccacagcuacgccggcgacgccgccaaccacugcggcaccguggccaacggcgugcugcagaccuucaugagaauggccuggggcggcagcuacaucgcccuggacagcggcugcggcaagugggacugcaucaugaccagcuaccaguaccugaucauccagaacaccaccugggaggaccacugccaguucagcagacccagccccaucggcuaccugggccugcugagccagagaaccagagacaucuacaucagcagaagacugcugggcaccuucaccuggacccugagcgacagcgagggcaaggacacccccggcggcuacugccugaccagauggaugcugaucgaggccgagcugaagugcuucggcaacaccgccguggccaagugcaacgagaagcacgacgaggaguucugcgacaugcugagacuguucgacuucaacaagcaggccauccagagacugaaggccgaggcccagaugagcauccagcugaucaacaaggccgugaacgcccugaucaacgaccagcugaucaugaagaaccaccugagagacaucaugugcauccccuacugcaacuacagcaaguacugguaccugaaccacaccaccaccggcaagaccagccugcccaagugcuggcuggugagcaacggcagcuaccugaacgagacccacuucagcgacgacaucgagcagcaggccgacaacaugaucaccgagaugcugcagaaggaguacauggagagacagggcaagaccccccugggccugguggaccuguucguguucagcaccagcuucuaccugaucagcaucuuccugcaccuggugaagauccccacccacagacacaucgugggcaagagcugccccaagccccacagacugaaccacaugggcaucugcagcugcggccuguacaagcagcccggcgugcccgugagauggaagagaugaggacuaguuauaagacugacuagcccgaugggccucccaacgggcccuccuccccuccuugcaccgagauuaaucaaaggcucuuuucagagccaccaaaaaaaaaaaaaaaaaaaaaaaaaaaaaaaaaaaaaaaaaaaaaaaaaaaaaaaaaaaaaaaaaaaaaaaaaaaaaaaaaaaaaaaaaaaaaaaaaaaaa

SEQ ID NO: 36355 - RNA, 1689 nt, Artificial Sequence
  mRNA product Design i-3 (hSL-A100) comprising derived and/or modified sequence from LASV(Mad39;Clade IV)__ANH09722__GPCmut9 (opt4)
aggagaaagcuuaccaugggccagaucgugaccuucuuccaggaggugccccacgugaucgaggaggugaugaacaucgugcugaucgcccugagcauccuggccgugcugaagggccuguacaacguggccaccugcggccugaucggccuggugaccuuccugcugcugugcggcagaagcugcaccaccacccuguacaagggcguguacgagcugcaggcccuggagcugaacauggagacccugaacaugaccaugccccugagcugcaccaagaacaacagccaccacuacaucagagugggcaacgagaccggccuggagcugacccugaccaacaccagccugaucaaccacaaguucugcaaccugagcgacgcccacaagaagaaccuguacgaccacgcccugaugagcaucaucagcaccuuccaccugagcauccccaacuucaaccaguacgaggccaugagcugcgacuucaacgacggcaagaucagcgugcaguacaaccugagccacaccuacgccggcgacaccgccaaccacugcggcaccguggccaacggcgugcugcagaccuucaugagaauggccuggggcggcagcuacaucgcccuggacagcggcugcggcggcugggacugcaucaugaccagcuaccaguaccugaucauccagaacaccaccugggaggaccacugccaguucagcagacccagccccaucggcuaccugggccugcugagccagagaaccagagacaucuacaucagcagaagacugcugggcaccuucaccuggacccugagcgacagcgagggcaaggacacccccggcggcuacugccugaccagauggaugcugaucgaggccgagcugaagugcuucggcaacaccgccguggccaagugcaacgagaagcacgacgaggaguucugcgacaugcugagacuguucgacuucaacaagcaggccauccagagacugaaggccgaggcccagaugagcauccagcugaucaacaaggccgugaacgcccugaucaacgaccagcugaucaugaagaaccaccugagagacaucaugugcauccccuacugcaacuacagcaaguacugguaccugaaccacaccgugaccggcaagaccagccugcccaagugcuggcuggugagcaacggcagcuaccugaacgagacccacuucagcgacgacaucgagcagcaggccgacaacaugaucaccgagaugcugcagaaggaguacauggagagacagggcaagaccccccugggccugguggaccuguucguguucagcaccagcuucuaccugaucagcaucuuccugcaccuggugaagauccccacccacagacacguggugggcaagcccugccccaagccccacagacugaaccacaugggcaucugcagcugcggcuucuacaagcagcccggcgugcccgugagauggaagagaugaggacuaguuauaagacugacuagcccgaugggccucccaacgggcccuccuccccuccuugcaccgagauuaaucaaaggcucuuuucagagccaccaaaaaaaaaaaaaaaaaaaaaaaaaaaaaaaaaaaaaaaaaaaaaaaaaaaaaaaaaaaaaaaaaaaaaaaaaaaaaaaaaaaaaaaaaaaaaaaaaaaaa

SEQ ID NO: 36356 - RNA, 1689 nt, Artificial Sequence
  mRNA product Design i-3 (hSL-A100) comprising derived and/or modified sequence from LASV(Z0947-SLE-2011;Clade IV)__AIT17840__GPCmut9 (opt4)
aggagaaagcuuaccaugggccagaucgugaccuucuuccaggaggugccccacgugaucgaggaggugaugaacaucgugcugaucgcccugagcauccuggccgugcugaagggccuguacaacuucgccaccugcggccuggugggccuggugaccuuccugcugcugugcggcagaagcugcaccaucagccuguacaagggcguguacgagcugcagacccuggagcugaacauggagacccugaacaugaccaugccccugagcugcaccaagaacaacagccaccacuacaucauggugggcaacgagaccggccuggagcugacccugaccaacaccagcaucaucaaccacaaguucugcaaccugagcgacgcccacaagaagaaccuguacgaccacgcccugaugagcaucaucagcaccuuccaccugagcauccccaacuucaaccaguacgaggccaugagcugcgacuucaacggcggcaagaucagcgugcaguacaaccugagccacagcuacgccggcgacgccgccaaccacugcggcaccguggccaacggcgugcugcagaccuucaugagaauggccuggggcggcagcuacaucgcccuggacagcggcugcgacagaugggacugcaucaugaccagcuaccaguaccugaucauccagaacaccaccugggaggaccacugccaguucagcagacccagccccaucggcuaccugggccugcugagccagagaaccagagacaucuacaucagcagaagacugcugggcaccuucaccuggacccugagcgacagcgagggcaaggacacccccggcggcuacugccugaccagauggaugcugaucgaggccgagcugaagugcuucggcaacaccgccguggccaagugcaacgagaagcacgacgaggaguucugcgacaugcugagacuguucgacuucaacaagcaggccauccagagacugaaggccgaggcccagaugagcauccagcugaucaacaaggccgugaacgcccugaucaacgaccagcugaucaugaagaaccaccugagagacaucaugugcauccccuacugcaacuacagcaaguacugguaccugaaccacaccaccaccggcaagaccagccugcccaagugcuggcuggugagcaacggcagcuaccugaacgagacccacuucagcgacgacaucgagcagcaggccgacaacaugaucaccgagaugcugcagaaggaguacauggagagacagggcaagaccccccugggccugguggaccuguucguguucagcaccagcuucuaccugaucagcaucuuccugcaccuggugaagauccccacccacagacacaucgugggcaagcccugccccaagccccacagacugaaccacaugggcaucugcagcugcggccuguacaagcagcccggcgugcccgugaaguggaagagaugaggacuaguuauaagacugacuagcccgaugggccucccaacgggcccuccuccccuccuugcaccgagauuaaucaaaggcucuuuucagagccaccaaaaaaaaaaaaaaaaaaaaaaaaaaaaaaaaaaaaaaaaaaaaaaaaaaaaaaaaaaaaaaaaaaaaaaaaaaaaaaaaaaaaaaaaaaaaaaaaaaaaa

SEQ ID NO: 36357 - RNA, 1689 nt, Artificial Sequence
  mRNA product Design i-3 (hSL-A100) comprising derived and/or modified sequence from LASV(Josiah;Clade IV)__NP_694870__GPCmut9 (opt5)
aggagaaagcuuaccaugggccagaucgugaccuucuuucaagaggucccccacguuauugaagaggugaugaacaucgugcugauugcccucagcguccuggcugugcuuaaggggcuguacaauuucgccacaugcggacucguuggccuggugacguuucuucugcucugugggagauccugcaccacaucucuguauaaaggagucuacgaacugcagacccucgagcugaacauggaaacacuuaauaugaccaugccucugagcuguacaaagaacaauucccaucacuauaucauggugggcaacgagaccgggcucgagcugacgcuuaccaauacaucuauuaucaaccauaaauucugcaaucugagcgacgcgcacaagaaaaaccucuacgaucaugcucugauguccaucauuucuaccuuucaccugagcaucccgaauuucaaccaguaugaagccauguccugugacuuuaauggaggcaagauuagcguucaguacaaccucucucacuccuaugccggcgaugcugccaaucauugcgggacaguggcuaacggaguccugcaaaccuucaugcggauggccuggggcgggagcuacaucgcgcuugacucuggauguggcaacugggauugcauuaugacguccuaccaguaucugaucauucagaauacaaccugggaggaccacugucaguuuagccgccccucuccuaucggguaccucggacugcuuucccaaagaacacgggauaucuauauuagccgcagacugcucggcaccuucaccuggacacuguccgacucugaaggcaaggauacgcccgggggauacugccugacccgguggaugcucaucgaggccgagcugaaauguuuuggcaacacagcuguggccaagugcaaugaaaaacaugacgaggaguucugcgauaugcuucgccuguuugacuucaacaagcaggcuauucagagacucaaagccgaagcgcagaugagcauccaacugauuaauaaggccgugaacgcucuuaucaaugaucagcugaucaugaagaaccaccuccgggacauuauguguaucccuuauugcaauuacuccaaauauugguaccugaaccacaccacaaccgggcgcacgagccugcccaaguguuggcucgucucuaauggauccuaccugaacgaaacacauuucagcgacgauauugagcagcaagccgacaauaugaucaccgagaugcuucagaaagaauauauggagagacagggcaagaccccucuggggcucguugaucuguuuguguucucuaccagcuuuuaccugauuuccaucuuccuucaccucgugaaaaucccgacacaucggcacauugucggaaagucuugccccaaaccucaucgccugaaccacaugggcaucuguagcugcggccuguauaagcagcccggggugccuguuaaguggaaaagaugaggacuaguuauaagacugacuagcccgaugggccucccaacgggcccuccuccccuccuugcaccgagauuaaucaaaggcucuuuucagagccaccaaaaaaaaaaaaaaaaaaaaaaaaaaaaaaaaaaaaaaaaaaaaaaaaaaaaaaaaaaaaaaaaaaaaaaaaaaaaaaaaaaaaaaaaaaaaaaaaaaaaa

SEQ ID NO: 36358 - RNA, 1686 nt, Artificial Sequence
  mRNA product Design i-3 (hSL-A100) comprising derived and/or modified sequence from LASV(LP;Clade I)__AAF86701__GPCmut9 (opt5)
aggagaaagcuuaccaugggccagaucauuaccuucuuucaagaggugccccacgucaucgaagagguuaugaacauugugcugaucgcccucagccugcuugcuauucugaaggggcucuacaauaucgccacaugcggaaucauuggccugguggcguuccuuuuucugugugggaaauccugcucucucacgcugaagggaggcuaugaacugcagacccucgagcugaacauggaaacacuuaauaugaccaugccucugagcuguaccaaaaacuccucucaucacuacaucagagucgggaaugagacaggacucgagcugacacuuaccaacacgagcauuaucaaucauaaguucugcaaccuguccgacgcucacaaaaagaaucucuaugaucaugcccugaugucuauuaucagcaccuuucaccuguccauuccgaacuucaaucaguacgaagccaugagcugugacuuuaacggcggcaagaucucugugcaguauaaucucucccacagcuacgcuggggaugccgcugagcauugcggaacaguugccaacggcgugcugcaaaccuucaugcggauggcguggggagggcgcuauaucgcccuugacucuggcugugggaauugggauugcauuaugacauccuaccaguaccugaucauucagaacaccacgugggaagaccacugucaguuuagcagacccucuccuaucggauaucucggccugcuuucccaacggacacgcgauauuuacaucagcagacggcugcucggcaccuucacauggacccuguccgacucugaggggaacgagacccccggaggcuauugccugacacgcuggaugcucaucgaagcugagcugaaauguuuugggaauacggccgucgcuaagugcaacgaaaaacaugaugaggaguucugcgacaugcuuagacuguuugauuucaauaagcaggccauucggcgccucaaagcggaagcccagaugagcauccagcugauuaacaaggcugugaaugcccuuaucaacgaccaacugauuaugaagaaucaccucagagauaucauguguaucccuuacugcaacuauuccaaauacugguaucugaaucacaccagcucuggacggacaucccugcccaaguguuggcucauuagcaacggcucuuaccugaaugagacccaguucagcgacgacaucgaacagcaagcugauaacaugauuacagagaugcuucagaaagaauacaucgagcgccaggggaagaccccucugggacucguugacauuuuuaucuucuccacgucuuuuuaucugauuagcaucuuccugcaucuuaucaaaauuccgacacacagacauaucgugggcaagcccugcccuaaaccccaccggcucaaucauaugggcgucuguuccugcgggcuguacaagcacccuggagugcccaccaaguggaaacgcugaggacuaguuauaagacugacuagcccgaugggccucccaacgggcccuccuccccuccuugcaccgagauuaaucaaaggcucuuuucagagccaccaaaaaaaaaaaaaaaaaaaaaaaaaaaaaaaaaaaaaaaaaaaaaaaaaaaaaaaaaaaaaaaaaaaaaaaaaaaaaaaaaaaaaaaaaaaaaaaaaaaaa

SEQ ID NO: 36359 - RNA, 1686 nt, Artificial Sequence
  mRNA product Design i-3 (hSL-A100) comprising derived and/or modified sequence from LASV(803213;Clade II)__AAF86703__GPCmut9 (opt5)
aggagaaagcuuaccaugggccagaucauuaccuucuuucaagaggugccccacgucaucgaagagguuaugaacauugugcugaucgcccucagccugcuugcuauucugaaggggaucuacaauguggccacaugcggacucuucggccugaucuccuuucuucugcucugugggagaucuugcagcgucacguauaaaggaguguacgaacugcagacccuggagcucaacauggcgaaucugaacaugacaaugccucuuuccuguaccaagaauaacucucaucacuauauuaugguuggcaaugaaacagggcuggagcucacccugacaaacaccagcaucauuaaucauaaauucugcaaccuuuccgacgcucacaagaaaaaucuguacgaucaugcccucaugucuaucauuagcacguuucaccuguccaucccgaacuucaaucaguaugaggccaugagcugugacuuuaacggaggcaagauuucugugcaguacaaucugucccacagcuucgcugucgaugccgcuaaccauugcggcaccaucgccaacggggugcuccaaacauuuaugcggauggcguggggaggcucuuauaucgcccuggacuccggguguggaaauugggauugcauuaugaccagcuaccaguaccuuaucauucagaacacaaccugggaagaccacugucaguucucucgccccuccccuaucggcuaucuggggcuccugagccaaagaacgcgggauauuuacaucucccgcagacuucugggaacauuuaccuggacacucucugacagcgagggcaaugaagcucccggcggguauugccugacccgguggaugcugaucgaggccgagcucaaguguuucggaaacaccgcuguugccaaaugcaaugaaaagcaugaugaggaauuuugcgacaugcugcgccuuuucgauuucaacaaacaggcgauuaagagacugaaaacagaggcccagauguccauccagcucauuaauaaggcugugaacgcccugaucaaugaccaacuuauuaugaagaaccaucugcgggauaucauguguaucccuuacugcaauuauagccgcuacugguaucucaaccacacggucaccggcaaaacaucucugcccagauguuggcugguguccaaugggagcuaccucaacgaaacccacuuuucugacgacauugagcagcaggcugauaauaugaucacagagaugcugcaaaaggaauacauggaccggcagggaaaaaccccucuuggccugguggaucucuucgucuuuagcacguccuucuaucugauuucuaucuuucugcaccuuguuaagauuccgacacaucgccacaucguggggaaacccugcccuaagccccauagacucaaccacaugggaauuuguagcugcggccuguacaaacacccuggcgugcccgucaaguggaagcggugaggacuaguuauaagacugacuagcccgaugggccucccaacgggcccuccuccccuccuugcaccgagauuaaucaaaggcucuuuucagagccaccaaaaaaaaaaaaaaaaaaaaaaaaaaaaaaaaaaaaaaaaaaaaaaaaaaaaaaaaaaaaaaaaaaaaaaaaaaaaaaaaaaaaaaaaaaaaaaaaaaaaa

SEQ ID NO: 36360 - RNA, 1686 nt, Artificial Sequence
  mRNA product Design i-3 (hSL-A100) comprising derived and/or modified sequence from LASV(GA391;Clade III)__CAA36645__GPCmut9 (opt5)
aggagaaagcuuaccaugggccagaucgugaccuucuuucaagaggucccccacguuauugaagaggugaugaacaucgugcugauugcccucagcauccuggcuauucuuaaggggcuguacaaugucgccacaugcggacucaucggccuggugacguuccuucugcucuccgggagaucuuguagccugaucuauaaaggaaccuacgaacugcagacacucgagcugaacauggaaacccuuaauaugacaaugccucuguccugcaccaagaacaauucucaucacuauauucggguuggcaacgagacagggcucgagcugacccuuacgaauaccagcauccugaaccauaaauuuuguaaucucuccgacgcgcacaagcgcaaccuguacgaucauucucugaugagcauuaucuccacauuccaccucagcauuccgaauuuuaaccaguaugaagcuaugucuugcgacuucaauggaggcaaaaucaccgugcaguacaaccugucccacagcuuugccgucgaugccgcuggccauugugggacacuugccaauggagugcugcaaaccuucaugagaauggcuuggggcgggucuuauauugcccucgacuccggaugcggcaacugggauuguaucaugacgagcuaccaguaccugaucauucagaacacaaccugggacgaucacugccaguuuucucggcccuccccuaucggguaucuuggacugcucagccaacgcacaagagacauuuacaucucccggcgccugcugggcaccuucaccuggacacucucugauagcgagggcaaugaaacgcccgggggauauugucugaccagauggaugcuuauugaggcggagcugaagugcuuuggcaacacagccguugcuaaguguaaugaaaaacaugacgaggaguucugcgauaugcuccggcuguuugacuucaacaagcaggccauccgcagacuuaaaaccgaagcucagauguccauccagcugauuaauaaggccgugaacgcgcucaucaaugaucaacugauuaugaaaaaccaucugcgggacaucaugugcauuccuuacuguaauuauagccgcuacugguaucucaaccacacaucuaccgggaagacgucccugcccagaugcuggcuuaucagcaauggaucuuaccugaacgaaacaaaguucagcgacgauaucgagcagcaggccgacaauaugauuaccgagaugcuccaaaaagaauacaucgaucggcagggcaagaccccucuggggcuggucgaccuuuuuguguucuccacaucuuuuuaucucauuagcaucuuccugcaccuggugaaaauuccgacccaccgccauaucgucggaaagcccuguccuaaaccccacagacucaaccauaugggcauuugcuccuguggccuguacaagcagccugggguucccgugcgguggaaaagaugaggacuaguuauaagacugacuagcccgaugggccucccaacgggcccuccuccccuccuugcaccgagauuaaucaaaggcucuuuucagagccaccaaaaaaaaaaaaaaaaaaaaaaaaaaaaaaaaaaaaaaaaaaaaaaaaaaaaaaaaaaaaaaaaaaaaaaaaaaaaaaaaaaaaaaaaaaaaaaaaaaaaa

SEQ ID NO: 36361 - RNA, 1689 nt, Artificial Sequence
  mRNA product Design i-3 (hSL-A100) comprising derived and/or modified sequence from LASV(AV;Clade V)__CCA30314__GPCmut9 (opt5)
aggagaaagcuuaccaugggccagaucgugaccuucuuucaagaggucccccacguuauugaagaggugaugaacaucgugcugauugcccucagcauccuggcuguccuuaaggggcuguacaauauugccacaugcggacucaucggccugaucacguuccuucugcucugugggagauccugcucuagcaaccuguauaaaggaguguacgaacugcagucccucgaccugaauauggagacccuuaacaugacaaugccucugucuuguaccaagaauaacagccaucacuauauucggguuggcaaugauacagggcucgaacugacccuuacaaacaccuccauccugaaucauaaauuuugcaaccucucugacgcgcacaagaaagaucuguacgaccaugcucugaugagcauuaucuccacguuccaccucagcauuccgaauuuuaaccaguaugaggccaugucuugugauuucaauggaggcaagaucuccgugcaguacaaccugagccacucuuaugccauugacgcugccaaucauugcggcaccgucgcuaacgggauccuucaaacauuuaugcgcauggccuggggaggcuccuacaucgcgcuggauagcggguguggaaacugggacugcauuaugaccucuuaccaguaucucaucauucagaauacaaccugggagaaccacugucaguucuccagacccagcccuaucggcuaccuggggcuucugucccaacggacgcgcgauauuuauaucucuagacggcuccugggaacauuuaccuggacacugagcgacuccgaaggcaaugccacccccggcggguacugccucacccgcuggaugcugaucgaggcugaacuuaaguguuucggaaacacagccguggcuaaaugcaaugagaagcaugaugaggaauuuugcgacaugcugagacucuucgauuuuaacaaacaggccauuagccggcugaagucugaggcgcagauguccauccagcuuauuaauaaagccguuaacgcucugaucaaugaccaacucauuaugaagaaccaucugcgcgacaucauguguaucccuuauugcaauuacagcaaguauugguaccugaaccacacgauuaccggcaaaacaucucuccccaaguguuggcuggugagcaauggguccuaccuuaacgaaacccacuucucugaugacaucgagcagcaggccgauaauaugauuacagaaaugcugcaaaaagaguauauggagagacagggaaagaccccucucggccuggucgaccuguucguguuuagcacguccuucuaccuuaucagcauuuuucuccggcuggugaaaaucccgacacaccgccauauugucgggaagcccugcccuaaaccccacagacugaaccauaugggaaucuguucuugcggccucuauaagcagccuggcguucccgugcgguggaagcgcugaggacuaguuauaagacugacuagcccgaugggccucccaacgggcccuccuccccuccuugcaccgagauuaaucaaaggcucuuuucagagccaccaaaaaaaaaaaaaaaaaaaaaaaaaaaaaaaaaaaaaaaaaaaaaaaaaaaaaaaaaaaaaaaaaaaaaaaaaaaaaaaaaaaaaaaaaaaaaaaaaaaaa

SEQ ID NO: 36362 - RNA, 1686 nt, Artificial Sequence
  mRNA product Design i-3 (hSL-A100) comprising derived and/or modified sequence from LASV(Togo/2016/7082;Clade VI)__AMR44577__GPCmut9 (opt5)
aggagaaagcuuaccaugggccagaucauuaccuucuuucaagaggugccccacgucaucgaagagguuaugaacauugugcugaucgcccucagccugcuugcuauucugaaggggguguacaaugucgccacaugcggaaucaucggccucgugacguuccuguuucuuugugggagauccugcucucugauuuauaaaggaagcuacgaacuccagacccuggagcugaacauggaaacacucaauaugaccaugccucuguccuguacaaagaacucuagccaucacuauauccggguuggcaaugagaccgggcuugagcugacacucaccaacacguccauuaucaaucauaaauucugcaaccugucugacgcgcacaagcgcaaucuuuacgaucaugcucugaugagcauucucuccaccuuucaccugagcaucccgaacuucaaucaguaugaagccaugucuugugacuuuaacggaggcaaaauuuccgugcaguacaaucugagccacgccuaugcugucgaugccgcugagcauugcggcacaguggccaacgggguucuccaaaccuucaugagaauggcguggggaggcucuuacaucgcccuggacuccggguguggaaauugggauugcaucaugacaagcuaccaguaucuuauuauccagaacaccacgugggaagaccacugucaguuuucucggcccuccccuauuggcuaccuggggcuccugagccaacgcacaagagauaucuauauuucccggcgccuucugggaaccuucacauggacccucucugacagcgagggcaacgagacccccggcggguacugccugacaagauggaugcugaucgaagcugagcucaaguguuuuggaaauacggccguggcuaagugcaacgaaaaacaugaugaggaguucugcgacaugcugcggcuuuuugauuucaauaagcaggccauccagcgccugaaauccgaagcgcagaugagcauucaacucaucaacaaggccgucaaugcucugauuaacgaccagcuuaucaugaaaaaucaccugagagauaugauguguauuccuuauugcaacuacucuaaguauugguaccucaaucacaccuccagcggccggacaucucugcccaaguguuggcuggugagcaacggguccuaccucaaugagacccauuucucugacgacaucgaacagcaagccgauaacaugaucacagagaugcugcagaaagaauauauugaccgccagggaaagaccccucuuggccugguggaucucuuugucuucagcacguccuuuuaccugaucagcauuuuccugcaccuuaucaaaauuccgacacauagacacaucguugggaagcccugcccuaaaccccaucggcucaaucacaugggaauuuguucuugcggccuguauaagcagccuggcgugcccacccgcuggaaaagaugaggacuaguuauaagacugacuagcccgaugggccucccaacgggcccuccuccccuccuugcaccgagauuaaucaaaggcucuuuucagagccaccaaaaaaaaaaaaaaaaaaaaaaaaaaaaaaaaaaaaaaaaaaaaaaaaaaaaaaaaaaaaaaaaaaaaaaaaaaaaaaaaaaaaaaaaaaaaaaaaaaaaa

SEQ ID NO: 36363 - RNA, 1686 nt, Artificial Sequence
  mRNA product Design i-3 (hSL-A100) comprising derived and/or modified sequence from LASV(KAK-428;Clade n.d. (VII))__ANH09740__GPCmut9 (opt5)
aggagaaagcuuaccaugggccagaucgugaccuucuuucaagaggucccccacguuauugaagaggugaugaacaucgugcugauugcccucagccugcuugcuauccugaaggggcucuacaauuucgccacaugcggagucauuggccugaucacguuucuucugcucugugggagauccugcucugcgaccuauaaaggacaguacgaacugcagacacuggagcucaacauggaaagccugaauaugaccaugccucuuuccuguacaaagaacaauucucaucacuauauccgggcuggcaacaauaccgggcuggagcucacacugaccaacacgagcauuaucucccauaaauucugcaaucuuucugacgcccacaagaaaaaccuguacgaucauacccucaugagcauuaucacaaccuuucaccuguccauuccgaauuucaaccaguaugaggccaugagcugugacuuuaauggaggcaagaucucuauucaauacaaccugucccacagcuaugcuggcgaugccgcucagcauugcgggacaguggccaauggaguucuccagaccuucaugcgcauggcguggggcgggucuuaccuggcccuugacuccggauguagaggcugggauugcaucaucagcucuuaccaguaucugauuauccaaaacacgacaugggacgaucacugucaguuuucccggcccagcccuauuggguaccucggauucgugucccagaagacccgcgacaucuauauuucuagacggcugcuuggcacauuuaccuggacccugagcgauuccgaaggccaugacaugcccgggggauacugccucacacgcuggaugcugaucgaggcugaucugaaauguuucggcaacacggccgucgcuaagugcaaugaaaaacacgacgaggaguuuugcgauauguggagacucuucgacuucaacaagcaggccauccaacggcugaaagcggaagcccagaugaauauucagcuuaucaacaaggcugugaaugcccugauuaacgaccaacucaugaugaagaaucaucugcgcgauaucauguguauuccuuauugcaacuacagcaaauuuugguaucuuaauaacaccacaaccgggagaacaucucugccccgguguuggcucaucuccaauggaagcuaccugaacgagacccacuucucugacgauaucgaacagcaggcugacaauaugauuacggagaugcugcagaaggaauacauggaucgccaaggcaaaacaccucucgggcugguugaccuuuuuguguucagcaccuccuuuuaucugaucaccauuuuccuccaccuggucaagaucccgacacauagacacauugugggaaaacccugcccuaagccccaucggcugaaccacaugggcaucuguucuugcggccuuuacaaacagccuggggugcccguccgcuggaagagaugaggacuaguuauaagacugacuagcccgaugggccucccaacgggcccuccuccccuccuugcaccgagauuaaucaaaggcucuuuucagagccaccaaaaaaaaaaaaaaaaaaaaaaaaaaaaaaaaaaaaaaaaaaaaaaaaaaaaaaaaaaaaaaaaaaaaaaaaaaaaaaaaaaaaaaaaaaaaaaaaaaaaa

SEQ ID NO: 36364 - RNA, 1686 nt, Artificial Sequence; identical to SEQ ID NO: 36358
  mRNA product Design i-3 (hSL-A100) comprising derived and/or modified sequence from LASV(Pinneo-NIG-1969;Clade I)__AIT17836__GPCmut9 (opt5)

SEQ ID NO: 36365 - RNA, 1686 nt, Artificial Sequence
  mRNA product Design i-3 (hSL-A100) comprising derived and/or modified sequence from LASV(ISTH0009-NIG-2011;Clade II)__AIT17404__GPCmut9 (opt5)
aggagaaagcuuaccaugggccagaucauuaccuucuuucaagaggugccccacgucaucgaagagguuaugaacauugugcugaucgcccucagccugcuugcuauucugaaggggaucuacaauguggccacaugcggacucuucggccuggucuccuuucuucugcucugugggagaucuugcagcacgaccuauaaaggaguguacgaacugcagacacuggagcucgacauggcgucccugaacaugaccaugccucuuucuuguacaaagaauaacagccaucacuauaucaugguuggcaaugaaaccgggcuggagcucacacugaccaacacguccauuaucaaucauaaauucugcaaccuuucugaugcucacaagaaaaaucuguacgaccaugcccucaugagcauuaucuccaccuuucaccugagcauuccgaacuucaaucaguaugaggccaugucuugugauuuuaacggaggcaagaucuccgugcaguacaaucugagccacgcuuaugccgucgacgcugccaaccauugcggcacaauugcgaauggggugcuccaaaccuucaugcggauggccuggggaggcucuuacaucgcucuggauuccggguguggaagcugggacugcaucaugacaucuuaccaguaucuuauuauccagaacaccacgugggaagaucacugucaguuuucccgccccagcccuauuggcuaccuggggcuccugucccaaagaacacgggacaucuauauuucucgcagacuucugggaaccuucacauggacccucagcgauuccgagggcaacgaaacccccggcggguacugccugacacgguggaugcugaucgaggccgagcucaaguguuuuggaaauacggcuguugccaaaugcaacgaaaagcaugacgaggaguucugcgauaugcugcgccuuuuugacuucaauaaacaggcgaucagacggcugaagaccgaagcccagaugagcauucagcucaucaacaaagcugugaaugcccugauuaacgaucaacuuaucaugaagaaucaucugcgcgacauuauguguaucccuuauugcaacuacucuaaguauugguaccucaaucacacagucaccggcaaaacaucccugcccagauguuggcuggugagcaacgggucuuaccucaaugaaacccacuucagcgacgauaucgagcagcaggcugacaacaugauuacggagcugcuucaaaaggaauauauggaucggcagggaaaaacaccucugggccucguggaccuguuugucuucuccaccucuuuuuaccugaucagcauuuuccuucaccucaucaagauuccgacccaucgccacaucacagggaaacccugcccuaagccccauagacugaaucacaugggaauuuguuccugcggccuguauaaacacccuggcguucccgugaaguggaagcggugaggacuaguuauaagacugacuagcccgaugggccucccaacgggcccuccuccccuccuugcaccgagauuaaucaaaggcucuuuucagagccaccaaaaaaaaaaaaaaaaaaaaaaaaaaaaaaaaaaaaaaaaaaaaaaaaaaaaaaaaaaaaaaaaaaaaaaaaaaaaaaaaaaaaaaaaaaaaaaaaaaaaa

SEQ ID NO: 36366 - RNA, 1686 nt, Artificial Sequence
  mRNA product Design i-3 (hSL-A100) comprising derived and/or modified sequence from LASV(ISTH2010-NIG-2012;Clade II)__AIT17482__GPCmut9 (opt5)
aggagaaagcuuaccaugggccagaucauuaccuucuuucaagaggugccccacgucaucgaagagguuaugaacauugugcugaucgcccucagccugcuugcuauucugaaggggaucuacaauguggccacaugcggacucuucggccuggucuccuuucuucugcucugugggagaucuugcagcacgaccuauaaaggaguguacgaacugcagacacuggagcucgacauggcgucccugaacaugaccaugccucuuucuuguacaaagaauaacagccaucacuauaucaugguuggcaaugaaaccgggcuggagcucacacugaccaacacguccauuaucaaucauaaauucugcaaccuuucugaugcucacaagaaaaaucuguacgaccaugcccucaugagcauuaucuccaccuuucaccugagcauuccgaacuucaaucaguaugaggccaugucuugugauuuuaacggaggcaagaucuccgugcaguacaaucugagccacgcuuaugccgucgacgcugccaaccauugcggcacaauugcgaauggggugcuccaaaccuucaugcggauggccuggggaggcucuuacaucgcucuggauuccggguguggaagcugggacugcaucaugacaucuuaccaguaucuuauuauccagaacauuaccugggaagaucacugucaguuuucccgccccagcccuaucggcuaccuggggcuccugucccaaagaacgcgggacauuuauaucucucgcagacuucugggaacauucaccuggacacucagcgauuccgagggcaacgaaacccccggcggguacugccugacccgguggaugcugaucgaggccgagcucaaguguuuuggaaauacagcuguugccaaaugcaacgaaaagcaugacgaggaguucugcgauaugcugcgccuuuuugacuucaauaaacaggcgauuagacggcugaagacggaagcccagaugagcauccagcucauuaacaaagcugugaaugcccugaucaacgaucaacuuauuaugaagaaucaucugcgcgacaucauguguaucccuuauugcaacuacucuaaguauugguaccucaaucacaccgucacaggcaaaaccucccugcccagauguuggcuggugagcaacgggucuuaccucaaugaaacacacuucagcgacgauauugagcagcaggcugacaacaugaucaccgagcugcuucaaaaggaauauauugaucggcagggaaaaacgccucugggccucguggaccuguuugucuucuccacaucuuuuuaccugaucagcauuuuccuucaccucguuaagaucccgacccaucgccacgugguggggaaacccugcccuaagccccauagacugaaucacaugggaauuuguuccugcggccuguauaaacacccuggcguccccgugaaguggaagcggugaggacuaguuauaagacugacuagcccgaugggccucccaacgggcccuccuccccuccuugcaccgagauuaaucaaaggcucuuuucagagccaccaaaaaaaaaaaaaaaaaaaaaaaaaaaaaaaaaaaaaaaaaaaaaaaaaaaaaaaaaaaaaaaaaaaaaaaaaaaaaaaaaaaaaaaaaaaaaaaaaaaaa

SEQ ID NO: 36367 - RNA, 1686 nt, Artificial Sequence
  mRNA product Design i-3 (hSL-A100) comprising derived and/or modified sequence from LASV(Lassa virus/H.sapiens-wt/NGA/2015/ISTH_0543;Clade II)__AVO03639__GPCmut9 (opt5)
aggagaaagcuuaccaugggccagaucauuaccuucuuucaagaggugccccacgucaucgaagagguuaugaacauugugcugaucgcccucagccugcuugcuauucugaaggggaucuacaauguggccacaugcggacucuucggccuggucuccuuucuucugcucugugggagaucuugcagcacgaccuauaaaggaguguacgaacugcagacacuggagcucgacauggcgaaccugaauaugaccaugccucuuuccuguacaaagaacaauucucaucacuauaucaugguuggcaacgaaaccgggcuggagcucacacugaccaauacgagcauuaucaaccauaaauucugcaaucuuuccgaugcucacaagaaaaaccuguacgaccaugcccucaugucuauuaucagcaccuuucaccuguccauuccgaauuucaaccaguaugaggccaugagcugugauuuuaauggaggcaagaucucugugcaguacaaccugucccacacauaugcugucgacgccgcuaaucauugcggcaccauugccaacggggugcuccaaacauucaugcggauggcguggggaggcagcuacaucgcccuggauucuggguguggauccugggacugcaucaugaccagcuaccaguaucuuguuauucagaacacgacaugggaagaucacugucaguuuucucgccccuccccuaucggcuaccuggggcuccugagccaaagaacccgggacauuuauaucucccgcagacuucugggaacauucaccuggacccucucugauagcgagggcaaugaaacacccggcggguacugccugacgcgguggaugcugauugaggcugagcucaaguguuuuggaaacaccgccguggcuaaaugcaaugaaaagcaugacgaggaguucugcgauaugcugcgccuuuuugacuucaacaaacaggccaucagacggcugaagacagaagcgcagauguccauccagcucauuaauaaagccgucaacgcucugaucaaugaucaacuuauuaugaagaaccaucugcgcgacaucauguguauuccuuauugcaauuacagcaaguauugguaccucaaccacaccgugacaggcaaaaccucucugcccagauguuggcugguguccaaugggagcuaccucaacgaaacgcacuucucugacgauaucgagcagcaggccgacaauaugaucacagagcugcuucaaaaggaauauauugaucggcagggaaaaaccccucugggccucgucgaccuguuuguuuucagcaccuccuuuuaccugaucucuauuuuccuucaccucgugaagaucccgacacaucgccacauuaccgggaaacccugcccuaagccccauagacugaaccacaugggaaucuguagcugcggccuguauaaacacccuggcgugcccgucaaguggaagcggugaggacuaguuauaagacugacuagcccgaugggccucccaacgggcccuccuccccuccuugcaccgagauuaaucaaaggcucuuuucagagccaccaaaaaaaaaaaaaaaaaaaaaaaaaaaaaaaaaaaaaaaaaaaaaaaaaaaaaaaaaaaaaaaaaaaaaaaaaaaaaaaaaaaaaaaaaaaaaaaaaaaaa

SEQ ID NO: 36368 - RNA, 1686 nt, Artificial Sequence
  mRNA product Design i-3 (hSL-A100) comprising derived and/or modified sequence from LASV(Lassa virus/H.sapiens-wt/NGA/2016/ISTH_0009;Clade II)__AVO03571__GPCmut9 (opt5)
aggagaaagcuuaccaugggccagaucauuaccuucuuucaagaggugccccacgucaucgaagagguuaugaacauugugcugaucgcccucagccugcuugcuauucugaaggggaucuacaauguggccacaugcggacuccugggccuugucuccuuccugcuccugugugggagaucuugcagcacgaccuauaaaggaguguacgaacugcagacacucgagcuggacauggcgucccuuaacaugaccaugccucugucuuguacaaagaauaacagccaucacuauaucaugguuggcaaugaaaccgggcucgagcugacacuuaccaacacguccauuaucaaucauaaauuuugcaaccugucugaugcucacaagaaaaaucucuacgaccaugcccugaugagcauuaucuccaccuuccaccugagcauuccgaacuuuaaucaguaugaggccaugucuugugauuucaacggaggccggaucuccgugcaguacaaucucagccacucuuaugcugucgacgccgcuaaccauugcggcacaauugccaauggggugcugcaaaccuuuaugcgcauggcguggggaggcuccuacaucgcccuugauagcggguguggaucuugggacugcaucaugacauccuaccaguaucugauuauccagaacaccacgugggaagaucacugucaguucagcagacccuccccuauuggcuaccucgggcugcuuucucaacggacacgcgacaucuauauuagcagacggcugcucggaaccuuuacauggacccuguccgauagcgagggcaacgaaacccccggcggguacugccugacacgcuggaugcucaucgaggcugagcugaaguguuucggaaauacggccguugcuaagugcaacgaaaaacaugacgaggaauuuugcgauaugcuuagacuguucgacuuuaauaagcaggccauccggcgccucaaaaccgaggcgcagaugucuauucagcugaucaacaaggccgugaaugcucuuauuaacgaucaacugaucaugaaaaaucaccucagagacauuauguguaucccuuauugcaacuacuccaaguauugguaccugaaucacacagucaccggcaagacaagccugccccgguguuggcucgugucuaacgggagcuaccugaaugaaacccauuucuccgacgauaucgagcagcaggccgacaacaugauuacggagcuucugcaaaaagaauauaucgaucgccagggaaagacaccucucggccugguggaccuguucgucuuuucuaccagcuucuaccuuauuuccaucuuucuccaccugguuaaaauuccgacccauagacacaucacagggaagcccugcccuaaaccccaucggcugaaucacaugggaauuuguagcugcggccucuauaaccacccuggcgugcccgugaaguggaaacgcugaggacuaguuauaagacugacuagcccgaugggccucccaacgggcccuccuccccuccuugcaccgagauuaaucaaaggcucuuuucagagccaccaaaaaaaaaaaaaaaaaaaaaaaaaaaaaaaaaaaaaaaaaaaaaaaaaaaaaaaaaaaaaaaaaaaaaaaaaaaaaaaaaaaaaaaaaaaaaaaaaaaaa

SEQ ID NO: 36369 - RNA, 1686 nt, Artificial Sequence
  mRNA product Design i-3 (hSL-A100) comprising derived and/or modified sequence from LASV(Lassa virus/H.sapiens-wt/NGA/2016/ISTH_0017;Clade II)__AVO03567__GPCmut9 (opt5)
aggagaaagcuuaccaugggccagaucauuaccuucuuucaagaggugccccacgucaucgaagagguuaugaacauugugcugaucgcccucagccugcuugcuauucugaaggggaucuacaauguggccacaugcggacucuucggccuggucuccuuucuucugcucugugggagaucuugcagcacgaccuauaaaggaguguacgaacugcagacacuggagcucgacauggcgucccugaacaugaccaugccucuuucuuguacaaagaauaacagccaucacuauaucaugguuggcaaugaaaccgggcuggagcucacacugaccaacacguccauuaucaaucauaaauucugcaaccuuucugaugcucacaagaaaaaucuguacgaccaugcccucaugagcauuaucuccaccuuucaccugagcauuccgaacuucaaucaguaugaggccaugucuugugauuuuaacggaggcaagaucuccgugcaguacaaucugagccacacauaugcuauugacgccgcuaaccauugcggcaccaucgccaaugggguccuccaaacauucaugcggauggcguggggaggcucuuacaucgcccuggauuccggguguggaagcugggacugcauuaugaccucuuaccaguaucuuaucauucagaacacgacaugggaagaucacugucaguuuucccgccccagcccuaucggcuaccuggggcuccugucccaaagaacccgggacauuuauaucucucgcagacuucugggaacauucaccuggacccucagcgauuccgagggcaacgaaacacccggcggguacugccugacgcgguggaugcugaucgaggcugagcucaaguguuuuggaaauaccgccguggcuaaaugcaacgaaaagcaugacgaggaguucugcgauaugcugcgccuuuuugacuucaauaaacaggccauuagacggcugaagacagaagcgcagaugagcauccagcucauuaacaaagccguuaaugcucugaucaacgaucaacuuauuaugaagaaucaucugcgcgacaucauguguaucccuuauugcaacuacucuaaguauugguaccucaaucacaccgugacaggcaaaaccucccugcccagauguuggcuggucagcaacgggucuuaccucaaugaaacgcacuucagcgacgauauugagcagcaggccgacaacaugaucacagagcugcuucaaaaggaauauauggaucggcagggaaaaaccccucugggccucguggaccuguuuguguucuccaccucuuuuuaccugauuagcaucuuccuucaccucguccgcauuccgacacauagacacguuaucgggaagcccugcccuaaaccccaucggcugaaucacaugggaauuuguuccugcggccuguauaagcacccuggcgugcccgugaaauggaagcgcugaggacuaguuauaagacugacuagcccgaugggccucccaacgggcccuccuccccuccuugcaccgagauuaaucaaaggcucuuuucagagccaccaaaaaaaaaaaaaaaaaaaaaaaaaaaaaaaaaaaaaaaaaaaaaaaaaaaaaaaaaaaaaaaaaaaaaaaaaaaaaaaaaaaaaaaaaaaaaaaaaaaaa

SEQ ID NO: 36370 - RNA, 1686 nt, Artificial Sequence
  mRNA product Design i-3 (hSL-A100) comprising derived and/or modified sequence from LASV(Lassa virus/H.sapiens-wt/NGA/2018/ISTH_0959;Clade II)__AVV65099__GPCmut9 (opt5)
aggagaaagcuuaccaugggccagaucauuaccuucuuucaagaggugccccacgucaucgaagagguuaugaacauugugcugaucgcccucagccugcuugcuauucugaaggggaucuacaauguggucacaugcggacucuucggccugguguccuuucuucugcucugugggagaucuugcagcacgaccuauaaaggaguuuacgaacugcagacacuggagcucgacauggccucccugaacaugaccaugccucuuucuuguacaaagaauaacagccaucacuauaucauggugggcaaugaaaccgggcuggagcucacacugaccaacacguccauuaucaaucauaaauucugcaaccuuucugaugcgcacaagaaaaaucuguacgaccaugcucucaugagcauuaucuccaccuuucaccugagcauuccgaacuucaaucaguaugaggccaugucuugugauuuuaacggaggcaagaucuccguccaguacaaucugagccacgccuaugcuauugacgccgcuaaccauugcggcacaaucgccaauggggugcuccaaaccuucaugcggauggcguggggaggcucuuacaucgcccuggauuccggguguggaagcugggacugcauuaugacaucuuaccaguaucuuaucauucagaacaccacgugggaagaucacugucaguuuucccgccccagcccuaucggcuaccuggggcuccugucccaaagaacacgggacauuuauaucucucgcagacuucugggaaccuucacauggacccucagcgauuccgagggcaacgaaacccccggcggguacugccugacacgguggaugcugaucgaggcugagcucaaguguuuuggaaauacggccguugcuaaaugcaacgaaaagcaugacgaggaguucugcgauaugcugcgccuuuuugacuucaauaaacaggccauuagacggcugaagaccgaagcgcagaugagcauccagcucauuaacaaagccgugaaugcucugaucaacgaucaacuuauuaugaagaaucaucugcgcgacaucauguguaucccuuauugcaacuacucuaaguauugguaccucaaucacacagucaccggcaaaacaucccugcccagauguuggcuggugagcaacgggucuuaccucaaugaaacccacuucagcgacgauauugagcagcaggccgacaacaugaucacggagcugcuucaaaaggaauauauugaucggcagggaaaaacaccucugggccucguggaccuguuugucuucuccaccucuuuuuaccugaucagcauuuuccuucaccucguuaagaucccgacccaucgccacgugauugggaaacccugcccuaagccccauagacugaaucacaugggaaucuguuccugcggccuguauaaacacccuggcgugcccgucaaguggaagcggugaggacuaguuauaagacugacuagcccgaugggccucccaacgggcccuccuccccuccuugcaccgagauuaaucaaaggcucuuuucagagccaccaaaaaaaaaaaaaaaaaaaaaaaaaaaaaaaaaaaaaaaaaaaaaaaaaaaaaaaaaaaaaaaaaaaaaaaaaaaaaaaaaaaaaaaaaaaaaaaaaaaaa

SEQ ID NO: 36371 - RNA, 1686 nt, Artificial Sequence
  mRNA product Design i-3 (hSL-A100) comprising derived and/or modified sequence from LASV(LASV003-NIG-2008;Clade II)__AIT17580__GPCmut9 (opt5)
aggagaaagcuuaccaugggccagaucauuaccuucuuucaagaggugccccacgucaucgaagagguuaugaacauugugcugaucgcccucagccugcuugcuauucugaaggggaucuacaauguggccacaugcggacucuucggccuggucuccuuucuucugcucugugggagaucuugcagcacgaccuauaaaggaguguacgaacugcagacacuggagcucgacauggcgucccugaacaugaccaugccucuuucuuguacaaagaauaacagccaucacuauaucaugguuggcaaugaaaccgggcuggagcucacacugaccaacacguccauuaucaaucauaaauucugcaaccuuucugaugcucacaagaaaaaucuguacgaccaugcccucaugagcauuaucuccaccuuucaccugagcauuccgaacuucaaucaguaugaggccaugucuugugauuuuaacggaggcaagaucuccgugcaguacaaucugagccacacauaugcugucgacgccgcuaaccauugcggcaccauugccaauggggugcuccaaacauucaugcggauggcguggggaggcucuuacaucgcccuggauuccggguguggaagcugggacugcaucaugaccucuuaccaguaucuuauuauccagaacacgacaugggaagaucacugucaguuuucccgccccagcccuauuggcuaccuggggcuccugucccaaagaacccgggacaucuauauuucucgcagacuucugggaacauucaccuggacccucagcgauuccgagagcaacgaaacacccggcggcuacugccugacgcgguggaugcugaucgaggcugagcucaaguguuuugggaauaccgccguugcuaaaugcaacgaaaagcaugacgaggaguucugcgauaugcugcgccuuuuugacuucaauaaacaggccaucagacggcugaaggcggaagcccagaugucuauucagcucaucaacaaagcugugaaugcccugauuaacgaucaacuuaucaugaagaaucaucugcgcgacauuauguguaucccuuauugcaacuacuccaaguauugguaccucaaucacacagucaccggaagaacaagccugccccgguguuggcuggugucuaacggcagcuaccucaaugaaacccacuucuccgacgauaucgagcagcaggcugacaacaugauuacggagcugcuucaaaaagaauauauggaucgccaggggaagacaccucugggacucguggaccuguuugucuucucuaccagcuuuuaccugaucuccauuuuccuucaccucguuaaaaucccgacccauagacacgugauuggcaagcccugcccuaaaccccaucggcugaaucacauggggaucuguagcugcggacuguauaagcacccuggcgugcccgucaaauggaagcgcugaggacuaguuauaagacugacuagcccgaugggccucccaacgggcccuccuccccuccuugcaccgagauuaaucaaaggcucuuuucagagccaccaaaaaaaaaaaaaaaaaaaaaaaaaaaaaaaaaaaaaaaaaaaaaaaaaaaaaaaaaaaaaaaaaaaaaaaaaaaaaaaaaaaaaaaaaaaaaaaaaaaaa

SEQ ID NO: 36372 - RNA, 1686 nt, Artificial Sequence
  mRNA product Design i-3 (hSL-A100) comprising derived and/or modified sequence from LASV(LASV035-NIG-2009;Clade II)__AIT17588__GPCmut9 (opt5)
aggagaaagcuuaccaugggccagaucauuaccuucuuucaagaggugccccacgucaucgaagagguuaugaacauugugcugaucgcccucagccugcuugcuauucugaaggggaucuacaauguggccacaugcggacucuucggccuggucuccuuucuucugcucugugggagaucuugcagcacgaccuauaaaggaguguacgaacugcagacacuggagcucgacauggcgucccugaacaugaccaugccucuuucuuguacaaagaauaacagccaucacuauaucaugguuggcaaugaaaccgggcuggagcucacacugaccaacacguccauuaucaaucauaaauucugcaaccuuucugaugcucacaagaaaaaucuguacgaccaugcccucaugagcauuaucuccaccuuucaccugagcauuccgaacuucaaucaguaugaggccaugucuugugauuuuaacggaggcaagaucuccgugcaguacaaucugagccacgcuuaugccgucgacgcugccaaccauugcggcacaauugcgaauggggugcuccaaaccuucaugcggauggccuggggaggcucuuacaucgcucuggauuccggguguggaagcugggacugcaucaugacaucuuaccaguaucuuauuauccagaacaccacgugggaagaucacugucaguuuucccgccccagcccuauuggcuaccuggggcuccugucccaaagaacacgggacaucuauauuucucgcagacuucugggaaccuucacauggacccucagcgauuccgagggcaacgaaacccccggcggguacugccugacacgguggaugcugaucgaggccgagcucaaguguuuuggaaauacggcuguugccaaaugcaacgaaaagcaugacgaggaguucugcgauaugcugcgccuuuuugacuucaauaaacaggcgaucagacggcugaaggccgaagcucagaugagcauucagcucaucaacaaagccgugaaugcucugauuaacgaucaacuuaucaugaagaaucaucugcgcgacauuauguguaucccuuauugcaacuacucuaaguauugguaccucaaucacaccgucacaggcaaaaccucccugcccagauguuggcuggugagcaacgggucuuaccucaaugaaacacacuucagcgacgauaucgagcagcaggccgacaacaugauuaccgagcugcuucaaaaggaauauaucgaucggcagggaaaaacgccucugggccucguggaccuguuugucuucuccacaucuuuuuaccugauuagcaucuuccuucaccucguuaagauuccgacccaucgccacgugaucgggaaacccugcccuaagccccauagacugaaucacaugggaauuuguuccugcggccuguauaaacacccuggcgugcccgucaaguggaagcggugaggacuaguuauaagacugacuagcccgaugggccucccaacgggcccuccuccccuccuugcaccgagauuaaucaaaggcucuuuucagagccaccaaaaaaaaaaaaaaaaaaaaaaaaaaaaaaaaaaaaaaaaaaaaaaaaaaaaaaaaaaaaaaaaaaaaaaaaaaaaaaaaaaaaaaaaaaaaaaaaaaaaa

SEQ ID NO: 36373 - RNA, 1686 nt, Artificial Sequence
  mRNA product Design i-3 (hSL-A100) comprising derived and/or modified sequence from LASV(LASV1000-NIG-2009;Clade II)__AIT17782__GPCmut9 (opt5)
aggagaaagcuuaccaugggccagaucauuaccuucuuucaagaggugccccacgucaucgaagagguuaugaacauugugcugaucgcccucagccugcuugcuauucugaaggggaucuacaauguggccacaugcggacucuucggccuggucuccuuucuucugcucugugggagaucuugcagcacgaccuauaaaggaguguacgaacugcagacacuggagcucgacauggcgucccugaacaugaccaugccucuuucuuguacaaagaauaacagccaucacuauaucaugguuggcaaugaaaccgggcuggagcucacacugaccaacacguccauuaucaaucauaaauucugcaaccuuucugaugcucacaagaaaaaucuguacgaccaugcccucaugagcauuaucuccaccuuucaccugagcauuccgaacuucaaucaguaugaggccaugucuugugauuuuaacggaggcaagaucuccgugcaguacaaucugagccacacauaugcugucgacgccgcuaaccauugcggcaccauugccaauggggugcuccaaacauucaugcggauggcguggggaggcucuuacaucgcccuggauuccggguguggaagcugggacugcaucaugaccucuuaccaguaucuuauuauccagaacacgacaugggaagaucacugucaguuuucccgccccagcccuauuggcuaccuggggcuccugucccaaagaacccgggacaucuauauuucucgcagacuucugggaacauucaccuggacccucagcgauuccgagggcaacgaaacacccggcggguacugccugacgcgguggaugcugaucgaggcugagcucaaguguuuuggaaauaccgccguugcuaaaugcaacgaaaagcaugacgaggaguucugcgauaugcugcgccuuuuugacuucaauaaacaggccaucaagagacugaaaacagaagcgcagaugagcauucagcucaucaacaaggccgugaaugcucugauuaacgaucaacuuaucaugaagaaucaucugcgggacauuauguguaucccuuauugcaacuacucuaaauauugguaccucaaucacaccgucacaggcaagaccucccugccccgcuguuggcuggugagcaacgggucuuaccucaaugaaacgcacuucagcgacgauaucgagcagcaggccgacaacaugauuacagagcugcuucaaaaagaauauaucgauagacagggaaagaccccucugggccucguggaccuguuugucuucuccaccucuuuuuaccugauuagcaucuuccuucaccucguuaaaauuccgacacaucggcacgugguggggaagcccugcccuaaaccccaucgccugaaucacaugggaaucuguuccugcggccuguauaagcacccuggcguccccgugaaguggaaaagaugaggacuaguuauaagacugacuagcccgaugggccucccaacgggcccuccuccccuccuugcaccgagauuaaucaaaggcucuuuucagagccaccaaaaaaaaaaaaaaaaaaaaaaaaaaaaaaaaaaaaaaaaaaaaaaaaaaaaaaaaaaaaaaaaaaaaaaaaaaaaaaaaaaaaaaaaaaaaaaaaaaaaa

SEQ ID NO: 36374 - RNA, 1686 nt, Artificial Sequence
  mRNA product Design i-3 (hSL-A100) comprising derived and/or modified sequence from LASV(LASV221-NIG-2010;Clade II)__AIT17624__GPCmut9 (opt5)
aggagaaagcuuaccaugggccagaucauuaccuucuuucaagaggugccccacgucaucgaagagguuaugaacauugugcugaucgcccucagccugcuugcuauucugaaggggaucuacaauguggccacaugcggacucuucggccuggucuccuuucuucugcucugugggagaucuugcagcacgaccuauaaaggaguguacgaacugcagacacuggagcucgacauggcgucccugaacaugaccaugccucuuucuuguacaaagaauaacagccaucacuauaucaugguuggcaaugaaaccgggcuggagcucacacugaccaacacguccauuaucaaucauaaauucugcaaccuuucugaugcucacaagaaaaaucuguacgaccaugcccucaugagcauuaucuccaccuuucaccugagcauuccgaacuucaaucaguaugaggccaugucuugugauuuuaacggaggcaagaucuccgugcaguacaaucugagccacacauaugcuauugacgccgcuaaccauugcggcaccaucgccaaugggguccuccaaacauucaugcggauggcguggggaggcucuuacaucgcccuggauuccggguguggaagcugggacugcauuaugaccucuuaccaguaucuuaucauucagaacacgacaugggaagaucacugucaguuuucccgccccagcccuaucggcuaccuggggcuccugucccaaagaacccgggacauuuauaucucucgcagacuucugggaacauucaccuggacccucagcgauuccgagggcaacgaaacacccggcggguacugccugacgcgguggaugcugaucgaggcugagcucaaguguuuuggaaauaccgccguggcuaaaugcaacgaaaagcaugacgaggaguucugcgauaugcugcgccuuuuugacuucaauaaacaggccauuagacggcugaagacagaagcgcagaugagcauccagcucauuaacaaagccguuaaugcucugaucaacgaucaacuuauuaugaagaaucaucugcgcgacaucauguguaucccuuauugcaacuacucuaaguauugguaccucaaucacaccgugacaggcaaaaccucccugcccagauguuggcuggucagcaacgggucuuaccucaaugaaacgcacuucagcgacgauauugagcagcaggccgacaacaugaucacagagaugcugcaaaaggaauauauggaucggcagggaaaaaccccucuuggccugguggaccucuuuguguucuccaccucuuuuuaccugauuagcaucuuccugcaccuugucaagauuccgacacaucgccacguuaucgggaaacccugcccuaagccccauagacucaaucacaugggaauuuguuccugcggccuguauaaacacccuggcgugcccgugaaguggaagcggugaggacuaguuauaagacugacuagcccgaugggccucccaacgggcccuccuccccuccuugcaccgagauuaaucaaaggcucuuuucagagccaccaaaaaaaaaaaaaaaaaaaaaaaaaaaaaaaaaaaaaaaaaaaaaaaaaaaaaaaaaaaaaaaaaaaaaaaaaaaaaaaaaaaaaaaaaaaaaaaaaaaaa

SEQ ID NO: 36375 - RNA, 1686 nt, Artificial Sequence
  mRNA product Design i-3 (hSL-A100) comprising derived and/or modified sequence from LASV(LASV237-NIG-2010;Clade II)__AIT17638__GPCmut9 (opt5)
aggagaaagcuuaccaugggccagaucauuaccuucuuucaagaggugccccacgucaucgaagagguuaugaacauugugcugaucgcccucagccugcuugcuauucugaaggggaucuacaauguggccacaugcggacucuucggccuggucuccuuucuucugcucugugggagaucuugcagcacgaccuauaaaggaguguacgaacugcagacacuggagcucgacauggcgucccugaacaugaccaugccucuuucuuguacaaagaauaacagccaucacuauaucaugguuggcaaugaaaccgggcuggagcucacacugaccaacacguccauuaucaaucauaaauucugcaaccuuucugaugcucacaagaaagaccuguacgaucaugcccucaugagcauuaucuccaccuuucaccugagcauuccgaauuucaaccaguaugaggccaugucuugugacuuuaauggaggcaagaucuccgugcaguacaaccugagccacacauaugcugucgaugccgcuaaucauugcggcaccauugccaacggggugcuccaaacauucaugcggauggcguggggaggcucuuacaucgcccuggacuccggguguggaagcugggauugcaucaugaccucuuaccaguaucuuauuauccagaauacgacaugggaagaccacugucaguuuucccgccccagcccuauuggcuaccuggggcuccugucccaaagaacccgggauaucuauauuucucgcagacuucugggaacauucaccuggacccucagcgacuccgagggcaacgaaacacccggcggguacugccugacgcgguggaugcugaucgaggcugagcucaaguguuuuggaaacaccgccguugcuaaaugcaaugaaaagcaugaugaggaguucugcgacaugcugcgccuuuuugauuucaacaaacaggccaucagacggcugaagacagaagcgcagaugagcauucagcucaucaauaaagccgugaacgcucugauuaaugaccaacuuaucaugaagaaccaucugcgcgacauuauguguaucccuuauugcaauuacucuaaguauugguaccucaaccacaccgucacaggcaaaaccucccugcccagauguuggcuggugagcaaugggucuuaccucaacgaaacgcacuucagcgaugacaucgagcagcaggccgauaauaugauuacagagcugcuucaaaaggaauauauggaccggcagggaaaaaccccucugggccucguggaucuguuugucuucuccaccucuuuuuaccugaucagcauuuuccuucaccucaucaagauuccgacacaucgccacaucaccgggaaacccugcccuaagccccauagacugaaccacaugggaauuuguuccugcggccuguauaaacacccuggcguucccgugaaguggaagcggugaggacuaguuauaagacugacuagcccgaugggccucccaacgggcccuccuccccuccuugcaccgagauuaaucaaaggcucuuuucagagccaccaaaaaaaaaaaaaaaaaaaaaaaaaaaaaaaaaaaaaaaaaaaaaaaaaaaaaaaaaaaaaaaaaaaaaaaaaaaaaaaaaaaaaaaaaaaaaaaaaaaaa

SEQ ID NO: 36376 - RNA, 1686 nt, Artificial Sequence
  mRNA product Design i-3 (hSL-A100) comprising derived and/or modified sequence from LASV(LASV253-NIG-2011;Clade II)__AIT17670__GPCmut9 (opt5)
aggagaaagcuuaccaugggccagaucauuaccuucuuucaagaggugccccacgucaucgaagagguuaugaacauugugcugaucgcccucagccugcuugcuauucugaaggggaucuacaauguggccacaugcggacucuucggccuggucuccuuucuucugcucugugggagaucuugcagcacgaccuauaaaggaguguacgaacugcagacacuggagcucgacauggcgucccugaacaugaccaugccucuuucuuguacaaagaauaacagccaucacuauaucaugguuggcaaugaaaccgggcuggagcucacacugaccaacacguccauuaucaaucauaaauucugcaaccuuucugaugcucacaagaaaaaucuguacgaccaugcccucaugagcauuaucuccaccuuucaccugagcauuccgaacuucaaucaguaugaggccaugucuugugauuuuaacggaggcaagaucuccgugcaguacaaucugagccacacauaugcugucgacgccgcuaaccauugcggcaccauugccaauggggugcuccaaacauucaugcggauggcguggggaggcucuuacaucgcccuggauuccggguguggaagcugggacugcaucaugaccucuuaccaguaucuuauuauccagaacacgacaugggaagaucacugucaguuuucccgccccagcccuauuggcuaccuggggcuccugucccaaagaacccgggacaucuauauuucucgcagacuucugggaacauucaccuggacccucagcgauuccgagggcaacgaaacacccggcggguacugccugacgcgguggaugcugaucgaggcugagcucaaguguuuuggaaauaccgccguugcuaaaugcaacgaaaagcaugacgaggaguucugcgauaugcugcgccuuuuugacuucaauaaacaggccaucagacggcugaaggcggaagcccagaugagcauucagcucaucaacaaagcugugaaugcccugauuaacgaucaacuuaucaugaagaaucaucugcgcgacauuauguguaucccuuauugcaacuacucuaaguauugguaccucaaucacacagucaccggcagaacaucccugccccgguguuggcuggugagcaacgggucuuaccucaaugaaacccacuucagcgacgauaucgagcagcaggcugacaacaugauuacggagcugcuucaaaaagaauauaucgaucgccagggaaagacaccucugggccucguggaccuguuugucuucuccaccucuuuuuaccugauuagcaucuuccuucaccucguuaaaauuccgacccauagacacaucauugggaagcccugcccuaaaccccaucggcugaaucacaugggaaucuguuccugcggccuguauaagcacccuggcgugcccgugaaauggaagcgcugaggacuaguuauaagacugacuagcccgaugggccucccaacgggcccuccuccccuccuugcaccgagauuaaucaaaggcucuuuucagagccaccaaaaaaaaaaaaaaaaaaaaaaaaaaaaaaaaaaaaaaaaaaaaaaaaaaaaaaaaaaaaaaaaaaaaaaaaaaaaaaaaaaaaaaaaaaaaaaaaaaaaa

SEQ ID NO: 36377 - RNA, 1686 nt, Artificial Sequence
  mRNA product Design i-3 (hSL-A100) comprising derived and/or modified sequence from LASV(LASV254-NIG-2011;Clade II)__AIT17674__GPCmut9 (opt5)
aggagaaagcuuaccaugggccagaucauuaccuucuuucaagaggugccccacgucaucgaagagguuaugaacauugugcugaucgcccucagccugcuugcuauucugaaggggaucuacaauguggccacaugcggacucuucggccuggucuccuuucuucugcucugugggagaucuugcagcacgaccuauaaaggaguguacgaacugcagacacuggagcucgacaugaccaaccugaauaugacaaugccucuuuccuguaccaagaacaauucucaucacuauaucaugguuggcaacgaaacagggcuggagcucacccugacgaauaccagcauuaucaaccauaaauucugcaaucuuuccgaugcgcacaagaaaaaccuguacaaucaugcucucaugucuauuaucagcacauuucaccuguccauuccgaacuucaaucaguaugaggccaugagcugugacuuuaacggaggcaagaucucugugcaguacaaucugucccacagcuaugccgucgaugcugccaaccauugcggcaccauugcuaacggggugcuccaaacauucaugcggauggccuggggaggcucuuacaucgcgcuggacuccggguguggaaauugggauugcaucaugaccagcuaccaguaucuuauuauccagaacacgacaugggaagaccacugucaguuuucucgccccuccccuauuggcuaccuggggcuccugagccaaagaacccgggauaucuauauuucccgcagacuucugggaacauucaccuggacccucucugacagcgagggcaaugaaacacccggcggguacugccugacgcgguggaugcugaucgaggccgagcucaaguguuuuggaaacaccgcuguugccaaaugcaaugaaaagcaugaugaggaguucugcgacaugcugcgccuuuuugauuucaacaaacaggcuaucagacggcugaagacagaagcccaggcgaauauucagcucaucaacaaagccgugaaugcucugauuaacgaccaacuuaucaugaagaaucaucugcgcgauauuauguguaucccuuauugcaacuacuccaaguauugguaccucaaucacaccgucacaggcaaaaccagccugcccagauguuggcuggugucuaacggguccuaccucaaugaaacgcacuucagcgacgacaucgagcagcaggccgauaacaugauuacagagcugcuucaaaaggaauauauggaccggcagggaaaaaccccucugggccucguggaucuguuugucuucucuaccagcuuuuaccugaucuccauuuuccuucaccucguuaagaucccgacacaucgccacgugauugggaaacccugcccuaagccccauagacugaaccacaugggaaucuguucuugcggccuguauaaacacccuggcgugcccgucaaguggaagcggugaggacuaguuauaagacugacuagcccgaugggccucccaacgggcccuccuccccuccuugcaccgagauuaaucaaaggcucuuuucagagccaccaaaaaaaaaaaaaaaaaaaaaaaaaaaaaaaaaaaaaaaaaaaaaaaaaaaaaaaaaaaaaaaaaaaaaaaaaaaaaaaaaaaaaaaaaaaaaaaaaaaaa

SEQ ID NO: 36378 - RNA, 1686 nt, Artificial Sequence
  mRNA product Design i-3 (hSL-A100) comprising derived and/or modified sequence from LASV(Nig08-A19;Clade III)__ADU56618__GPCmut9 (opt5)
aggagaaagcuuaccaugggccagaucgugaccuucuuucaagaggucccccacguuauugaagaggugaugaacaucgugcugauugcccucagcauccuggcuauucuuaaggggcuguacaauaucgccacaugcggacucaucggccuggucacguuccuucugcucuccgggagaucuuguagcaugaccuauaaaggaguguacgaacugcagacacuggagcucaacaugaauacccugaacaugacaaugccucuuuccugcaccaagaauaacucucaucacuauauuaugguuggcaaugaaacagggcuggagcucacccugacgaacaccagccuucugcaucacaaauuuuguaaucucuccgacgcgcauaagaaaaaccuguacgaucacacacugaugucuaucauuagcaccuuccaccucuccaucccgaauuuuaaccaguaugaggcuaugagcugcgacuucaauggaggcaagauuacagugcaguacaaccugucucauuccuaugccaucgaugccgcuaaucacuguggcaccgucgccaacggggugcuucaaacguuuaugcggauggcuuggggaggcagcuacauugcccuggacucugggugcggaaagugggauuguaucaugacauccuaccaguaucucaucauucagaacaccacaugggaagaccauugccaguucagccgccccucuccuaucggcuaccuggggcuucugucccaaagaacccgggauauuuauaucagccgcagacuccugggaaccuuuacauggacgcuguccgacucugagggcaaugaaacccccggcggguacugucucacacgguggaugcugauugaggcggagcuuaaaugcuucggaaacaccgccguugcuaaguguaaugaaaaacacgaugaggaauuuugcgacaugcugcgccucuucgauuuuaacaagcaggccaucagacggcugaaagcugaggcccagaugagcauccagcuuauuaauaaggcggugaacgcccugaucaaugaccaacucauuaugaagaaccaucugcgcgauaucaugugcauuccuuauuguaauuacuccaaauauugguaccugaaccacacaagcaccggcagaacgucucucccccggugcuggcuggucuccaaugggagcuaccuuaacgaaacacacuucucugacgacaucgagcagcaggcugauaauaugaucaccgagaugcugcaaaaggaauaucucgaccgccagggaaaaaccccucugggccugguggaucuuuucguguuuagcacauccuucuaccucauuucuaucuuucugcaucuggucaagauuccgacccacagacauaucguugggaaacccuguccuaagccccaccggcucaaccacaugggaauuugcagcuguggccuguauaaacagccuggcgugcccgugcgcuggaagagaugaggacuaguuauaagacugacuagcccgaugggccucccaacgggcccuccuccccuccuugcaccgagauuaaucaaaggcucuuuucagagccaccaaaaaaaaaaaaaaaaaaaaaaaaaaaaaaaaaaaaaaaaaaaaaaaaaaaaaaaaaaaaaaaaaaaaaaaaaaaaaaaaaaaaaaaaaaaaaaaaaaaaa

SEQ ID NO: 36379 - RNA, 1689 nt, Artificial Sequence
  mRNA product Design i-3 (hSL-A100) comprising derived and/or modified sequence from LASV(G1180-SLE-2010;Clade IV)__AIT17168__GPCmut9 (opt5)
aggagaaagcuuaccaugggccagaucgugaccuucuuucaagaggucccccacguuauugaagaggugaugaacaucgugcugauugcccucagcauccuggcuguccuuaaggggcuguacaauuucgccacaugcggacucgugggccugcuuacguuucugcuccugugugggagauccugcaccgcgucucgguauaaaggaguuuacgaacugcagacacucgagcugaacauggaaacccuuaauaugacaaugccucugagcuguaccaagaacaauucccaucacuauauuauggugggcaacgagacagggcucgagcugacccuuacgaauaccucuaucaucaaccauaaauucugcaaucugagcgacgcucacaagaaaaaccucuacgaucaugcccugauguccauuaucucuacauuucaccugagcauuccgaauuucaaccaguaugaagccauguccugugacuuuaauggaggcaagaucagcguccaguacaaccucucucacuccuaugcuggcgaugccgcuaaucauugcgggaccguggccaacggaguucugcaaacauucaugcgcauggcguggggcgggagcuacauugcccuugacucuggauguggcuccugggauugcaucaugaccagcuaccaguaucugauuauccagaacacgacaugggaggaccacugucaguuuucuagacccuccccuaucggguaccucggacugcuuagccaacggacccgcgauauuuauaucuccagacggcugcucggcacauucaccuggacccugucugacagcgaaggcaaggauacacccgggggauacugccugacgcgcuggaugcucauugaggcugagcugaaauguuuuggcaauaccgccguggcuaagugcaacgaaaaacaugacgaggaguucugcgauaugcuuagacuguuugacuucaauaagcaggccauccagcggcucaaagcggaagcccagauguccauucaacugaucaacaaggcugucaaugcccuuaucaacgaucagcugauuaugaagaaucaccuccgcgacaucauguguauuccuuauugcaacuacagcaaauauugguaccugaaucacacaaccacagggaagaccucucugcccaaauguuggcucguguccaacggaagcuaccugaaugaaacgcauuucucugacgauaucgagcagcaagcugacaacaugauuacagagaugcuucagaaggaauauauggagagacagggcaaaaccccucuggggcucguggaucuguuugucuucagcaccuccuuuuaccugaucucuaucuuccuucaccucguuaagauuccgacacaucggcacaucgugggaaaaagcugccccaagccucaucgccugaaucacaugggcauuuguuccugcggccuguauaagcagcccggggugccugucaaauggaagagaugaggacuaguuauaagacugacuagcccgaugggccucccaacgggcccuccuccccuccuugcaccgagauuaaucaaaggcucuuuucagagccaccaaaaaaaaaaaaaaaaaaaaaaaaaaaaaaaaaaaaaaaaaaaaaaaaaaaaaaaaaaaaaaaaaaaaaaaaaaaaaaaaaaaaaaaaaaaaaaaaaaaaa

SEQ ID NO: 36380 - RNA, 1689 nt, Artificial Sequence
  mRNA product Design i-3 (hSL-A100) comprising derived and/or modified sequence from LASV(G1442-SLE-2011;Clade IV)__AIT17180__GPCmut9 (opt5)
aggagaaagcuuaccaugggccagaucgugaccuucuuucaagaggucccccacguuauugaagaggugaugaacaucgugcugauugcccucagcauccuggcuguccuuaaggggcuguacaauguggccacaugcggacucauuggccugguuacguuccuucugcucugugggagauccugcaccacaacccuguauaaaggaguguacgaacugcagacacucgagcugaacauggaaacccuuaauaugacaaugccucugucuuguaccaagaacaauagccaucacuauauccgggucggcaacgagacggggcucgagcugacccuuacaaauaccuccaucauuaaccauaaauuuugcaaucugucugacgcgcacaagaaaaaccucuacgaucaugcucugaugagcaucauuuccacauuccaccugucuaucccgaauuuuaaccaguaugaagccaugagcugugacuucaauggaggcaagauuuccgugcaguacaaccucagccacucuuaugccggcgaugcugccaaucauugcgggaccguugcuaacggagugcugcaaacguuuaugcgcauggccuggggcggguccuacaucgcgcuugacagcggauguggcaacugggauugcauuaugacaucuuaccaguaucugaucauccagaauaccacaugggacgaucacugucaguucuccagacccagcccuauuggguaccucggacugcuuucucaacggacccgcgacgucuauaucuccagacggcugcucggcaccuuuacauggacgcugagcgauuccgagggcaaggacacccccgggggauacugccugacacgcuggaugcucauugaagccgagcugaaauguuucggcaacaccgcuguggccaagugcaaugagaaacaugaugaagaguuuugcgacaugcuuagacuguucgauuuuaacaagcaggcuauccagcggcucaaagccgaagcgcagaugucuauucaacugaucaauaaggccgugaacgcucuuaucaaugaccagcugauuaugaagaaccaccuccgcgacaucauguguauuccuuauugcaauuacagcaaauauugguaccugaacaauacagccaccgggaagacgucccugcccaaauguuggcucaucagcaacggaucuuaccugaaugagacacacuucuccgaugacauugaacaggaggcugauaacaugaucaccgagaugcuucaaaaggaauauauggagagacagggcaaaaccccucuggggcucgucgaccuguucguuuuuagcacaucuuucuaccugaucagcauuuuucuucaucucgugaagaucccgacccaccggcauauugugggaaaauccugccccaagccucaccgccugaaucauaugggcaucuguucuugcggccuguauaagcagcccggggucccugugagauggaaacggugaggacuaguuauaagacugacuagcccgaugggccucccaacgggcccuccuccccuccuugcaccgagauuaaucaaaggcucuuuucagagccaccaaaaaaaaaaaaaaaaaaaaaaaaaaaaaaaaaaaaaaaaaaaaaaaaaaaaaaaaaaaaaaaaaaaaaaaaaaaaaaaaaaaaaaaaaaaaaaaaaaaaa

SEQ ID NO: 36381 - RNA, 1689 nt, Artificial Sequence
  mRNA product Design i-3 (hSL-A100) comprising derived and/or modified sequence from LASV(G3010-SLE-2013;Clade IV)__AIT17344__GPCmut9 (opt5)
aggagaaagcuuaccaugggccagaucgugaccuucuuucaagaggucccccacguuauugaagaggugaugaacaucgugcugauugcccucagcauccuggcuguccuuaaggggcuguacaauuucgccacaugcggacucgugggccugguuacguuucuucugcucugugggagauccugcaccacaucucuguauaaaggaguguacgaacugcagacccucgagcugaacauggaaacacuuaauaugaccaugccucugagcuguacaaagaacaauucccaucacuauauuauggucggcaacgagaccgggcucgagcugacgcuuaccaauacaucuaucaucaaccauaaauucugcaaucugagcgacgcgcacaagaaaaaccucuacaaucaugcucugauguccauuaucucuaccuuucaccugagcauuccgaacuucaaucaguaugaagccauguccugugauuuuaacggaggcaagaucagcgugcaguacaaucucucucacuccuaugccggcgacgcugccagccauugcgggacaguugcuaacggagugcugcaaaccuucaugcggauggccuggggcgggucuuacauugcgcuugauuccggauguggcaagugggacugcaucaugacgagcuaccaguaucugauuauccagaacacaaccugggaggaucacugucaguuuucucgccccuccccuaucggguaccucggacugcuuagccaaagaacacgggacauuuauaucucccgcagacugcucggcaccuucaccuggacacugucugauagcgaaggcaaagacacgcccgggggauacugccugacccgguggaugcucauugaggccgagcugaaguguuuuggcaauacagcugucgccaaaugcaacgaaaagcaugaugaggaguucugcgacaugcuucgccuguuugauuucaauaaacaggcuauccagagacucaagaccgaagcccagauguccauucaacugaucaacaaggcggugaaugcccuuaucaacgaccagcugauuaugaaaaaucaccuccgggauaucauguguauuccuuauugcaacuacagcaaguauugguaccugaaucacacaaccacggggaaaacaucucugcccaaguguuggcucguguccaacggaagcuaccugaaugaaacccauuucucugacgacaucgagcagcaagcugauaacaugauuaccgagaugcuucagaaagaauauauggagcgccagggcaagacaccucuggggcucgucgaccuguuuguuuucagcaccuccuuuuaccugaucucuaucuuccuucaccucgugaaaauuccgacacauagacacaucgugggaaagagcugccccaagccucaucggcugaaucacaugggcauuuguuccugcggccuguauaaacagcccggggucccugugcgcuggaagagaugaggacuaguuauaagacugacuagcccgaugggccucccaacgggcccuccuccccuccuugcaccgagauuaaucaaaggcucuuuucagagccaccaaaaaaaaaaaaaaaaaaaaaaaaaaaaaaaaaaaaaaaaaaaaaaaaaaaaaaaaaaaaaaaaaaaaaaaaaaaaaaaaaaaaaaaaaaaaaaaaaaaaa

SEQ ID NO: 36382 - RNA, 1689 nt, Artificial Sequence
  mRNA product Design i-3 (hSL-A100) comprising derived and/or modified sequence from LASV(G502-SLE-2009;Clade IV)__AIT17126__GPCmut9 (opt5)
aggagaaagcuuaccaugggccagaucgugaccuucuuucaagaggucccccacguuauugaagaggugaugaacaucgugcugauugcccucagcauccuggcuguccuuaaggggcuguacaauuucgccacaugcggacucgugggccugcuuacguuucugcuccugugugggagauccugcaccacaggacuguauaaaggcguuuacgaacuccagacccuggagcuuaacauggaaacacugaauaugaccaugccucucucuuguacaaagaacaauagccaucacuauauuaugguggggaacgagaccggacuggagcuuacgcugaccaauacauccaucaucaaccauaaauucugcaaucucucugacgcgcacaagaaaaaccuguacgaucaugcucugaugagcauuaucuccaccuuucaccucucuauuccgaauuucaaccaguaugaagccaugagcugugacuuuaauggcggcaagaucuccguccaguacaaccugagccacucuuaugccggggaugcugccgaccauugcggaacaguggcuaauggcguucuucaaaccuucaugcggauggccuggggaggguccuacauugcgcuggauagcggcugugggcgcugggacugcaucaugacgucuuaccaguaucucauuauccagaacacaaccugggaggaucacugucaguuuuccagacccagcccuaucggauaccugggccuucugucucaacggacacgcgacauuuauaucuccagacggcuccugggcaccuucaccuggacacugagcgauuccgaagggaaggacacgcccggaggcuacugccucacccgcuggaugcugauugaggccgagcuuaaauguuuugggaacacagcuguggccaagugcaaugaaaaacaugaugaggaguucugcgacaugcugagacucuuugauuucaacaagcaggcuauccagcggcugaaagccgaagcgcagaugucuauucaacuuaucaauaaggccgucaacgcucugaucaaugaccagcucgugaugaagaaccaucugcgcgacauuauguguaucccuuauugcaauuacagcagauauugguaccugaaccacaccacaaccggacggacgucccuccccaaauguuggcuggugagcaauggcucuuaccuuaacgaaacacacuucuccgaugacauugagcagcaagccgauaauaugaucaccgagaugcugcagaaggaauauauggagcgccaggggaaaaccccucucggacuggucgaccuguuuguuuucagcacaucuuuuuaccuuauuagcaucuuccuccaccuggugaagaucccgacccauagacacauugugggcaaauccugccccaagccucaucggcugaaccacaugggcaucuguucuugcgggcucuauaaacagcccggagucccugugaaguggaagcgcugaggacuaguuauaagacugacuagcccgaugggccucccaacgggcccuccuccccuccuugcaccgagauuaaucaaaggcucuuuucagagccaccaaaaaaaaaaaaaaaaaaaaaaaaaaaaaaaaaaaaaaaaaaaaaaaaaaaaaaaaaaaaaaaaaaaaaaaaaaaaaaaaaaaaaaaaaaaaaaaaaaaaa

SEQ ID NO: 36383 - RNA, 1689 nt, Artificial Sequence
  mRNA product Design i-3 (hSL-A100) comprising derived and/or modified sequence from LASV(G733-SLE-2010;Clade IV)__AIT17154__GPCmut9 (opt5)
aggagaaagcuuaccaugggccagaucgugaccuucuuucaagaggucccccacguuauugaagaggugaugaacaucgugcugauugcccucagcauccuggcuguccuuaaggggcuguacaauuucgccacaugcggaauugugggccucguuuccuuucugcuucugugugggagaucuugcacgaccagccucuauaaaggaguguacgaacugcagacacuggagcucaacauggaaacccugaauaugacaaugccucuuuccuguaccaagaacaauucucaucacuauaucauggucggcaacgagacagggcuggagcucacccugacgaauaccagcaucauuaaccauaaauucugcaaucuuuccgacgcgcacaagaaaaaccuguacgaucaugcucucaugucuaucauuagcacauuucaccuguccaucccgaauuucaaccaguaugaagccaugagcugugacuuuaauggaggcaagauuucugugcaguacaaccugucccacagcuaugccggcgaugcugccaaucauugcgggaccaucgcuaacggaguucuccaaacauucaugcggauggccuggggcgggucuuacauugcgcuggacuccggaugugaucgcugggacugcaucaugaccagcuaccaguaucuuaucauucagaacacgacaugggaggaucacugucaguuuucuagacccuccccuaucggcuaccuggggcuccugagccaacggacccgcgacauuuauaucuccagacggcuucugggaacauucaccuggacccucucugauagcgaaggcaaggacacacccggcggguacugccugacgcgcuggaugcugauugaggccgagcucaaauguuuuggaaauaccgcuguggccaagugcaacgaaaaacaugaugaggaguucugcgacaugcugagacuuuuugauuucaauaagcaggcuauccagcggcugaaagccgaagcgcagauguccauccaacucauuaacaaggccgucaaugcucugaucaacgaccagcuuauuaugaagaaucaucugcgcgacaucauguguauuccuuauugcaacuacagcaaauauugguaccucaaucacacaaccacaggcaagaccucucugcccaaauguuggcugguguccaacgggagcuaccucaaugaaacgcacuucucugaugacaucgagcagcaagccgauaacaugaucacagagaugcugcagaaggaauauauggagagacagggaaaaaccccucuuggccugguggaccucuuugucuucagcaccuccuuuuaccugauuucuaucuuccugcaccuuguuaagauuccgacacaucggcacgugguggggaaaagcugccccaagccucaucgccucaaucacaugggaaucuguuccugcggccuguauggccagcccggggucccugugaaguggaaaagaugaggacuaguuauaagacugacuagcccgaugggccucccaacgggcccuccuccccuccuugcaccgagauuaaucaaaggcucuuuucagagccaccaaaaaaaaaaaaaaaaaaaaaaaaaaaaaaaaaaaaaaaaaaaaaaaaaaaaaaaaaaaaaaaaaaaaaaaaaaaaaaaaaaaaaaaaaaaaaaaaaaaaa

SEQ ID NO: 36384 - RNA, 1689 nt, Artificial Sequence
  mRNA product Design i-3 (hSL-A100) comprising derived and/or modified sequence from MOPV/LASV reassortant(IGS-1;Clade IV)__AFY05576__GPCmut9 (opt5)
aggagaaagcuuaccaugggccagaucgugaccuucuuucaagaggucccccacguuauugaagaggugaugaacaucgugcugauugcccucagcguccuggcugugcuuaaggggcuguacaauuucgccacaugcggacucguuggccuggugacguuucuucugcucugugggagauccugcaccacaucucuguauaaaggagucuacgaacugcagacccucgagcugaacauggaaacacuuaauaugaccaugccucugagcuguacaaagaacaauucccaucacuauaucauggugggcaacgagaccgggcucgagcugacgcuuaccaauacaucuauuaucaaccauaaauucugcaaucugagcgacgcgcacaagaaaaaccucuacgaucaugcucugauguccaucauuucuaccuuucaccugagcaucccgaauuucaaccaguaugaagccauguccugugacuuuaauggaggcaagauuagcguucaguacaaccucucucacuccuaugccggcgaugcugccaaucauugcgggacaguggcuaacggaguccugcaaaccuucaugcggauggccuggggcgggagcuacaucgcgcuugacucuggauguggcaacugggauugcauuaugacguccuaccaguaucugaucauucagaauacaaccugggaggaccacugucaguuuagccgccccucuccuaucggguaccucggacugcuuucccaaagaacacgggauaucuauauuagccgcagacugcucggcaccuucaccuggacacuguccgacucugaaggcgaggauacgcccgggggauacugccugacccgguggaugcucaucgaggccgaacugaaguguuuuggcaacacagcuguggccaaaugcaaugagaagcaugacgaagaguucugcgauaugcuucgccuguuugacuucaacaaacaggcuauucagagacucaaggccgaagcgcagaugagcauccaacugauuaauaaagccgugaacgcucuuaucaaugaucagcugaucaugaagaaccaccuccgggacauuauguguaucccuuauugcaauuacuccaaguauugguaccugaaccacaccacaaccgggcgcacgagccugcccaaauguuggcucgucucuaauggauccuaccugaacgagacacauuucagcgacgauauugagcagcaagccgacaauaugaucaccgaaaugcuucagaaggaguauauggaaagacagggcaaaaccccucuggggcucguugaucuguuuguguucucuaccagcuuuuaccugauuuccaucuuccuucaccucgugaagaucccgacacaucggcacauugucggaaaaucuugccccaagccucaucgccugaaccacaugggcaucuguagcugcggccuguauaaacagcccggggugccuguuaaguggaagagaugaggacuaguuauaagacugacuagcccgaugggccucccaacgggcccuccuccccuccuugcaccgagauuaaucaaaggcucuuuucagagccaccaaaaaaaaaaaaaaaaaaaaaaaaaaaaaaaaaaaaaaaaaaaaaaaaaaaaaaaaaaaaaaaaaaaaaaaaaaaaaaaaaaaaaaaaaaaaaaaaaaaaa

SEQ ID NO: 36385 - RNA, 1689 nt, Artificial Sequence
  mRNA product Design i-3 (hSL-A100) comprising derived and/or modified sequence from LASV(LM765-SLE-2012;Clade IV)__AIT17814__GPCmut9 (opt5)
aggagaaagcuuaccaugggccagaucgugaccuucuuucaagaggucccccacguuauugaagaggugaugaacaucgugcugauugcccucagcauccuggcuguccuuaaggggcuguacaauuucgccacaugcggacucgugggccugguuacguuucuucugcucugugggagauccugcaccacaucucuguauaaaggaguguacgaacugcagacccucgagcugaacauggaaacacuuaauaugaccaugccucugagcuguacaaagaacaauucccaucacuauauuauggucggcaacgagaccgggcucgagcugacgcuuaccaauacaucuaucaucgaccauaaauucugcaaccugagcgaugcgcaccggaagaaucucuacgaccaugcucugauguccauuaucucuaccuuucaccugagcauuccgaacuucaaucaguaugaagccauguccugugauuuuaacggaggcaaaaucagcgugcaguacaaucucucucacuccuaugccaaggacgcugccgaucauugcggcacaguugcuaacggggugcugcaaaccuucaugcgcauggccuggggaggcagcuacauugcgcuugacucuggguguggaagaugggauugcaucaugacguccuaccaguaucugauuauccagaauacaaccugggaggaccacugucaguuuagccggcccucuccuaucggcuaccucgggcugcuuucccaacgcacaagagauauuuauaucagccggcgccugcucggaaccuucaccuggacacuguccgacucugaaggcaaggauacgcccggcggguacugccugaccagauggaugcucauugaggccgagcugaaauguuuuggaaacacagcugucgccaagugcaacgaaaaacaugacgaggaguucugcgauaugcuucggcuguuugacuucaauaagcaggcuauccagcgccucaaagccgaagcgcagaugagcauucaacugaucaacaaggccgugaaugcucuuaucaacgaccagcugauuaugaagaaucaccucagagauaucauguguauuccuuauugcaacuacuccaaauauugguaccugaaucacaccacaaccggcaagacgagccugcccaaauguuggcucgugucuaacggguccuaccugaaugaaacacauuucagcgacgauaucgagcagcaagccgacaacaugauuaccgagaugcuucagaaggaauauauggagcggcagggaaaaaccccucugggccucgucgaucuguuuguuuucucuaccagcuuuuaccugaucuccaucuuccuucaccucgugaagauuccgacacaucgccacaucguggggaaacccugcccuaagccccauagacugaaucacaugggaauuuguucuugcggccuguauaagcagccuggcguccccgugaaauggaagcggugaggacuaguuauaagacugacuagcccgaugggccucccaacgggcccuccuccccuccuugcaccgagauuaaucaaaggcucuuuucagagccaccaaaaaaaaaaaaaaaaaaaaaaaaaaaaaaaaaaaaaaaaaaaaaaaaaaaaaaaaaaaaaaaaaaaaaaaaaaaaaaaaaaaaaaaaaaaaaaaaaaaaa

SEQ ID NO: 36386 - RNA, 1689 nt, Artificial Sequence
  mRNA product Design i-3 (hSL-A100) comprising derived and/or modified sequence from LASV(LM776-SLE-2012;Clade IV)__AIT17824__GPCmut9 (opt5)
aggagaaagcuuaccaugggccagaucgugaccuucuuucaagaggucccccacguuauugaagaggugaugaacaucgugcugauugcccucagcauccuggcuguccuuaaggggcuguacaauuucgccacaugcggacucgugggccugguuacguuucuucugcucugugggagauccugcaccacaucuguguauaaaggagucuacgaacugcagacccuggagcucaacauggaaacacugaauaugaccaugccucuuagcuguacaaagaacaauucccaucacuauauuauggugggcaacgagaccgggcuggagcucacgcugaccaauacaucuaucaucaaccauaaauucugcaaucuuagcgacgcgcacaagaaaaaccuguacgaucaugcucucauguccauuaucucuaccuuucaccugagcauuccgaauuucaaccaguaugaagccauguccugugacuuuaauggaggcaagaucagcguucaguacaaccugucucacuccuaugccggcgaugcugccaaucauugcgggacaguggcuaacggaguccuccaaaccuucaugcggauggccuggggcgggagcuacauugcgcuggacucuggauguggcaagugggauugcaucaugacguccuaccaguaucuuauuauccagaacacaaccugggaggaccacugucaguuuagccgccccucuccuaucggguaccugggacuccugucccaaagaacacgggauauuuauaucagccgcagacuucugggcaccuucaccuggacacucuccgacucugaaggcaaagauacgcccgggggauacugccugacccgguggaugcugauugaggccgagcucaaguguuuuggcaauacagcuguggccaaaugcaacgaaaagcaugacgaggaguucugcgauaugcugcgccuuuuugacuucaauaaacaggcuauccagagacugaaggccgaagcgcagaugagcauucaacucaucaacaaggccgugaaugcucugaucaacgaucagcuuauuaugaaaaaucaucugcgggacaucauguguauuccuuauugcaacuacuccaaguauugguaccucaaucacaccacaaccgggaaaacgagccugcccaaguguuggcuggucucuaacggauccuaccucaaugaaacacacuucagcgacgauaucgagcagcaagccgacaacaugauuaccgagaugcugcagaaagaauauauggagcgccagggcaagaccccucuugggcugguugaucucuuuguguucucuaccagcuuuuaccugaucuccaucuuccugcaccuugugaaaauuccgacacauagacacaucgucggaaagucuugccccaagccucaucggcucaaucacaugggcauuuguagcugcggccuguauaaacagcccggggugccuguucgcuggaagagaugaggacuaguuauaagacugacuagcccgaugggccucccaacgggcccuccuccccuccuugcaccgagauuaaucaaaggcucuuuucagagccaccaaaaaaaaaaaaaaaaaaaaaaaaaaaaaaaaaaaaaaaaaaaaaaaaaaaaaaaaaaaaaaaaaaaaaaaaaaaaaaaaaaaaaaaaaaaaaaaaaaaaa

SEQ ID NO: 36387 - RNA, 1689 nt, Artificial Sequence
  mRNA product Design i-3 (hSL-A100) comprising derived and/or modified sequence from LASV(Mad39;Clade IV)__ANH09722__GPCmut9 (opt5)
aggagaaagcuuaccaugggccagaucgugaccuucuuucaagaggucccccacguuauugaagaggugaugaacaucgugcugauugcccucagcauccuggcuguccuuaaggggcuguacaauguggccacaugcggacucauuggccugguuacguuccuucugcucugugggagauccugcaccacaacccuguauaaaggaguguacgaacugcaggcgcucgagcugaacauggaaacacuuaauaugaccaugccucugucuuguacaaagaacaauagccaucacuauauccgggucggcaacgagaccgggcucgagcugacgcuuaccaauacaucccugaucaaccauaaauuuugcaaucucucugacgcucacaagaaaaaccuguacgaucaugcccugaugagcauuaucuccaccuuccaccucucuauuccgaauuuuaaccaguaugaagccaugagcugugacuucaaugauggaaagaucuccgugcaguacaaccugagccacacauaugcuggcgacaccgccaaucauugcggcacgguugcuaacggggugcuucaaacauuuaugcgcauggccuggggaggcucuuacauugcgcuggauuccggguguggaggcugggacugcaucaugaccagcuaccaguaucucauuauccagaacacaaccugggaggaucacugucaguucucuagacccuccccuaucggguaccugggacuucugagccaacggacccgcgacauuuauaucucuagacggcuccugggcacauuuacguggacccuguccgauagcgaaggcaaggacacacccgggggauacugccucacccgcuggaugcugauugaggccgagcuuaaauguuucggcaauacagcugucgccaagugcaacgaaaaacaugaugaggaauuuugcgacaugcugagacucuucgauuuuaauaagcaggcuauccagcggcugaaagccgaggcgcagauguccauucaacuuaucaacaaggccgugaaugcucugaucaacgaccagcucauuaugaagaaucaucugcgcgacaucauguguauuccuuauugcaacuacucuaaauauugguaccugaaucacaccgugacggggaagacaagccuccccaaauguuggcuggucuccaacggaagcuaccuuaaugaaacccacuucucugaugacaucgagcagcaagccgauaacaugauuaccgagaugcugcagaaggaauauauggagagacagggcaaaacaccucucgggcugguugaccuguucguguuuuccaccagcuucuaccuuaucucuaucuuucuccaccuggugaagauuccgacacaucggcacgucgugggaaaacccugcccuaagccccaucgccugaaucacaugggcaucuguagcugcggcuucuauaagcagccugggguucccgugagauggaaacggugaggacuaguuauaagacugacuagcccgaugggccucccaacgggcccuccuccccuccuugcaccgagauuaaucaaaggcucuuuucagagccaccaaaaaaaaaaaaaaaaaaaaaaaaaaaaaaaaaaaaaaaaaaaaaaaaaaaaaaaaaaaaaaaaaaaaaaaaaaaaaaaaaaaaaaaaaaaaaaaaaaaaa

SEQ ID NO: 36388 - RNA, 1689 nt, Artificial Sequence
  mRNA product Design i-3 (hSL-A100) comprising derived and/or modified sequence from LASV(Z0947-SLE-2011;Clade IV)__AIT17840__GPCmut9 (opt5)
aggagaaagcuuaccaugggccagaucgugaccuucuuucaagaggucccccacguuauugaagaggugaugaacaucgugcugauugcccucagcauccuggcuguccuuaaggggcuguacaauuucgccacaugcggacucgugggccugguuacguuucuucugcucugugggagauccugcaccauuucucuguauaaaggaguguacgaacugcagacacucgagcugaacauggaaacccuuaauaugacaaugccucugagcuguaccaagaacaauucccaucacuauaucauggucggcaacgagacagggcucgagcugacccuuacgaauaccucuaucauuaaccauaaauucugcaaucugagcgacgcgcacaagaaaaaccucuacgaucaugcucugauguccaucauuucuacauuucaccugagcaucccgaauuucaaccaguaugaagccauguccugugacuuuaauggaggcaagauuagcgugcaguacaaccucucucacuccuaugccggcgaugcugccaaucauugcgggaccguugcuaacggagugcugcaaacauucaugcggauggccuggggcgggagcuacaucgcgcuugacucuggaugugaucgcugggacugcauuaugaccuccuaccaguaucugaucauccagaacacgacaugggaggaucacugucaguuuagcagacccucuccuauuggcuaccucgggcugcuuucccaacggacccgcgacaucuauauuagcagacggcugcucggaacauucaccuggacccuguccgauucugaaggcaaggacacacccggcggguacugccugacgcgcuggaugcucaucgaggccgagcugaaauguuuuggaaauaccgcugucgccaagugcaacgaaaaacaugaugaggaguucugcgacaugcuuagacuguuugauuucaauaagcaggcuauucagcggcucaaagccgaagcgcagaugagcauccaacugaucaacaaggccgugaaugcucuuauuaacgaccagcugaucaugaagaaucaccuccgcgacauuauguguaucccuuauugcaacuacuccaaauauugguaccugaaucacacaaccacaggcaagaccagccugcccaaauguuggcucgugucuaacggguccuaccugaaugaaacgcauuucagcgaugacauugagcagcaagccgauaacaugaucacagagaugcuucagaaggaauauauggagagacagggaaaaaccccucugggccucgucgaccuguuuguuuucucuaccagcuuuuaccugaucuccauuuuccuucaccucgugaagaucccgacacaucggcacauuguggggaaacccugcccuaagccccaucgccugaaucacaugggaaucuguucuugcggccuguauaagcagccuggcguccccgugaaauggaagagaugaggacuaguuauaagacugacuagcccgaugggccucccaacgggcccuccuccccuccuugcaccgagauuaaucaaaggcucuuuucagagccaccaaaaaaaaaaaaaaaaaaaaaaaaaaaaaaaaaaaaaaaaaaaaaaaaaaaaaaaaaaaaaaaaaaaaaaaaaaaaaaaaaaaaaaaaaaaaaaaaaaaaa

SEQ ID NO: 36389 - RNA, 1665 nt, Artificial Sequence
  mRNA product Design i-3 (A100) comprising derived and/or modified sequence from LASV(Josiah;Clade IV)__NP_694870__GPCmut9 (opt1)
aggagaaagcuuaccaugggccagaucgugaccuucuuccaggaggucccccacgugaucgaggaggugaugaacaucguccugaucgcccucagcgugcuggccgugcugaaggggcucuacaacuucgcgaccugcggccuggucgggcuggugacguuccuccugcugugcggccgcuccugcaccaccagccucuacaaggggguguacgagcugcagacccuggagcucaacauggagacgcugaacaugaccaugccgcuguccugcaccaagaacaacagccaccacuacaucauggucggcaacgagaccggccucgagcugacgcugaccaacaccuccaucaucaaccacaaguucugcaaccucagcgacgcccacaagaagaaccuguacgaccacgcccugauguccaucaucagcaccuuccaccucuccauccccaacuucaaccaguacgaggccaugagcugcgacuucaacgggggcaagaucuccgugcaguacaaccugagccacuccuacgccggggacgcggccaaccacugcggcacgguggccaacgggguccugcagaccuucaugcggauggccuggggcggcagcuacaucgcgcucgacuccgggugcggcaacugggacugcaucaugaccagcuaccaguaccugaucauccagaacaccacgugggaggaccacugccaguucucccggcccagccccaucggguaccugggccuccugucccagcgcacccgggacaucuacaucagccgccggcugcucggcaccuucaccuggacgcugagcgacuccgaggggaaggacaccccgggcggguacugccugacccgcuggaugcucaucgaggccgagcugaagugcuucggcaacaccgccguggccaagugcaacgagaagcacgacgaggaguucugcgacaugcugcggcuguucgacuucaacaagcaggccauccagcgccugaaggcggaggcccagaugagcauccagcugaucaacaaggccgugaacgcccucaucaacgaccagcugaucaugaagaaccaccuccgggacaucaugugcauccccuacugcaacuacuccaaguacugguaccucaaccacacgaccaccggccgcaccagccugcccaagugcuggcuggucuccaacggcagcuaccucaacgagacgcacuucuccgacgacaucgagcagcaggccgacaacaugaucaccgagaugcugcagaaggaguacauggagcggcaggggaagacgccccugggccucguggaccuguucguguucagcaccuccuucuaccugaucagcaucuuccugcaccucgucaagaucccgacccaccgccacaucguggggaaguccugccccaagccccaccggcugaaccacaugggcaucugcagcugcgggcuguacaagcagcccggcgugccggucaaguggaagcgcugaggacuaguuauaagacugacuagcccgaugggccucccaacgggcccuccuccccuccuugcaccgagauuaauaaaaaaaaaaaaaaaaaaaaaaaaaaaaaaaaaaaaaaaaaaaaaaaaaaaaaaaaaaaaaaaaaaaaaaaaaaaaaaaaaaaaaaaaaaaaaaaaaaaa

SEQ ID NO: 36390 - RNA, 1662 nt, Artificial Sequence
  mRNA product Design i-3 (A100) comprising derived and/or modified sequence from LASV(LP;Clade I)__AAF86701__GPCmut9 (opt1)
aggagaaagcuuaccaugggccagaucaucaccuucuuccaggaggugccccacgucaucgaggaggugaugaacaucgugcugaucgcccucagccugcuggccauccucaaggggcuguacaacaucgcgaccugcggcaucaucgggcuggucgccuuccucuuccugugcggcaaguccugcagccugacgcucaagggcggguacgagcugcagacccuggagcucaacauggagacccugaacaugaccaugccgcuguccugcacgaagaacagcucccaccacuacauccgcgugggcaacgagaccgggcucgagcugacccugaccaacacgagcaucaucaaccacaaguucugcaaccucuccgacgcccacaagaagaaccuguacgaccacgcccugaugagcaucaucuccaccuuccaccucagcauccccaacuucaaccaguacgaggccauguccugcgacuucaacggcgggaagaucagcgugcaguacaaccugucccacagcuacgcgggcgacgccgccgagcacugcgggaccgucgccaacggcgugcugcagaccuucaugcggauggcguggggcgggcgcuacaucgcccucgacuccggcugcgggaacugggacugcaucaugacgagcuaccaguaccugaucauccagaacaccaccugggaggaccacugccaguucucccggcccagccccaucggcuaccugggccuccugucccagcgcacccgggacaucuacaucagccgccggcugcucgggacguucaccuggacccugagcgacuccgagggcaacgagacccccgggggcuacugccugacgcgcuggaugcucaucgaggccgagcugaagugcuucgggaacaccgccguggccaagugcaacgagaagcacgacgaggaguucugcgacaugcugcggcuguucgacuucaacaagcaggcgauccgccggcugaaggccgaggcccagaugagcauccagcugaucaacaaggccgucaacgcccucaucaacgaccagcugaucaugaagaaccaccuccgcgacaucaugugcauccccuacugcaacuacuccaaguacugguaccucaaccacaccagcuccggccggaccagccugcccaagugcuggcugaucuccaacgggagcuaccucaacgagacgcaguucuccgacgacaucgagcagcaggcggacaacaugaucaccgagaugcugcagaaggaguacaucgagcgccagggcaagaccccgcuggggcucguggacaucuucaucuucagcaccuccuucuaccugaucagcaucuuccugcaccugaucaagaucccgacgcaccggcacaucgugggcaagcccugccccaagccccaccgccucaaccacaugggggucugcuccugcggccuguacaagcacccgggcgugcccaccaaguggaagcggugaggacuaguuauaagacugacuagcccgaugggccucccaacgggcccuccuccccuccuugcaccgagauuaauaaaaaaaaaaaaaaaaaaaaaaaaaaaaaaaaaaaaaaaaaaaaaaaaaaaaaaaaaaaaaaaaaaaaaaaaaaaaaaaaaaaaaaaaaaaaaaaaaaaa

SEQ ID NO: 36391 - RNA, 1662 nt, Artificial Sequence
  mRNA product Design i-3 (A100) comprising derived and/or modified sequence from LASV(803213;Clade II)__AAF86703__GPCmut9 (opt1)
aggagaaagcuuaccaugggccagaucaucaccuucuuccaggaggugccccacgucaucgaggaggugaugaacaucgugcugaucgcccucagccugcuggccauccucaaggggaucuacaacgucgcgaccugcggccuguucgggcugaucuccuuccuccugcugugcggccgcagcugcuccgugacguacaaggggguguacgagcuccagacccuggagcugaacauggccaaccucaacaugaccaugccgcugagcugcaccaagaacaacucccaccacuacaucauggucggcaacgagacgggccuggagcucacccugaccaacaccagcaucaucaaccacaaguucugcaaccuguccgacgcccacaagaagaaccucuacgaccacgcccugaugagcaucaucuccacguuccaccugagcauccccaacuucaaccaguacgaggccauguccugcgacuucaacgggggcaagaucagcgugcaguacaaccucucccacagcuucgcgguggacgccgccaaccacugcgggaccaucgccaacggcguccugcagaccuucaugcggauggcguggggcggguccuacaucgcccuggacagcggcugcgggaacugggacugcaucaugaccuccuaccaguaccucaucauccagaacacgaccugggaggaccacugccaguucagccgccccucccccaucggcuaccuggggcugcucagccagcggacccgcgacaucuacaucagccggcgccugcugggcaccuucacguggacccucuccgacagcgagggcaacgaggcccccgggggcuacugccugacccgguggaugcugaucgaggccgagcucaagugcuucgggaacaccgccguggcgaagugcaacgagaagcacgacgaggaguucugcgacaugcugcgccuguucgacuucaacaagcaggccaucaagcggcucaagacggaggcccagauguccauccagcugaucaacaaggccgugaacgcccugaucaacgaccagcucaucaugaagaaccaccuccgcgacaucaugugcauccccuacugcaacuacagccgguacugguaccugaaccacaccgucaccgggaagaccucccugccccgcugcuggcuggugagcaacggcuccuaccugaacgagacgcacuucagcgacgacaucgagcagcaggcggacaacaugaucaccgagaugcuccagaaggaguacauggaccggcagggcaagaccccgcuggggcugguggaccucuucgucuucuccaccagcuucuaccugaucuccaucuuccugcaccuggugaagaucccgacgcaccgccacaucgugggcaagcccugccccaagccccaccggcucaaccacauggggaucugcagcugcggccuguacaagcacccggggguccccgugaaguggaagcgcugaggacuaguuauaagacugacuagcccgaugggccucccaacgggcccuccuccccuccuugcaccgagauuaauaaaaaaaaaaaaaaaaaaaaaaaaaaaaaaaaaaaaaaaaaaaaaaaaaaaaaaaaaaaaaaaaaaaaaaaaaaaaaaaaaaaaaaaaaaaaaaaaaaaa

SEQ ID NO: 36392 - RNA, 1662 nt, Artificial Sequence
  mRNA product Design i-3 (A100) comprising derived and/or modified sequence from LASV(GA391;Clade III)__CAA36645__GPCmut9 (opt1)
aggagaaagcuuaccaugggccagaucgugaccuucuuccaggaggucccccacgugaucgaggaggugaugaacaucguccugaucgcccucagcauccuggccauccugaaggggcucuacaacguggcgaccugcggccugaucgggcuggugacguuccuccugcuguccggccgcagcugcucccucaucuacaaggggaccuacgagcugcagacccuggagcucaacauggagacccugaacaugacgaugccgcugagcugcaccaagaacaacucccaccacuacauccgggucggcaacgagaccggccucgagcugacccugacgaacaccagcauccucaaccacaaguucugcaaccuguccgacgcccacaagcgcaaccuguacgaccacagccucauguccaucaucagcaccuuccaccuguccauccccaacuucaaccaguacgaggccaugagcugcgacuucaacgggggcaagaucaccgugcaguacaaccugucccacagcuucgccguggacgccgcggggcacugcggcacgcucgccaacgggguccugcagaccuucaugcggauggccuggggcggcuccuacaucgcccuggacagcgggugcggcaacugggacugcaucaugaccuccuaccaguaccucaucauccagaacaccacgugggacgaccacugccaguucagccggcccucccccaucggguaccugggccugcucagccagcgcacccgggacaucuacaucagccgccggcugcugggcaccuucaccuggacgcucuccgacagcgaggggaacgagaccccgggcggguacugccugacccgcuggaugcugaucgaggcggagcucaagugcuucggcaacaccgccguggccaagugcaacgagaagcacgacgaggaguucugcgacaugcugcggcuguucgacuucaacaagcaggccauccgccggcucaagacggaggcccagauguccauccagcugaucaacaaggcggugaacgcccugaucaacgaccagcucaucaugaagaaccaccuccgcgacaucaugugcauccccuacugcaacuacagccgguacugguaccugaaccacaccuccaccggcaagaccagccugccccgcugcuggcugaucuccaacggcagcuaccugaacgagacgaaguucuccgacgacaucgagcagcaggccgacaacaugaucaccgagaugcuccagaaggaguacaucgaccggcaggggaagacgccccugggccuggucgaccuguucguguucagcaccuccuucuaccucaucagcaucuuccugcaccuggugaagaucccgacccaccgccacaucgucgggaagcccugccccaagccccaccggcucaaccacaugggcaucugcuccugcgggcuguacaagcagccgggcgugcccgugcgcuggaagcggugaggacuaguuauaagacugacuagcccgaugggccucccaacgggcccuccuccccuccuugcaccgagauuaauaaaaaaaaaaaaaaaaaaaaaaaaaaaaaaaaaaaaaaaaaaaaaaaaaaaaaaaaaaaaaaaaaaaaaaaaaaaaaaaaaaaaaaaaaaaaaaaaaaaa

SEQ ID NO: 36393 - RNA, 1665 nt, Artificial Sequence
  mRNA product Design i-3 (A100) comprising derived and/or modified sequence from LASV(AV;Clade V)__CCA30314__GPCmut9 (opt1)
aggagaaagcuuaccaugggccagaucgugaccuucuuccaggaggucccccacgugaucgaggaggugaugaacaucguccugaucgcccucagcauccuggccgugcugaaggggcucuacaacaucgcgaccugcggccugaucgggcugaucacguuccuccugcugugcggccgcuccugcagcuccaaccucuacaaggggguguacgagcugcagagccuggaccucaacauggagacccugaacaugaccaugccgcuguccugcaccaagaacaacagccaccacuacauccgggucggcaacgacacgggccucgagcugacccugaccaacaccuccauccucaaccacaaguucugcaaccugagcgacgcccacaagaaggaccuguacgaccacgcccucauguccaucaucagcacguuccaccuguccauccccaacuucaaccaguacgaggccaugagcugcgacuucaacgggggcaagaucuccgugcaguacaaccugagccacuccuacgccaucgacgcggccaaccacugcgggaccguggccaacggcauccuccagaccuucaugcgcauggccuggggcgggagcuacaucgcgcuggacuccggcugcgggaacugggacugcaucaugaccagcuaccaguaccugaucauccagaacacgaccugggagaaccacugccaguucucccgccccagccccaucggcuaccucgggcugcugagccagcggacccgcgacaucuacaucucccggcgccuccugggcaccuucacguggacccugagcgacuccgagggcaacgccacccccgggggcuacugccucacccgguggaugcugaucgaggccgagcugaagugcuucgggaacacggccgucgccaagugcaacgagaagcacgacgaggaguucugcgacaugcuccgccuguucgacuucaacaagcaggcgaucagccggcugaaguccgaggcccagaugagcauccagcucaucaacaaggccgugaacgcccugaucaacgaccagcugaucaugaagaaccaccuccgcgacaucaugugcauccccuacugcaacuacuccaaguacugguaccugaaccacaccaucaccgggaagaccagccugcccaagugcuggcucguguccaacggcagcuaccugaacgagacgcacuucuccgacgacaucgagcagcaggccgacaacaugaucaccgagaugcugcagaaggaguacauggagcggcagggcaagaccccgcucgggcuggucgaccuguucguguucagcaccuccuucuaccugaucagcaucuuccuccgccuggugaagaucccgacgcaccggcacaucgucggcaagcccugccccaagccccaccgccugaaccacauggggaucugcuccugcggccucuacaagcagccgggggugcccgugcgguggaagcgcugaggacuaguuauaagacugacuagcccgaugggccucccaacgggcccuccuccccuccuugcaccgagauuaauaaaaaaaaaaaaaaaaaaaaaaaaaaaaaaaaaaaaaaaaaaaaaaaaaaaaaaaaaaaaaaaaaaaaaaaaaaaaaaaaaaaaaaaaaaaaaaaaaaaa

SEQ ID NO: 36394 - RNA, 1662 nt, Artificial Sequence
  mRNA product Design i-3 (A100) comprising derived and/or modified sequence from LASV(Togo/2016/7082;Clade VI)__AMR44577__GPCmut9 (opt1)
aggagaaagcuuaccaugggccagaucaucaccuucuuccaggaggugccccacgucaucgaggaggugaugaacaucgugcugaucgcccucagccugcuggccauccucaagggggucuacaacguggcgaccugcggcaucaucgggcuggugacguuccuguuccucugcggccgcuccugcagccugaucuacaagggguccuacgagcugcagacccucgagcugaacauggagacccugaacaugaccaugccgcucagcugcacgaagaacuccagccaccacuacauccgggucggcaacgagaccggccuggagcugacccucaccaacacguccaucaucaaccacaaguucugcaaccugagcgacgcccacaagcgcaaccuguacgaccacgcccucauguccauccugagcaccuuccaccuguccauccccaacuucaaccaguacgaggccaugagcugcgacuucaacgggggcaagaucuccgugcaguacaaccucagccacgccuacgcgguggacgccgccgagcacugcgggaccgucgccaacggcgugcugcagaccuucaugcggauggcguggggcggguccuacaucgcccuggacagcggcugcgggaacugggacugcaucaugacguccuaccaguaccucaucauccagaacaccaccugggaggaccacugccaguucagccggcccucccccaucggcuaccuggggcugcucagccagcgcacccgggacaucuacaucagccgccggcugcugggcacguucaccuggacccucuccgacagcgagggcaacgagacccccgggggcuacugccugacgcgcuggaugcugaucgaggccgagcucaagugcuucgggaacaccgccguggccaagugcaacgagaagcacgacgaggaguucugcgacaugcugcggcuguucgacuucaacaagcaggcgauccagcgccucaaguccgaggcccagaugagcauccagcugaucaacaaggccgucaacgcccugaucaacgaccagcucaucaugaagaaccaccuccgggacaugaugugcauccccuacugcaacuacuccaaguacugguaccugaaccacaccagcuccgggcgcaccagccugcccaagugcuggcugguguccaacggcagcuaccugaacgagacgcacuucuccgacgacaucgagcagcaggccgacaacaugaucaccgagaugcuccagaaggaguacaucgaccggcagggcaagaccccgcuggggcugguggaccucuucgucuucagcaccuccuucuaccugaucagcaucuuccugcaccugaucaagaucccgacgcaccgccacaucgugggcaagcccugccccaagccccaccggcucaaccacauggggaucugcuccugcggccuguacaagcagccgggggugcccacccgcuggaagcggugaggacuaguuauaagacugacuagcccgaugggccucccaacgggcccuccuccccuccuugcaccgagauuaauaaaaaaaaaaaaaaaaaaaaaaaaaaaaaaaaaaaaaaaaaaaaaaaaaaaaaaaaaaaaaaaaaaaaaaaaaaaaaaaaaaaaaaaaaaaaaaaaaaaa

SEQ ID NO: 36395 - RNA, 1662 nt, Artificial Sequence
  mRNA product Design i-3 (A100) comprising derived and/or modified sequence from LASV(KAK-428;Clade n.d. (VII))__ANH09740__GPCmut9 (opt1)
aggagaaagcuuaccaugggccagaucgugaccuucuuccaggaggucccccacgugaucgaggaggugaugaacaucguccugaucgcccucagccugcuggccauccucaaggggcuguacaacuucgcgaccugcggcgugaucgggcugaucacguuccuccugcugugcggccgcuccugcagcgccaccuacaaggggcaguacgagcuccagacccuggagcugaacauggagucccucaacaugaccaugccgcugagcugcacgaagaacaacucccaccacuacauccgggccggcaacaacaccggccuggagcucacccugaccaacacgagcaucaucucccacaaguucugcaaccugagcgacgcccacaagaagaaccucuacgaccacacccugauguccaucaucaccaccuuccaccugagcauccccaacuucaaccaguacgaggccauguccugcgacuucaacgggggcaagaucagcauccaguacaaccucucccacagcuacgcgggggacgccgcccagcacugcggcacgguggccaacgggguccugcagaccuucaugcgcauggcguggggcggcuccuaccuggcccucgacagcgggugccgcggcugggacugcaucaucuccagcuaccaguaccugaucauccagaacaccaccugggacgaccacugccaguucucccggcccagccccaucggguaccugggcuucgugagccagaagacgcgcgacaucuacaucucccggcgccuccugggcaccuucaccuggacccugagcgacuccgaggggcacgacaugccgggcggguacugccucacgcgguggaugcugaucgaggccgaccugaagugcuucggcaacaccgccguggccaagugcaacgagaagcacgacgaggaguucugcgacauguggcgccucuucgacuucaacaagcaggcgauccagcggcugaaggccgaggcccagaugaacauccagcugaucaacaaggccgucaacgcccucaucaacgaccagcugaugaugaagaaccaccuccgcgacaucaugugcauccccuacugcaacuacagcaaguucugguaccugaacaacaccaccacgggccggaccucccugccccgcugcuggcugaucagcaacggcuccuaccucaacgagacccacuucagcgacgacaucgagcagcaggcggacaacaugaucaccgagaugcugcagaaggaguacauggaccggcaggggaagacgccccugggccucguggaccuguucguguucuccaccagcuucuaccugaucaccaucuuccuccaccuggucaagaucccgacccaccgccacaucguggggaagcccugccccaagccccaccggcugaaccacaugggcaucugcuccugcgggcuguacaagcagccgggcgugcccguccgcuggaagcggugaggacuaguuauaagacugacuagcccgaugggccucccaacgggcccuccuccccuccuugcaccgagauuaauaaaaaaaaaaaaaaaaaaaaaaaaaaaaaaaaaaaaaaaaaaaaaaaaaaaaaaaaaaaaaaaaaaaaaaaaaaaaaaaaaaaaaaaaaaaaaaaaaaaa

SEQ ID NO: 36396 - RNA, 1662 nt, Artificial Sequence; identical to SEQ ID NO: 36390
  mRNA product Design i-3 (A100) comprising derived and/or modified sequence from LASV(Pinneo-NIG-1969;Clade I)__AIT17836__GPCmut9 (opt1)

SEQ ID NO: 36397 - RNA, 1662 nt, Artificial Sequence
  mRNA product Design i-3 (A100) comprising derived and/or modified sequence from LASV(ISTH0009-NIG-2011;Clade II)__AIT17404__GPCmut9 (opt1)
aggagaaagcuuaccaugggccagaucaucaccuucuuccaggaggugccccacgucaucgaggaggugaugaacaucgugcugaucgcccucagccugcuggccauccucaaggggaucuacaacgucgcgaccugcggccuguucgggcugguguccuuccuccugcugugcggccgcagcugcuccacgaccuacaaggggguguacgagcuccagacccuggagcuggacauggccagccucaacaugaccaugccgcuguccugcacgaagaacaacagccaccacuacaucauggucggcaacgagaccggccuggagcucacccugaccaacacguccaucaucaaccacaaguucugcaaccugagcgacgcccacaagaagaaccucuacgaccacgcccugauguccaucaucagcaccuuccaccuguccauccccaacuucaaccaguacgaggccaugagcugcgacuucaacgggggcaagaucuccgugcaguacaaccucagccacgcguacgccguggacgccgccaaccacugcgggaccaucgcgaacggcguccugcagaccuucaugcggauggccuggggcggguccuacaucgcccuggacagcggcugcggguccugggacugcaucaugacgagcuaccaguaccucaucauccagaacaccaccugggaggaccacugccaguucucccgccccagccccaucggcuaccuggggcugcucagccagcggacccgcgacaucuacaucucccggcgccugcugggcacguucaccuggacccucagcgacuccgagggcaacgagacccccgggggcuacugccugacgcgguggaugcugaucgaggccgagcucaagugcuucgggaacaccgccguggcgaagugcaacgagaagcacgacgaggaguucugcgacaugcugcgccuguucgacuucaacaagcaggccauccggcgccucaagaccgaggcccagaugagcauccagcugaucaacaaggccgugaacgcccugaucaacgaccagcucaucaugaagaaccaccuccgggacaucaugugcaucccguacugcaacuacuccaaguacugguaccugaaccacaccgucacggggaagaccagccugccccgcugcuggcugguguccaacggcagcuaccugaacgagacccacuucuccgacgacaucgagcagcaggcggacaacaugaucaccgagcuccugcagaaggaguacauggaccggcagggcaagacgccccuggggcucguggaccuguucgucuucagcaccuccuucuaccugaucagcaucuuccugcaccucaucaagaucccgacccaccgccacaucaccggcaagcccugccccaagccccaccggcugaaccacauggggaucugcuccugcggccuguacaagcacccgggggugcccgugaaguggaagcgcugaggacuaguuauaagacugacuagcccgaugggccucccaacgggcccuccuccccuccuugcaccgagauuaauaaaaaaaaaaaaaaaaaaaaaaaaaaaaaaaaaaaaaaaaaaaaaaaaaaaaaaaaaaaaaaaaaaaaaaaaaaaaaaaaaaaaaaaaaaaaaaaaaaaa

SEQ ID NO: 36398 - RNA, 1662 nt, Artificial Sequence
  mRNA product Design i-3 (A100) comprising derived and/or modified sequence from LASV(ISTH2010-NIG-2012;Clade II)__AIT17482__GPCmut9 (opt1)
aggagaaagcuuaccaugggccagaucaucaccuucuuccaggaggugccccacgucaucgaggaggugaugaacaucgugcugaucgcccucagccugcuggccauccucaaggggaucuacaacgucgcgaccugcggccuguucgggcugguguccuuccuccugcugugcggccgcagcugcuccacgaccuacaaggggguguacgagcuccagacccuggagcuggacauggccagccucaacaugaccaugccgcuguccugcacgaagaacaacagccaccacuacaucauggucggcaacgagaccggccuggagcucacccugaccaacacguccaucaucaaccacaaguucugcaaccugagcgacgcccacaagaagaaccucuacgaccacgcccugauguccaucaucagcaccuuccaccuguccauccccaacuucaaccaguacgaggccaugagcugcgacuucaacgggggcaagaucuccgugcaguacaaccucagccacgcguacgccguggacgccgccaaccacugcgggaccaucgcgaacggcguccugcagaccuucaugcggauggccuggggcggguccuacaucgcccuggacagcggcugcggguccugggacugcaucaugacgagcuaccaguaccucaucauccagaacaucaccugggaggaccacugccaguucucccgccccagccccaucggcuaccuggggcugcucagccagcggacccgcgacaucuacaucucccggcgccugcugggcaccuucacguggacccucagcgacuccgagggcaacgagacccccgggggcuacugccugacccgguggaugcugaucgaggccgagcucaagugcuucgggaacacggccguggcgaagugcaacgagaagcacgacgaggaguucugcgacaugcugcgccuguucgacuucaacaagcaggccauccggcgccucaagaccgaggcccagaugagcauccagcugaucaacaaggccgugaacgcccugaucaacgaccagcucaucaugaagaaccaccuccgggacaucaugugcauccccuacugcaacuacuccaaguacugguaccugaaccacaccgucaccgggaagacgagccugccccgcugcuggcugguguccaacggcagcuaccugaacgagacccacuucuccgacgacaucgagcagcaggcggacaacaugaucaccgagcuccugcagaaggaguacaucgaccggcagggcaagaccccgcuggggcucguggaccuguucgucuucagcacguccuucuaccugaucagcaucuuccugcaccucgugaagaucccgacccaccgccacguggucggcaagcccugccccaagccccaccggcugaaccacauggggaucugcuccugcggccuguacaagcacccgggggugcccgugaaguggaagcgcugaggacuaguuauaagacugacuagcccgaugggccucccaacgggcccuccuccccuccuugcaccgagauuaauaaaaaaaaaaaaaaaaaaaaaaaaaaaaaaaaaaaaaaaaaaaaaaaaaaaaaaaaaaaaaaaaaaaaaaaaaaaaaaaaaaaaaaaaaaaaaaaaaaaa

SEQ ID NO: 36399 - RNA, 1662 nt, Artificial Sequence
  mRNA product Design i-3 (A100) comprising derived and/or modified sequence from LASV(Lassa virus/H.sapiens-wt/NGA/2015/ISTH_0543;Clade II)__AVO03639__GPCmut9 (opt1)
aggagaaagcuuaccaugggccagaucaucaccuucuuccaggaggugccccacgucaucgaggaggugaugaacaucgugcugaucgcccucagccugcuggccauccucaaggggaucuacaacgucgcgaccugcggccuguucgggcugguguccuuccuccugcugugcggccgcagcugcuccacgaccuacaaggggguguacgagcuccagacccuggagcuggacauggccaaccucaacaugaccaugccgcugagcugcacgaagaacaacucccaccacuacaucauggucggcaacgagaccggccuggagcucacccugaccaacacgagcaucaucaaccacaaguucugcaaccuguccgacgcccacaagaagaaccucuacgaccacgcccugaugagcaucaucuccaccuuccaccugagcauccccaacuucaaccaguacgaggccauguccugcgacuucaacgggggcaagaucagcgugcaguacaaccucucccacaccuacgcgguggacgccgccaaccacugcgggaccaucgccaacggcguccugcagacguucaugcggauggcguggggcgggagcuacaucgcccuggacuccggcugcgggagcugggacugcaucaugaccuccuaccaguaccucgugauccagaacaccaccugggaggaccacugccaguucagccgccccucccccaucggcuaccuggggcugcucagccagcggacgcgcgacaucuacaucagccggcgccugcugggcaccuucaccuggacccucuccgacagcgagggcaacgagacgcccgggggcuacugccugacccgguggaugcugaucgaggccgagcucaagugcuucgggaacaccgccguggccaagugcaacgagaagcacgacgaggaguucugcgacaugcugcgccuguucgacuucaacaagcaggcgauccggcgccucaagaccgaggcccagauguccauccagcugaucaacaaggccgucaacgcccugaucaacgaccagcucaucaugaagaaccaccuccgggacaucaugugcauccccuacugcaacuacagcaaguacugguaccugaaccacacggugaccgggaagaccucccugccccgcugcuggcuggugagcaacggcuccuaccugaacgagacccacuucagcgacgacaucgagcagcaggccgacaacaugaucacggagcuccugcagaaggaguacaucgaccggcagggcaagaccccgcuggggcucgucgaccuguucguguucuccaccagcuucuaccugaucuccaucuuccugcaccucgugaagaucccgacccaccgccacaucacgggcaagcccugccccaagccccaccggcugaaccacauggggaucugcagcugcggccuguacaagcacccggggguccccgugaaguggaagcgcugaggacuaguuauaagacugacuagcccgaugggccucccaacgggcccuccuccccuccuugcaccgagauuaauaaaaaaaaaaaaaaaaaaaaaaaaaaaaaaaaaaaaaaaaaaaaaaaaaaaaaaaaaaaaaaaaaaaaaaaaaaaaaaaaaaaaaaaaaaaaaaaaaaaa

SEQ ID NO: 36400 - RNA, 1662 nt, Artificial Sequence
  mRNA product Design i-3 (A100) comprising derived and/or modified sequence from LASV(Lassa virus/H.sapiens-wt/NGA/2016/ISTH_0009;Clade II)__AVO03571__GPCmut9 (opt1)
aggagaaagcuuaccaugggccagaucaucaccuucuuccaggaggugccccacgucaucgaggaggugaugaacaucgugcugaucgcccucagccugcuggccauccucaaggggaucuacaacgucgcgaccugcggccugcuggggcucguguccuuccugcugcucugcggccgcagcugcuccacgaccuacaaggggguguacgagcugcagacccuggagcucgacauggccagccugaacaugaccaugccgcuguccugcacgaagaacaacagccaccacuacaucauggucggcaacgagaccggccucgagcugacccugaccaacacguccaucaucaaccacaaguucugcaaccucagcgacgcccacaagaagaaccuguacgaccacgcccugauguccaucaucagcaccuuccaccucuccauccccaacuucaaccaguacgaggccaugagcugcgacuucaacgggggccggaucuccgugcaguacaaccugagccacuccuacgcgguggacgccgccaaccacugcgggaccaucgccaacggcguccugcagaccuucaugcgcauggcguggggcgggagcuacaucgcccucgacuccggcugcgggagcugggacugcaucaugacguccuaccaguaccugaucauccagaacaccaccugggaggaccacugccaguucagccggcccagccccaucggcuaccuggggcuccugucccagcgcacccgggacaucuacaucagccgccggcugcucggcacguucaccuggacccuguccgacagcgagggcaacgagacccccgggggcuacugccugacgcgcuggaugcucaucgaggccgagcugaagugcuucgggaacaccgccguggccaagugcaacgagaagcacgacgaggaguucugcgacaugcugcggcuguucgacuucaacaagcaggcgauccgccggcugaagaccgaggcccagauguccauccagcugaucaacaaggccgugaacgcccucaucaacgaccagcugaucaugaagaaccaccuccgcgacaucaugugcaucccguacugcaacuacagcaaguacugguaccucaaccacaccgucacggggaagaccucccugccccggugcuggcuggugagcaacggcuccuaccucaacgagacccacuucagcgacgacaucgagcagcaggccgacaacaugaucaccgagcugcugcagaaggaguacaucgaccgccagggcaagacgccccucgggcugguggaccuguucgucuucuccaccagcuucuaccugaucuccaucuuccuccaccuggugaagaucccgacccaccggcacaucaccggcaagcccugccccaagccccaccgccugaaccacauggggaucugcagcugcggccucuacaaccacccgggggugcccgucaaguggaagcggugaggacuaguuauaagacugacuagcccgaugggccucccaacgggcccuccuccccuccuugcaccgagauuaauaaaaaaaaaaaaaaaaaaaaaaaaaaaaaaaaaaaaaaaaaaaaaaaaaaaaaaaaaaaaaaaaaaaaaaaaaaaaaaaaaaaaaaaaaaaaaaaaaaaa

SEQ ID NO: 36401 - RNA, 1662 nt, Artificial Sequence
  mRNA product Design i-3 (A100) comprising derived and/or modified sequence from LASV(Lassa virus/H.sapiens-wt/NGA/2016/ISTH_0017;Clade II)__AVO03567__GPCmut9 (opt1)
aggagaaagcuuaccaugggccagaucaucaccuucuuccaggaggugccccacgucaucgaggaggugaugaacaucgugcugaucgcccucagccugcuggccauccucaaggggaucuacaacgucgcgaccugcggccuguucgggcugguguccuuccuccugcugugcggccgcagcugcuccacgaccuacaaggggguguacgagcuccagacccuggagcuggacauggccagccucaacaugaccaugccgcuguccugcacgaagaacaacagccaccacuacaucauggucggcaacgagaccggccuggagcucacccugaccaacacguccaucaucaaccacaaguucugcaaccugagcgacgcccacaagaagaaccucuacgaccacgcccugauguccaucaucagcaccuuccaccuguccauccccaacuucaaccaguacgaggccaugagcugcgacuucaacgggggcaagaucuccgugcaguacaaccucagccacaccuacgcgaucgacgccgccaaccacugcgggaccaucgccaacggcgugcugcagacguucaugcggauggcguggggcggguccuacaucgcccuggacagcggcugcggguccugggacugcaucaugaccagcuaccaguaccucaucauccagaacaccaccugggaggaccacugccaguucucccgccccagccccaucggcuaccuggggcugcucagccagcggacgcgcgacaucuacaucucccggcgccugcugggcaccuucaccuggacccucagcgacuccgagggcaacgagacgcccgggggcuacugccugacccgguggaugcugaucgaggccgagcucaagugcuucgggaacaccgccgucgccaagugcaacgagaagcacgacgaggaguucugcgacaugcugcgccuguucgacuucaacaagcaggcgauccggcgccucaagaccgaggcccagaugagcauccagcugaucaacaaggccgugaacgcccugaucaacgaccagcucaucaugaagaaccaccuccgggacaucaugugcauccccuacugcaacuacuccaaguacugguaccugaaccacacggugaccgggaagaccagccugccccgcugcuggcuggucuccaacggcagcuaccugaacgagacccacuucuccgacgacaucgagcagcaggccgacaacaugaucacggagcuccugcagaaggaguacauggaccggcagggcaagaccccgcuggggcucguggaccuguucguguucagcaccuccuucuaccugaucagcaucuuccugcaccucguccgcaucccgacccaccggcacgugaucggcaagcccugccccaagccccaccgccugaaccacauggggaucugcuccugcggccuguacaagcacccgggggugcccgucaaguggaagcggugaggacuaguuauaagacugacuagcccgaugggccucccaacgggcccuccuccccuccuugcaccgagauuaauaaaaaaaaaaaaaaaaaaaaaaaaaaaaaaaaaaaaaaaaaaaaaaaaaaaaaaaaaaaaaaaaaaaaaaaaaaaaaaaaaaaaaaaaaaaaaaaaaaaa

SEQ ID NO: 36402 - RNA, 1662 nt, Artificial Sequence
  mRNA product Design i-3 (A100) comprising derived and/or modified sequence from LASV(Lassa virus/H.sapiens-wt/NGA/2018/ISTH_0959;Clade II)__AVV65099__GPCmut9 (opt1)
aggagaaagcuuaccaugggccagaucaucaccuucuuccaggaggugccccacgucaucgaggaggugaugaacaucgugcugaucgcccucagccugcuggccauccucaaggggaucuacaacgucgugaccugcggccuguucgggcugguguccuuccuccugcugugcggccgcagcugcuccacgaccuacaagggggucuacgagcuccagacccuggagcuggacauggcgagccucaacaugaccaugccgcuguccugcacgaagaacaacagccaccacuacaucauggugggcaacgagaccggccuggagcucacccugaccaacacguccaucaucaaccacaaguucugcaaccugagcgacgcccacaagaagaaccucuacgaccacgcccugauguccaucaucagcaccuuccaccuguccauccccaacuucaaccaguacgaggccaugagcugcgacuucaacgggggcaagaucuccgugcaguacaaccucagccacgccuacgcgaucgacgccgccaaccacugcgggaccaucgccaacggcguccugcagaccuucaugcggauggcguggggcggguccuacaucgcccuggacagcggcugcggguccugggacugcaucaugacgagcuaccaguaccucaucauccagaacaccaccugggaggaccacugccaguucucccgccccagccccaucggcuaccuggggcugcucagccagcggacccgcgacaucuacaucucccggcgccugcugggcacguucaccuggacccucagcgacuccgagggcaacgagacccccgggggcuacugccugacgcgguggaugcugaucgaggccgagcucaagugcuucgggaacaccgccguggccaagugcaacgagaagcacgacgaggaguucugcgacaugcugcgccuguucgacuucaacaagcaggcgauccggcgccucaagaccgaggcccagaugagcauccagcugaucaacaaggccgugaacgcccugaucaacgaccagcucaucaugaagaaccaccuccgggacaucaugugcaucccguacugcaacuacuccaaguacugguaccugaaccacaccgucacggggaagaccagccugccccgcugcuggcugguguccaacggcagcuaccugaacgagacccacuucuccgacgacaucgagcagcaggccgacaacaugaucaccgagcuccugcagaaggaguacaucgaccggcagggcaagacgccccuggggcucguggaccuguucgucuucagcaccuccuucuaccugaucagcaucuuccugcaccucgugaagaucccgacccaccgccacgugaucggcaagcccugccccaagccccaccggcugaaccacauggggaucugcuccugcggccuguacaagcacccggggguccccgugaaguggaagcgcugaggacuaguuauaagacugacuagcccgaugggccucccaacgggcccuccuccccuccuugcaccgagauuaauaaaaaaaaaaaaaaaaaaaaaaaaaaaaaaaaaaaaaaaaaaaaaaaaaaaaaaaaaaaaaaaaaaaaaaaaaaaaaaaaaaaaaaaaaaaaaaaaaaaa

SEQ ID NO: 36403 - RNA, 1662 nt, Artificial Sequence
  mRNA product Design i-3 (A100) comprising derived and/or modified sequence from LASV(LASV003-NIG-2008;Clade II)__AIT17580__GPCmut9 (opt1)
aggagaaagcuuaccaugggccagaucaucaccuucuuccaggaggugccccacgucaucgaggaggugaugaacaucgugcugaucgcccucagccugcuggccauccucaaggggaucuacaacgucgcgaccugcggccuguucgggcugguguccuuccuccugcugugcggccgcagcugcuccacgaccuacaaggggguguacgagcuccagacccuggagcuggacauggccagccucaacaugaccaugccgcuguccugcacgaagaacaacagccaccacuacaucauggucggcaacgagaccggccuggagcucacccugaccaacacguccaucaucaaccacaaguucugcaaccugagcgacgcccacaagaagaaccucuacgaccacgcccugauguccaucaucagcaccuuccaccuguccauccccaacuucaaccaguacgaggccaugagcugcgacuucaacgggggcaagaucuccgugcaguacaaccucagccacaccuacgcgguggacgccgccaaccacugcgggaccaucgccaacggcguccugcagacguucaugcggauggcguggggcggguccuacaucgcccuggacagcggcugcggguccugggacugcaucaugaccagcuaccaguaccucaucauccagaacaccaccugggaggaccacugccaguucucccgccccagccccaucggcuaccuggggcugcucagccagcggacgcgcgacaucuacaucucccggcgccugcugggcaccuucaccuggacccucagcgacuccgagagcaacgagacgccgggcggguacugccugacccgguggaugcugaucgaggccgagcucaagugcuucggcaacaccgccguggccaagugcaacgagaagcacgacgaggaguucugcgacaugcugcgccuguucgacuucaacaagcaggcgauccggcgccucaaggccgaggcccagauguccauccagcugaucaacaaggccgugaacgcccugaucaacgaccagcucaucaugaagaaccaccuccgggacaucaugugcauccccuacugcaacuacagcaaguacugguaccugaaccacaccgucacgggccgcaccucccugccccggugcuggcuggugagcaacggguccuaccugaacgagacccacuucagcgacgacaucgagcagcaggcggacaacaugaucaccgagcuccugcagaaggaguacauggaccgccagggcaagacgccccugggccucguggaccuguucgucuucuccaccagcuucuaccugaucuccaucuuccugcaccucgugaagaucccgacccaccggcacgugaucgggaagcccugccccaagccccaccgccugaaccacaugggcaucugcagcugcgggcuguacaagcacccgggcguccccgugaaguggaagcggugaggacuaguuauaagacugacuagcccgaugggccucccaacgggcccuccuccccuccuugcaccgagauuaauaaaaaaaaaaaaaaaaaaaaaaaaaaaaaaaaaaaaaaaaaaaaaaaaaaaaaaaaaaaaaaaaaaaaaaaaaaaaaaaaaaaaaaaaaaaaaaaaaaaa

SEQ ID NO: 36404 - RNA, 1662 nt, Artificial Sequence
  mRNA product Design i-3 (A100) comprising derived and/or modified sequence from LASV(LASV035-NIG-2009;Clade II)__AIT17588__GPCmut9 (opt1)
aggagaaagcuuaccaugggccagaucaucaccuucuuccaggaggugccccacgucaucgaggaggugaugaacaucgugcugaucgcccucagccugcuggccauccucaaggggaucuacaacgucgcgaccugcggccuguucgggcugguguccuuccuccugcugugcggccgcagcugcuccacgaccuacaaggggguguacgagcuccagacccuggagcuggacauggccagccucaacaugaccaugccgcuguccugcacgaagaacaacagccaccacuacaucauggucggcaacgagaccggccuggagcucacccugaccaacacguccaucaucaaccacaaguucugcaaccugagcgacgcccacaagaagaaccucuacgaccacgcccugauguccaucaucagcaccuuccaccuguccauccccaacuucaaccaguacgaggccaugagcugcgacuucaacgggggcaagaucuccgugcaguacaaccucagccacgcguacgccguggacgccgccaaccacugcgggaccaucgcgaacggcguccugcagaccuucaugcggauggccuggggcggguccuacaucgcccuggacagcggcugcggguccugggacugcaucaugacgagcuaccaguaccucaucauccagaacaccaccugggaggaccacugccaguucucccgccccagccccaucggcuaccuggggcugcucagccagcggacccgcgacaucuacaucucccggcgccugcugggcacguucaccuggacccucagcgacuccgagggcaacgagacccccgggggcuacugccugacgcgguggaugcugaucgaggccgagcucaagugcuucgggaacaccgccguggcgaagugcaacgagaagcacgacgaggaguucugcgacaugcugcgccuguucgacuucaacaagcaggccauccggcgccucaaggccgaggcccagaugagcauccagcugaucaacaaggccgugaacgcgcugaucaacgaccagcucaucaugaagaaccaccuccgggacaucaugugcauccccuacugcaacuacuccaaguacugguaccugaaccacaccgucaccgggaagacgagccugccccgcugcuggcugguguccaacggcagcuaccugaacgagacccacuucuccgacgacaucgagcagcaggccgacaacaugaucaccgagcuccugcagaaggaguacaucgaccggcagggcaagaccccgcuggggcucguggaccuguucgucuucagcacguccuucuaccugaucagcaucuuccugcaccucgugaagaucccgacccaccgccacgugaucggcaagcccugccccaagccccaccggcugaaccacauggggaucugcuccugcggccuguacaagcacccggggguccccgugaaguggaagcgcugaggacuaguuauaagacugacuagcccgaugggccucccaacgggcccuccuccccuccuugcaccgagauuaauaaaaaaaaaaaaaaaaaaaaaaaaaaaaaaaaaaaaaaaaaaaaaaaaaaaaaaaaaaaaaaaaaaaaaaaaaaaaaaaaaaaaaaaaaaaaaaaaaaaa

SEQ ID NO: 36405 - RNA, 1662 nt, Artificial Sequence
  mRNA product Design i-3 (A100) comprising derived and/or modified sequence from LASV(LASV1000-NIG-2009;Clade II)__AIT17782__GPCmut9 (opt1)
aggagaaagcuuaccaugggccagaucaucaccuucuuccaggaggugccccacgucaucgaggaggugaugaacaucgugcugaucgcccucagccugcuggccauccucaaggggaucuacaacgucgcgaccugcggccuguucgggcugguguccuuccuccugcugugcggccgcagcugcuccacgaccuacaaggggguguacgagcuccagacccuggagcuggacauggccagccucaacaugaccaugccgcuguccugcacgaagaacaacagccaccacuacaucauggucggcaacgagaccggccuggagcucacccugaccaacacguccaucaucaaccacaaguucugcaaccugagcgacgcccacaagaagaaccucuacgaccacgcccugauguccaucaucagcaccuuccaccuguccauccccaacuucaaccaguacgaggccaugagcugcgacuucaacgggggcaagaucuccgugcaguacaaccucagccacaccuacgcgguggacgccgccaaccacugcgggaccaucgccaacggcguccugcagacguucaugcggauggcguggggcggguccuacaucgcccuggacagcggcugcggguccugggacugcaucaugaccagcuaccaguaccucaucauccagaacaccaccugggaggaccacugccaguucucccgccccagccccaucggcuaccuggggcugcucagccagcggacgcgcgacaucuacaucucccggcgccugcugggcaccuucaccuggacccucagcgacuccgagggcaacgagacgcccgggggcuacugccugacccgguggaugcugaucgaggccgagcucaagugcuucgggaacaccgccguggccaagugcaacgagaagcacgacgaggaguucugcgacaugcugcgccuguucgacuucaacaagcaggcgaucaagcggcucaagaccgaggcccagaugagcauccagcugaucaacaaggccgugaacgcccugaucaacgaccagcucaucaugaagaaccaccuccgcgacaucaugugcauccccuacugcaacuacuccaaguacugguaccugaaccacacggucaccgggaagaccagccugccccggugcuggcugguguccaacggcagcuaccugaacgagacccacuucuccgacgacaucgagcagcaggccgacaacaugaucacggagcuccugcagaaggaguacaucgaccgccagggcaagaccccgcuggggcucguggaccuguucgucuucagcaccuccuucuaccugaucagcaucuuccugcaccucgugaagaucccgacccaccggcacguggucggcaagcccugccccaagccccaccgccugaaccacauggggaucugcuccugcggccuguacaagcacccgggggugcccgugaaguggaagcggugaggacuaguuauaagacugacuagcccgaugggccucccaacgggcccuccuccccuccuugcaccgagauuaauaaaaaaaaaaaaaaaaaaaaaaaaaaaaaaaaaaaaaaaaaaaaaaaaaaaaaaaaaaaaaaaaaaaaaaaaaaaaaaaaaaaaaaaaaaaaaaaaaaaa

SEQ ID NO: 36406 - RNA, 1662 nt, Artificial Sequence
  mRNA product Design i-3 (A100) comprising derived and/or modified sequence from LASV(LASV221-NIG-2010;Clade II)__AIT17624__GPCmut9 (opt1)
aggagaaagcuuaccaugggccagaucaucaccuucuuccaggaggugccccacgucaucgaggaggugaugaacaucgugcugaucgcccucagccugcuggccauccucaaggggaucuacaacgucgcgaccugcggccuguucgggcugguguccuuccuccugcugugcggccgcagcugcuccacgaccuacaaggggguguacgagcuccagacccuggagcuggacauggccagccucaacaugaccaugccgcuguccugcacgaagaacaacagccaccacuacaucauggucggcaacgagaccggccuggagcucacccugaccaacacguccaucaucaaccacaaguucugcaaccugagcgacgcccacaagaagaaccucuacgaccacgcccugauguccaucaucagcaccuuccaccuguccauccccaacuucaaccaguacgaggccaugagcugcgacuucaacgggggcaagaucuccgugcaguacaaccucagccacaccuacgcgaucgacgccgccaaccacugcgggaccaucgccaacggcgugcugcagacguucaugcggauggcguggggcggguccuacaucgcccuggacagcggcugcggguccugggacugcaucaugaccagcuaccaguaccucaucauccagaacaccaccugggaggaccacugccaguucucccgccccagccccaucggcuaccuggggcugcucagccagcggacgcgcgacaucuacaucucccggcgccugcugggcaccuucaccuggacccucagcgacuccgagggcaacgagacgcccgggggcuacugccugacccgguggaugcugaucgaggccgagcucaagugcuucgggaacaccgccgucgccaagugcaacgagaagcacgacgaggaguucugcgacaugcugcgccuguucgacuucaacaagcaggcgauccggcgccucaagaccgaggcccagaugagcauccagcugaucaacaaggccgugaacgcccugaucaacgaccagcucaucaugaagaaccaccuccgggacaucaugugcauccccuacugcaacuacuccaaguacugguaccugaaccacacggugaccgggaagaccagccugccccgcugcuggcuggucuccaacggcagcuaccugaacgagacccacuucuccgacgacaucgagcagcaggccgacaacaugaucacggagaugcuccagaaggaguacauggaccggcagggcaagaccccgcuggggcugguggaccucuucguguucagcaccuccuucuaccugaucagcaucuuccugcaccuggucaagaucccgacccaccgccacgugaucggcaagcccugccccaagccccaccggcucaaccacauggggaucugcuccugcggccuguacaagcacccgggggugcccgucaaguggaagcgcugaggacuaguuauaagacugacuagcccgaugggccucccaacgggcccuccuccccuccuugcaccgagauuaauaaaaaaaaaaaaaaaaaaaaaaaaaaaaaaaaaaaaaaaaaaaaaaaaaaaaaaaaaaaaaaaaaaaaaaaaaaaaaaaaaaaaaaaaaaaaaaaaaaaa

SEQ ID NO: 36407 - RNA, 1662 nt, Artificial Sequence
  mRNA product Design i-3 (A100) comprising derived and/or modified sequence from LASV(LASV237-NIG-2010;Clade II)__AIT17638__GPCmut9 (opt1)
aggagaaagcuuaccaugggccagaucaucaccuucuuccaggaggugccccacgucaucgaggaggugaugaacaucgugcugaucgcccucagccugcuggccauccucaaggggaucuacaacgucgcgaccugcggccuguucgggcugguguccuuccuccugcugugcggccgcagcugcuccacgaccuacaaggggguguacgagcuccagacccuggagcuggacauggccagccucaacaugaccaugccgcuguccugcacgaagaacaacagccaccacuacaucauggucggcaacgagaccggccuggagcucacccugaccaacacguccaucaucaaccacaaguucugcaaccugagcgacgcccacaagaaggaccucuacgaccacgcccugauguccaucaucagcaccuuccaccuguccauccccaacuucaaccaguacgaggccaugagcugcgacuucaacgggggcaagaucuccgugcaguacaaccucagccacaccuacgcgguggacgccgccaaccacugcgggaccaucgccaacggcguccugcagacguucaugcggauggcguggggcggguccuacaucgcccuggacagcggcugcggguccugggacugcaucaugaccagcuaccaguaccucaucauccagaacaccaccugggaggaccacugccaguucucccgccccagccccaucggcuaccuggggcugcucagccagcggacgcgcgacaucuacaucucccggcgccugcugggcaccuucaccuggacccucagcgacuccgagggcaacgagacgcccgggggcuacugccugacccgguggaugcugaucgaggccgagcucaagugcuucgggaacaccgccguggccaagugcaacgagaagcacgacgaggaguucugcgacaugcugcgccuguucgacuucaacaagcaggcgauccggcgccucaagaccgaggcccagaugagcauccagcugaucaacaaggccgugaacgcccugaucaacgaccagcucaucaugaagaaccaccuccgggacaucaugugcauccccuacugcaacuacuccaaguacugguaccugaaccacacggucaccgggaagaccagccugccccgcugcuggcugguguccaacggcagcuaccugaacgagacccacuucuccgacgacaucgagcagcaggccgacaacaugaucacggagcuccugcagaaggaguacauggaccggcagggcaagaccccgcuggggcucguggaccuguucgucuucagcaccuccuucuaccugaucagcaucuuccugcaccucaucaagaucccgacccaccgccacaucacgggcaagcccugccccaagccccaccggcugaaccacauggggaucugcuccugcggccuguacaagcacccgggggugcccgugaaguggaagcgcugaggacuaguuauaagacugacuagcccgaugggccucccaacgggcccuccuccccuccuugcaccgagauuaauaaaaaaaaaaaaaaaaaaaaaaaaaaaaaaaaaaaaaaaaaaaaaaaaaaaaaaaaaaaaaaaaaaaaaaaaaaaaaaaaaaaaaaaaaaaaaaaaaaaa

SEQ ID NO: 36408 - RNA, 1662 nt, Artificial Sequence
  mRNA product Design i-3 (A100) comprising derived and/or modified sequence from LASV(LASV253-NIG-2011;Clade II)__AIT17670__GPCmut9 (opt1)
aggagaaagcuuaccaugggccagaucaucaccuucuuccaggaggugccccacgucaucgaggaggugaugaacaucgugcugaucgcccucagccugcuggccauccucaaggggaucuacaacgucgcgaccugcggccuguucgggcugguguccuuccuccugcugugcggccgcagcugcuccacgaccuacaaggggguguacgagcuccagacccuggagcuggacauggccagccucaacaugaccaugccgcuguccugcacgaagaacaacagccaccacuacaucauggucggcaacgagaccggccuggagcucacccugaccaacacguccaucaucaaccacaaguucugcaaccugagcgacgcccacaagaagaaccucuacgaccacgcccugauguccaucaucagcaccuuccaccuguccauccccaacuucaaccaguacgaggccaugagcugcgacuucaacgggggcaagaucuccgugcaguacaaccucagccacaccuacgcgguggacgccgccaaccacugcgggaccaucgccaacggcguccugcagacguucaugcggauggcguggggcggguccuacaucgcccuggacagcggcugcggguccugggacugcaucaugaccagcuaccaguaccucaucauccagaacaccaccugggaggaccacugccaguucucccgccccagccccaucggcuaccuggggcugcucagccagcggacgcgcgacaucuacaucucccggcgccugcugggcaccuucaccuggacccucagcgacuccgagggcaacgagacgcccgggggcuacugccugacccgguggaugcugaucgaggccgagcucaagugcuucgggaacaccgccguggccaagugcaacgagaagcacgacgaggaguucugcgacaugcugcgccuguucgacuucaacaagcaggcgauccggcgccucaaggccgaggcccagaugagcauccagcugaucaacaaggccgugaacgcccugaucaacgaccagcucaucaugaagaaccaccuccgggacaucaugugcaucccguacugcaacuacuccaaguacugguaccugaaccacaccgucacggggcgcaccagccugccccggugcuggcugguguccaacggcagcuaccugaacgagacccacuucuccgacgacaucgagcagcaggcggacaacaugaucaccgagcuccugcagaaggaguacaucgaccgccagggcaagacgccccuggggcucguggaccuguucgucuucagcaccuccuucuaccugaucagcaucuuccugcaccucgugaagaucccgacccaccggcacaucaucggcaagcccugccccaagccccaccgccugaaccacauggggaucugcuccugcggccuguacaagcacccgggggugcccgucaaguggaagcggugaggacuaguuauaagacugacuagcccgaugggccucccaacgggcccuccuccccuccuugcaccgagauuaauaaaaaaaaaaaaaaaaaaaaaaaaaaaaaaaaaaaaaaaaaaaaaaaaaaaaaaaaaaaaaaaaaaaaaaaaaaaaaaaaaaaaaaaaaaaaaaaaaaaa

SEQ ID NO: 36409 - RNA, 1662 nt, Artificial Sequence
  mRNA product Design i-3 (A100) comprising derived and/or modified sequence from LASV(LASV254-NIG-2011;Clade II)__AIT17674__GPCmut9 (opt1)
aggagaaagcuuaccaugggccagaucaucaccuucuuccaggaggugccccacgucaucgaggaggugaugaacaucgugcugaucgcccucagccugcuggccauccucaaggggaucuacaacgucgcgaccugcggccuguucgggcugguguccuuccuccugcugugcggccgcagcugcuccacgaccuacaaggggguguacgagcuccagacccuggagcuggacaugaccaaccucaacaugacgaugccgcugagcugcaccaagaacaacucccaccacuacaucauggucggcaacgagaccggccuggagcucacccugacgaacaccagcaucaucaaccacaaguucugcaaccuguccgacgcccacaagaagaaccucuacaaccacgcccugaugagcaucaucuccaccuuccaccugagcauccccaacuucaaccaguacgaggccauguccugcgacuucaacgggggcaagaucagcgugcaguacaaccucucccacagcuacgccguggacgcggccaaccacugcgggaccaucgccaacggcguccugcagacguucaugcggauggccuggggcggguccuacaucgcgcuggacagcggcugcgggaacugggacugcaucaugaccuccuaccaguaccucaucauccagaacaccaccugggaggaccacugccaguucagccgccccucccccaucggcuaccuggggcugcucagccagcggacgcgcgacaucuacaucagccggcgccugcugggcaccuucaccuggacccucuccgacagcgagggcaacgagacgcccgggggcuacugccugacccgguggaugcugaucgaggccgagcucaagugcuucgggaacaccgccguggccaagugcaacgagaagcacgacgaggaguucugcgacaugcugcgccuguucgacuucaacaagcaggccauccggcgccucaagaccgaggcgcaggccaacauccagcugaucaacaaggccgugaacgcccugaucaacgaccagcucaucaugaagaaccaccuccgggacaucaugugcauccccuacugcaacuacuccaaguacugguaccugaaccacacggucaccgggaagaccagccugccccgcugcuggcugguguccaacggcagcuaccugaacgagacccacuucuccgacgacaucgagcagcaggccgacaacaugaucacggagcuccugcagaaggaguacauggaccggcagggcaagaccccgcuggggcucguggaccuguucgucuucagcaccuccuucuaccugaucagcaucuuccugcaccucgugaagaucccgacccaccgccacgugaucggcaagcccugccccaagccccaccggcugaaccacauggggaucugcuccugcggccuguacaagcacccggggguccccgugaaguggaagcgcugaggacuaguuauaagacugacuagcccgaugggccucccaacgggcccuccuccccuccuugcaccgagauuaauaaaaaaaaaaaaaaaaaaaaaaaaaaaaaaaaaaaaaaaaaaaaaaaaaaaaaaaaaaaaaaaaaaaaaaaaaaaaaaaaaaaaaaaaaaaaaaaaaaaa

SEQ ID NO: 36410 - RNA, 1662 nt, Artificial Sequence
  mRNA product Design i-3 (A100) comprising derived and/or modified sequence from LASV(Nig08-A19;Clade III)__ADU56618__GPCmut9 (opt1)
aggagaaagcuuaccaugggccagaucgugaccuucuuccaggaggucccccacgugaucgaggaggugaugaacaucguccugaucgcccucagcauccuggccauccugaaggggcucuacaacaucgcgaccugcggccugaucgggcuggugacguuccuccugcuguccggccgcagcugcuccaugaccuacaaggggguguacgagcuccagacccuggagcugaacaugaacacccucaacaugacgaugccgcugagcugcaccaagaacaacucccaccacuacaucauggucggcaacgagaccggccuggagcucacccugacgaacaccagccugcuccaccacaaguucugcaaccuguccgacgcccacaagaagaaccuguacgaccacacccucaugagcaucaucuccaccuuccaccugagcauccccaacuucaaccaguacgaggccauguccugcgacuucaacgggggcaagaucacggugcaguacaaccugagccacuccuacgccaucgacgccgcgaaccacugcgggaccguggccaacggcguccuccagaccuucaugcggauggccuggggcgggagcuacaucgcccuggacuccggcugcgggaagugggacugcaucaugaccagcuaccaguaccugaucauccagaacacgaccugggaggaccacugccaguucucccggcccagccccaucggcuaccucgggcugcugucccagcgcacccgggacaucuacaucagccgccggcuccugggcaccuucacguggacccugagcgacuccgagggcaacgagacccccgggggcuacugccucacccgcuggaugcugaucgaggcggagcugaagugcuucgggaacacggccguggccaagugcaacgagaagcacgacgaggaguucugcgacaugcuccggcuguucgacuucaacaagcaggccauccgccggcugaaggccgaggcgcagaugagcauccagcucaucaacaaggccgugaacgcccugaucaacgaccagcugaucaugaagaaccaccuccgcgacaucaugugcauccccuacugcaacuacuccaaguacugguaccugaaccacaccagcaccgggcggaccucccugccccgcugcuggcucgucagcaacggcuccuaccugaacgagacgcacuucagcgacgacaucgagcagcaggccgacaacaugaucaccgagaugcugcagaaggaguaccucgaccggcagggcaagaccccgcuggggcugguggaccuguucguguucuccaccagcuucuaccucaucuccaucuuccugcaccuggucaagaucccgacgcaccgccacaucgugggcaagcccugccccaagccccaccggcucaaccacauggggaucugcagcugcggccuguacaagcagccgggggugcccguccgcuggaagcggugaggacuaguuauaagacugacuagcccgaugggccucccaacgggcccuccuccccuccuugcaccgagauuaauaaaaaaaaaaaaaaaaaaaaaaaaaaaaaaaaaaaaaaaaaaaaaaaaaaaaaaaaaaaaaaaaaaaaaaaaaaaaaaaaaaaaaaaaaaaaaaaaaaaa

SEQ ID NO: 36411 - RNA, 1665 nt, Artificial Sequence
  mRNA product Design i-3 (A100) comprising derived and/or modified sequence from LASV(G1180-SLE-2010;Clade IV)__AIT17168__GPCmut9 (opt1)
aggagaaagcuuaccaugggccagaucgugaccuucuuccaggaggucccccacgugaucgaggaggugaugaacaucguccugaucgcccucagcauccuggccgugcugaaggggcucuacaacuucgcgaccugcggccugguggggcugcucaccuuccugcugcucugcggccgcuccugcaccgccagccgguacaagggggucuacgagcugcagacccuggagcucaacauggagacccugaacaugacgaugccgcuguccugcaccaagaacaacagccaccacuacaucauggugggcaacgagaccggccucgagcugacccugacgaacaccuccaucaucaaccacaaguucugcaaccucagcgacgcccacaagaagaaccuguacgaccacgcccugauguccaucaucagcaccuuccaccucuccauccccaacuucaaccaguacgaggccaugagcugcgacuucaacgggggcaagaucuccgugcaguacaaccugagccacuccuacgcgggggacgccgccaaccacugcggcaccgucgccaacggggugcugcagacguucaugcgcauggcguggggcggcagcuacaucgcccucgacuccgggugcggcagcugggacugcaucaugaccuccuaccaguaccugaucauccagaacaccaccugggaggaccacugccaguucagccggcccucccccaucggguaccugggccuccugagccagcgcacgcgggacaucuacaucagccgccggcugcucggcaccuucaccuggacccuguccgacagcgaggggaaggacacgccgggcggguacugccugacccgcuggaugcucaucgaggccgagcugaagugcuucggcaacaccgccguggccaagugcaacgagaagcacgacgaggaguucugcgacaugcugcggcuguucgacuucaacaagcaggcgauccagcgccugaaggccgaggcccagauguccauccagcugaucaacaaggccgucaacgcccucaucaacgaccagcugaucaugaagaaccaccuccgggacaucaugugcauccccuacugcaacuacagcaaguacugguaccucaaccacaccacgaccggcaagaccucccugcccaagugcuggcuggugagcaacggcuccuaccucaacgagacccacuucagcgacgacaucgagcagcaggcggacaacaugaucacggagaugcugcagaaggaguacauggagcgccaggggaagacgccccugggccucguggaccuguucgucuucuccaccagcuucuaccugaucuccaucuuccugcaccucgugaagaucccgacccaccggcacaucgugggcaagagcugccccaagccccaccgccugaaccacauggggaucugcuccugcgggcuguacaagcagcccggcgucccggugaaguggaagcggugaggacuaguuauaagacugacuagcccgaugggccucccaacgggcccuccuccccuccuugcaccgagauuaauaaaaaaaaaaaaaaaaaaaaaaaaaaaaaaaaaaaaaaaaaaaaaaaaaaaaaaaaaaaaaaaaaaaaaaaaaaaaaaaaaaaaaaaaaaaaaaaaaaaa

SEQ ID NO: 36412 - RNA, 1665 nt, Artificial Sequence
  mRNA product Design i-3 (A100) comprising derived and/or modified sequence from LASV(G1442-SLE-2011;Clade IV)__AIT17180__GPCmut9 (opt1)
aggagaaagcuuaccaugggccagaucgugaccuucuuccaggaggucccccacgugaucgaggaggugaugaacaucguccugaucgcccucagcauccuggccgugcugaaggggcucuacaacguggcgaccugcggccugaucgggcuggucacguuccuccugcugugcggccgcuccugcaccaccacccucuacaaggggguguacgagcugcagacgcuggagcucaacauggagacccugaacaugaccaugccgcugagcugcaccaagaacaacucccaccacuacauccgggugggcaacgagacgggccucgagcugacccugaccaacaccagcaucaucaaccacaaguucugcaaccucuccgacgcccacaagaagaaccuguacgaccacgcccugaugagcaucaucuccacguuccaccucagcauccccaacuucaaccaguacgaggccauguccugcgacuucaacgggggcaagaucagcguccaguacaaccugucccacagcuacgccggggacgcggccaaccacugcggcaccguggccaacggggugcugcagaccuucaugcgcauggccuggggcggcuccuacaucgcgcucgacagcgggugcggcaacugggacugcaucaugaccuccuaccaguaccugaucauccagaacacgaccugggacgaccacugccaguucagccgccccucccccaucggguaccugggccuccugagccagcggacccgcgacgucuacaucucccggcgccugcucggcaccuucacguggacccugagcgacagcgaggggaaggacaccccgggcggguacugccugacccgguggaugcucaucgaggccgagcugaagugcuucggcaacacggccguggccaagugcaacgagaagcacgacgaggaguucugcgacaugcugcgccucuucgacuucaacaagcaggccauccagcggcugaaggcggaggcccagauguccauccagcugaucaacaaggccgugaacgcccucaucaacgaccagcugaucaugaagaaccaccuccgcgacaucaugugcauccccuacugcaacuacagcaaguacugguaccugaacaacaccgccaccggcaagaccucccugcccaagugcuggcugaucagcaacggcuccuaccucaacgagacgcacuucagcgacgacaucgagcaggaggcggacaacaugaucaccgagaugcugcagaaggaguacauggagcggcaggggaagacgccccugggccucgucgaccuguucguguucuccaccagcuucuaccugaucuccaucuuccugcaccucgugaagaucccgacccaccgccacaucgucggcaagagcugccccaagccccaccggcugaaccacauggggaucugcuccugcgggcuguacaagcagcccggcgugccggugcgcuggaagcggugaggacuaguuauaagacugacuagcccgaugggccucccaacgggcccuccuccccuccuugcaccgagauuaauaaaaaaaaaaaaaaaaaaaaaaaaaaaaaaaaaaaaaaaaaaaaaaaaaaaaaaaaaaaaaaaaaaaaaaaaaaaaaaaaaaaaaaaaaaaaaaaaaaaa

SEQ ID NO: 36413 - RNA, 1665 nt, Artificial Sequence
  mRNA product Design i-3 (A100) comprising derived and/or modified sequence from LASV(G3010-SLE-2013;Clade IV)__AIT17344__GPCmut9 (opt1)
aggagaaagcuuaccaugggccagaucgugaccuucuuccaggaggucccccacgugaucgaggaggugaugaacaucguccugaucgcccucagcauccuggccgugcugaaggggcucuacaacuucgcgaccugcggccugguggggcuggucacguuccuccugcugugcggccgcuccugcaccaccagccucuacaaggggguguacgagcugcagacccuggagcucaacauggagacgcugaacaugaccaugccgcuguccugcaccaagaacaacagccaccacuacaucauggugggcaacgagaccggccucgagcugacgcugaccaacaccuccaucaucaaccacaaguucugcaaccucagcgacgcccacaagaagaaccuguacaaccacgcccugauguccaucaucagcaccuuccaccucuccauccccaacuucaaccaguacgaggccaugagcugcgacuucaacgggggcaagaucuccguccaguacaaccugagccacuccuacgccggggacgcggccagccacugcggcacgguggccaacggggugcugcagaccuucaugcggauggccuggggcggcuccuacaucgcgcucgacagcgggugcggcaagugggacugcaucaugaccuccuaccaguaccugaucauccagaacaccacgugggaggaccacugccaguucagccgccccucccccaucggguaccugggccuccugagccagcggacccgcgacaucuacaucagccggcgccugcucggcaccuucaccuggacgcuguccgacagcgaggggaaggacaccccgggcggguacugccugacccgguggaugcucaucgaggccgagcugaagugcuucggcaacaccgccgucgccaagugcaacgagaagcacgacgaggaguucugcgacaugcugcgccucuucgacuucaacaagcaggccauccagcggcugaagacggaggcgcagauguccauccagcugaucaacaaggccgugaacgcccucaucaacgaccagcugaucaugaagaaccaccuccgcgacaucaugugcauccccuacugcaacuacagcaaguacugguaccugaaccacaccaccaccggcaagacgucccugcccaagugcuggcuggugagcaacggcuccuaccucaacgagacccacuucagcgacgacaucgagcagcaggccgacaacaugaucaccgagaugcugcagaaggaguacauggagcggcaggggaagacgccccugggccucgucgaccuguucguguucuccaccagcuucuaccugaucuccaucuuccugcaccucgugaagaucccgacccaccgccacaucgucggcaagagcugccccaagccccaccggcugaaccacauggggaucugcuccugcgggcuguacaagcagcccggcgugccggugcgcuggaagcggugaggacuaguuauaagacugacuagcccgaugggccucccaacgggcccuccuccccuccuugcaccgagauuaauaaaaaaaaaaaaaaaaaaaaaaaaaaaaaaaaaaaaaaaaaaaaaaaaaaaaaaaaaaaaaaaaaaaaaaaaaaaaaaaaaaaaaaaaaaaaaaaaaaaa

SEQ ID NO: 36414 - RNA, 1665 nt, Artificial Sequence
  mRNA product Design i-3 (A100) comprising derived and/or modified sequence from LASV(G502-SLE-2009;Clade IV)__AIT17126__GPCmut9 (opt1)
aggagaaagcuuaccaugggccagaucgugaccuucuuccaggaggucccccacgugaucgaggaggugaugaacaucguccugaucgcccucagcauccuggccgugcugaaggggcucuacaacuucgcgaccugcggccugguggggcugcucacguuccugcugcucugcggccgcuccugcaccaccgggcuguacaagggcgucuacgagcugcagacccucgagcugaacauggagacgcugaacaugaccaugccgcucagcugcaccaagaacaacucccaccacuacaucauggugggcaacgagaccgggcuggagcugacgcucaccaacaccagcaucaucaaccacaaguucugcaaccuguccgacgcccacaagaagaaccuguacgaccacgcccucaugagcaucaucuccaccuuccaccugagcauccccaacuucaaccaguacgaggccauguccugcgacuucaacggcgggaagaucagcgugcaguacaaccugucccacagcuacgccggcgacgcggccgaccacugcgggacggucgccaacggcgugcuccagaccuucaugcggauggccuggggcggguccuacaucgcgcuggacagcggcugcgggcggugggacugcaucaugaccuccuaccaguaccugaucauccagaacaccacgugggaggaccacugccaguucagccgccccucccccaucggcuaccucggccugcugagccagcggacccgcgacaucuacaucucccggcgccuccuggggaccuucaccuggacgcugagcgacagcgagggcaaggacacccccgggggcuacugccucacccgguggaugcugaucgaggccgagcugaagugcuucgggaacaccgccguggccaagugcaacgagaagcacgacgaggaguucugcgacaugcuccgccuguucgacuucaacaagcaggccauccagcggcugaaggcggaggcccagauguccauccagcucaucaacaaggccgucaacgcccugaucaacgaccagcuggugaugaagaaccaccuccgcgacaucaugugcauccccuacugcaacuacagccgguacugguaccugaaccacacgaccaccggccgcaccucccugcccaagugcuggcucgugagcaacggguccuaccugaacgagacgcacuucagcgacgacaucgagcagcaggccgacaacaugaucaccgagaugcugcagaaggaguacauggagcggcagggcaagaccccgcucgggcuggucgaccuguucguguucuccaccagcuucuaccugaucuccaucuuccuccaccuggugaagaucccgacgcaccgccacaucgucggcaagagcugccccaagccccaccggcugaaccacauggggaucugcuccugcggccucuacaagcagcccggcgugccggugaaguggaagcgcugaggacuaguuauaagacugacuagcccgaugggccucccaacgggcccuccuccccuccuugcaccgagauuaauaaaaaaaaaaaaaaaaaaaaaaaaaaaaaaaaaaaaaaaaaaaaaaaaaaaaaaaaaaaaaaaaaaaaaaaaaaaaaaaaaaaaaaaaaaaaaaaaaaaa

SEQ ID NO: 36415 - RNA, 1665 nt, Artificial Sequence
  mRNA product Design i-3 (A100) comprising derived and/or modified sequence from LASV(G733-SLE-2010;Clade IV)__AIT17154__GPCmut9 (opt1)
aggagaaagcuuaccaugggccagaucgugaccuucuuccaggaggucccccacgugaucgaggaggugaugaacaucguccugaucgcccucagcauccuggccgugcugaaggggcucuacaacuucgcgaccugcggcaucguggggcuggucuccuuccugcuccugugcggccgcagcugcacgaccucccuguacaaggggguguacgagcuccagacccuggagcugaacauggagacccucaacaugacgaugccgcugagcugcaccaagaacaacucccaccacuacaucauggugggcaacgagaccggccuggagcucacccugacgaacaccagcaucaucaaccacaaguucugcaaccuguccgacgcccacaagaagaaccucuacgaccacgcccugaugagcaucaucuccaccuuccaccugagcauccccaacuucaaccaguacgaggccauguccugcgacuucaacgggggcaagaucagcguccaguacaaccucucccacagcuacgccggggacgcggccaaccacugcggcaccaucgccaacggggugcugcagacguucaugcggauggccuggggcggcuccuacaucgcgcuggacagcgggugcgaccggugggacugcaucaugaccuccuaccaguaccucaucauccagaacaccaccugggaggaccacugccaguucagccgccccucccccaucggcuaccuggggcugcucagccagcggacgcgcgacaucuacaucagccggcgccugcugggcaccuucaccuggacccucuccgacagcgagggcaaggacacgcccgggggcuacugccugacccgguggaugcugaucgaggccgagcucaagugcuucgggaacaccgccguggccaagugcaacgagaagcacgacgaggaguucugcgacaugcugcgccuguucgacuucaacaagcaggccauccagcggcucaaggcggaggcccagauguccauccagcugaucaacaaggccgucaacgcccugaucaacgaccagcucaucaugaagaaccaccuccgcgacaucaugugcauccccuacugcaacuacagcaaguacugguaccugaaccacaccacgaccgggaagaccucccugcccaagugcuggcuggugagcaacggcuccuaccugaacgagacccacuucagcgacgacaucgagcagcaggccgacaacaugaucacggagaugcuccagaaggaguacauggagcggcagggcaagaccccgcuggggcugguggaccucuucgucuucuccaccagcuucuaccugaucuccaucuuccugcaccuggugaagaucccgacccaccgccacguggucggcaagagcugccccaagccccaccggcucaaccacauggggaucugcuccugcggccuguacgggcagcccggcgugccggugaaguggaagcgcugaggacuaguuauaagacugacuagcccgaugggccucccaacgggcccuccuccccuccuugcaccgagauuaauaaaaaaaaaaaaaaaaaaaaaaaaaaaaaaaaaaaaaaaaaaaaaaaaaaaaaaaaaaaaaaaaaaaaaaaaaaaaaaaaaaaaaaaaaaaaaaaaaaaa

SEQ ID NO: 36416 - RNA, 1665 nt, Artificial Sequence
  mRNA product Design i-3 (A100) comprising derived and/or modified sequence from MOPV/LASV reassortant(IGS-1;Clade IV)__AFY05576__GPCmut9 (opt1)
aggagaaagcuuaccaugggccagaucgugaccuucuuccaggaggucccccacgugaucgaggaggugaugaacaucguccugaucgcccucagcgugcuggccgugcugaaggggcucuacaacuucgcgaccugcggccuggucgggcuggugacguuccuccugcugugcggccgcuccugcaccaccagccucuacaaggggguguacgagcugcagacccuggagcucaacauggagacgcugaacaugaccaugccgcuguccugcaccaagaacaacagccaccacuacaucauggucggcaacgagaccggccucgagcugacgcugaccaacaccuccaucaucaaccacaaguucugcaaccucagcgacgcccacaagaagaaccuguacgaccacgcccugauguccaucaucagcaccuuccaccucuccauccccaacuucaaccaguacgaggccaugagcugcgacuucaacgggggcaagaucuccgugcaguacaaccugagccacuccuacgccggggacgcggccaaccacugcggcacgguggccaacgggguccugcagaccuucaugcggauggccuggggcggcagcuacaucgcgcucgacuccgggugcggcaacugggacugcaucaugaccagcuaccaguaccugaucauccagaacaccacgugggaggaccacugccaguucucccggcccagccccaucggguaccugggccuccugucccagcgcacccgggacaucuacaucagccgccggcugcucggcaccuucaccuggacgcugagcgacuccgagggggaggacaccccgggcggguacugccugacccgcuggaugcucaucgaggccgagcugaagugcuucggcaacaccgccguggccaagugcaacgagaagcacgacgaggaguucugcgacaugcugcggcuguucgacuucaacaagcaggccauccagcgccugaaggcggaggcccagaugagcauccagcugaucaacaaggccgugaacgcccucaucaacgaccagcugaucaugaagaaccaccuccgggacaucaugugcauccccuacugcaacuacuccaaguacugguaccucaaccacacgaccaccggccgcaccagccugcccaagugcuggcuggucuccaacggcagcuaccucaacgagacgcacuucuccgacgacaucgagcagcaggccgacaacaugaucaccgagaugcugcagaaggaguacauggagcggcaggggaagacgccccugggccucguggaccuguucguguucagcaccuccuucuaccugaucagcaucuuccugcaccucgucaagaucccgacccaccgccacaucguggggaaguccugccccaagccccaccggcugaaccacaugggcaucugcagcugcgggcuguacaagcagcccggcgugccggucaaguggaagcgcugaggacuaguuauaagacugacuagcccgaugggccucccaacgggcccuccuccccuccuugcaccgagauuaauaaaaaaaaaaaaaaaaaaaaaaaaaaaaaaaaaaaaaaaaaaaaaaaaaaaaaaaaaaaaaaaaaaaaaaaaaaaaaaaaaaaaaaaaaaaaaaaaaaaa

SEQ ID NO: 36417 - RNA, 1665 nt, Artificial Sequence
  mRNA product Design i-3 (A100) comprising derived and/or modified sequence from LASV(LM765-SLE-2012;Clade IV)__AIT17814__GPCmut9 (opt1)
aggagaaagcuuaccaugggccagaucgugaccuucuuccaggaggucccccacgugaucgaggaggugaugaacaucguccugaucgcccucagcauccuggccgugcugaaggggcucuacaacuucgcgaccugcggccugguggggcuggucacguuccuccugcugugcggccgcuccugcaccaccagccucuacaaggggguguacgagcugcagacccuggagcucaacauggagacgcugaacaugaccaugccgcuguccugcaccaagaacaacagccaccacuacaucauggugggcaacgagaccggccucgagcugacgcugaccaacaccuccaucaucgaccacaaguucugcaaccucagcgacgcccaccggaagaaccuguacgaccacgcccugauguccaucaucagcaccuuccaccucuccauccccaacuucaaccaguacgaggccaugagcugcgacuucaacgggggcaagaucuccguccaguacaaccugagccacuccuacgccaaggacgcggccgaccacugcgggacgguggccaacggcgugcugcagaccuucaugcgcauggccuggggcgggagcuacaucgcgcucgacuccggcugcgggcgcugggacugcaucaugaccagcuaccaguaccugaucauccagaacaccacgugggaggaccacugccaguucucccggcccagccccaucggcuaccuggggcuccugucccagcgcacccgggacaucuacaucagccgccggcugcucggcaccuucaccuggacgcugagcgacuccgagggcaaggacacccccgggggcuacugccugacccgcuggaugcucaucgaggccgagcugaagugcuucgggaacaccgccgucgccaagugcaacgagaagcacgacgaggaguucugcgacaugcugcggcuguucgacuucaacaagcaggccauccagcgccugaaggcggaggcccagaugagcauccagcugaucaacaaggccgugaacgcccucaucaacgaccagcugaucaugaagaaccaccuccgggacaucaugugcauccccuacugcaacuacuccaaguacugguaccucaaccacacgaccaccgggaagaccagccugcccaagugcuggcugguguccaacggcagcuaccucaacgagacgcacuucuccgacgacaucgagcagcaggccgacaacaugaucaccgagaugcugcagaaggaguacauggagcgccagggcaagaccccgcuggggcucgucgaccuguucguguucagcaccuccuucuaccugaucagcaucuuccugcaccucgugaagaucccgacgcaccggcacaucgucggcaagcccugccccaagccccaccgccugaaccacauggggaucugcuccugcggccuguacaagcagccgggggugcccgugaaguggaagcggugaggacuaguuauaagacugacuagcccgaugggccucccaacgggcccuccuccccuccuugcaccgagauuaauaaaaaaaaaaaaaaaaaaaaaaaaaaaaaaaaaaaaaaaaaaaaaaaaaaaaaaaaaaaaaaaaaaaaaaaaaaaaaaaaaaaaaaaaaaaaaaaaaaaa

SEQ ID NO: 36418 - RNA, 1665 nt, Artificial Sequence
  mRNA product Design i-3 (A100) comprising derived and/or modified sequence from LASV(LM776-SLE-2012;Clade IV)__AIT17824__GPCmut9 (opt1)
aggagaaagcuuaccaugggccagaucgugaccuucuuccaggaggucccccacgugaucgaggaggugaugaacaucguccugaucgcccucagcauccuggccgugcugaaggggcucuacaacuucgcgaccugcggccugguggggcuggucacguuccuccugcugugcggccgcuccugcaccaccagcguguacaaggggguguacgagcuccagacccuggagcugaacauggagacgcucaacaugaccaugccgcuguccugcaccaagaacaacagccaccacuacaucauggucggcaacgagaccggccuggagcucacgcugaccaacaccuccaucaucaaccacaaguucugcaaccugagcgacgcccacaagaagaaccucuacgaccacgcccugauguccaucaucagcaccuuccaccuguccauccccaacuucaaccaguacgaggccaugagcugcgacuucaacgggggcaagaucuccgugcaguacaaccucagccacuccuacgccggggacgcggccaaccacugcggcacgguggccaacgggguccugcagaccuucaugcggauggccuggggcggcagcuacaucgcgcuggacuccgggugcggcaagugggacugcaucaugaccagcuaccaguaccucaucauccagaacaccacgugggaggaccacugccaguucucccgccccagccccaucggguaccugggccugcucucccagcggacccgcgacaucuacaucagccggcgccugcugggcaccuucaccuggacgcucagcgacuccgaggggaaggacaccccgggcggguacugccugacccgguggaugcugaucgaggccgagcucaagugcuucggcaacaccgccguggccaagugcaacgagaagcacgacgaggaguucugcgacaugcugcgccuguucgacuucaacaagcaggccauccagcggcucaaggcggaggcccagaugagcauccagcugaucaacaaggccgugaacgcccugaucaacgaccagcucaucaugaagaaccaccuccgcgacaucaugugcauccccuacugcaacuacuccaaguacugguaccugaaccacacgaccaccggcaagaccagccugcccaagugcuggcuggucuccaacggcagcuaccugaacgagacgcacuucuccgacgacaucgagcagcaggccgacaacaugaucaccgagaugcuccagaaggaguacauggagcggcaggggaagacgccccugggccugguggaccucuucguguucagcaccuccuucuaccugaucagcaucuuccugcaccuggucaagaucccgacccaccgccacaucguggggaaguccugccccaagccccaccggcucaaccacaugggcaucugcagcugcgggcuguacaagcagcccggcgugccgguccgcuggaagcggugaggacuaguuauaagacugacuagcccgaugggccucccaacgggcccuccuccccuccuugcaccgagauuaauaaaaaaaaaaaaaaaaaaaaaaaaaaaaaaaaaaaaaaaaaaaaaaaaaaaaaaaaaaaaaaaaaaaaaaaaaaaaaaaaaaaaaaaaaaaaaaaaaaaa

SEQ ID NO: 36419 - RNA, 1665 nt, Artificial Sequence
  mRNA product Design i-3 (A100) comprising derived and/or modified sequence from LASV(Mad39;Clade IV)__ANH09722__GPCmut9 (opt1)
aggagaaagcuuaccaugggccagaucgugaccuucuuccaggaggucccccacgugaucgaggaggugaugaacaucguccugaucgcccucagcauccuggccgugcugaaggggcucuacaacguggcgaccugcggccugaucgggcuggucacguuccuccugcugugcggccgcuccugcaccaccacccucuacaaggggguguacgagcugcaggcccuggagcucaacauggagacgcugaacaugaccaugccgcugagcugcaccaagaacaacucccaccacuacauccgggugggcaacgagaccggccucgagcugacgcugaccaacaccagccucaucaaccacaaguucugcaaccuguccgacgcccacaagaagaaccuguacgaccacgcccucaugagcaucaucuccaccuuccaccugagcauccccaacuucaaccaguacgaggccauguccugcgacuucaacgacgggaagaucagcguccaguacaaccugucccacacguacgcgggcgacaccgccaaccacugcgggaccguggccaacggcgugcuccagaccuucaugcgcauggccuggggcgggagcuacaucgcgcuggacuccggcugcgggggcugggacugcaucaugacgagcuaccaguaccugaucauccagaacaccaccugggaggaccacugccaguucucccggcccagccccaucggguaccucggccugcugucccagcggacccgcgacaucuacaucagccggcgccuccugggcacguucaccuggacccuguccgacagcgaggggaaggacaccccgggcggguacugccucacgcgguggaugcugaucgaggccgagcugaagugcuucggcaacaccgccgucgccaagugcaacgagaagcacgacgaggaguucugcgacaugcuccgccuguucgacuucaacaagcaggccauccagcggcugaaggcggaggcccagaugagcauccagcucaucaacaaggccgugaacgcccugaucaacgaccagcugaucaugaagaaccaccuccgcgacaucaugugcauccccuacugcaacuacuccaaguacugguaccugaaccacaccgugaccggcaagacgagccugcccaagugcuggcucgucuccaacggcagcuaccugaacgagacccacuucuccgacgacaucgagcagcaggccgacaacaugaucaccgagaugcugcagaaggaguacauggagcggcaggggaagacgccccucggccugguggaccuguucguguucagcaccuccuucuaccugaucagcaucuuccuccaccuggucaagaucccgacccaccgccacgugguggggaagcccugccccaagccccaccggcugaaccacaugggcaucugcuccugcggguucuacaagcagccgggcguccccgugcgcuggaagcggugaggacuaguuauaagacugacuagcccgaugggccucccaacgggcccuccuccccuccuugcaccgagauuaauaaaaaaaaaaaaaaaaaaaaaaaaaaaaaaaaaaaaaaaaaaaaaaaaaaaaaaaaaaaaaaaaaaaaaaaaaaaaaaaaaaaaaaaaaaaaaaaaaaaa

SEQ ID NO: 36420 - RNA, 1665 nt, Artificial Sequence
  mRNA product Design i-3 (A100) comprising derived and/or modified sequence from LASV(Z0947-SLE-2011;Clade IV)__AIT17840__GPCmut9 (opt1)
aggagaaagcuuaccaugggccagaucgugaccuucuuccaggaggucccccacgugaucgaggaggugaugaacaucguccugaucgcccucagcauccuggccgugcugaaggggcucuacaacuucgcgaccugcggccugguggggcuggucacguuccuccugcugugcggccgcuccugcaccaucagccucuacaaggggguguacgagcugcagacccuggagcucaacauggagacccugaacaugacgaugccgcuguccugcaccaagaacaacagccaccacuacaucauggugggcaacgagaccggccucgagcugacccugacgaacaccuccaucaucaaccacaaguucugcaaccucagcgacgcccacaagaagaaccuguacgaccacgcccugauguccaucaucagcaccuuccaccucuccauccccaacuucaaccaguacgaggccaugagcugcgacuucaacgggggcaagaucuccguccaguacaaccugagccacuccuacgccggggacgcggccaaccacugcggcaccguggccaacggggugcugcagacguucaugcggauggccuggggcggcagcuacaucgcgcucgacuccgggugcgaccggugggacugcaucaugaccagcuaccaguaccugaucauccagaacaccaccugggaggaccacugccaguucucccgccccagccccaucggcuaccuggggcuccugucccagcggacgcgcgacaucuacaucagccggcgccugcucggcaccuucaccuggacccugagcgacuccgagggcaaggacacgcccgggggcuacugccugacccgguggaugcucaucgaggccgagcugaagugcuucgggaacaccgccgucgccaagugcaacgagaagcacgacgaggaguucugcgacaugcugcgccucuucgacuucaacaagcaggccauccagcggcugaaggcggaggcccagaugagcauccagcugaucaacaaggccgugaacgcccucaucaacgaccagcugaucaugaagaaccaccuccgcgacaucaugugcauccccuacugcaacuacuccaaguacugguaccugaaccacaccacgaccgggaagaccagccugcccaagugcuggcugguguccaacggcagcuaccucaacgagacccacuucuccgacgacaucgagcagcaggccgacaacaugaucacggagaugcugcagaaggaguacauggagcggcagggcaagaccccgcuggggcucgucgaccuguucguguucagcaccuccuucuaccugaucagcaucuuccugcaccucgugaagaucccgacccaccgccacaucgucggcaagcccugccccaagccccaccggcugaaccacauggggaucugcuccugcggccuguacaagcagccgggggugcccgugaaguggaagcgcugaggacuaguuauaagacugacuagcccgaugggccucccaacgggcccuccuccccuccuugcaccgagauuaauaaaaaaaaaaaaaaaaaaaaaaaaaaaaaaaaaaaaaaaaaaaaaaaaaaaaaaaaaaaaaaaaaaaaaaaaaaaaaaaaaaaaaaaaaaaaaaaaaaaa

SEQ ID NO: 36421 - RNA, 1665 nt, Artificial Sequence
  mRNA product Design i-3 (A100) comprising derived and/or modified sequence from LASV(Josiah;Clade IV)__NP_694870__GPCmut9 (opt1)
aggagaaagcuuaccaugggccagaucgugaccuucuuccaggaggucccccacgugaucgaggaggugaugaacaucguccugaucgcccucagcgugcuggccgugcugaaggggcucuacaacuucgcgaccugcggccuggucgggcuggugacguuccuccugcugugcggccgcuccugcaccaccagccucuacaaggggguguacgagcugcagacccuggagcucaacauggagacgcugaacaugaccaugccgcuguccugcaccaagaacaacagccaccacuacaucauggucggcaacgagaccggccucgagcugacgcugaccaacaccuccaucaucaaccacaaguucugcaaccucagcgacgcccacaagaagaaccuguacgaccacgcccugauguccaucaucagcaccuuccaccucuccauccccaacuucaaccaguacgaggccaugagcugcgacuucaacgggggcaagaucuccgugcaguacaaccugagccacuccuacgccggggacgcggccaaccacugcggcacgguggccaacgggguccugcagaccuucaugcggauggccuggggcggcagcuacaucgcgcucgacuccgggugcggcaacugggacugcaucaugaccagcuaccaguaccugaucauccagaacaccacgugggaggaccacugccaguucucccgccccagccccaucggguaccugggccuccugucccagcggacccgcgacaucuacaucagccggcgccugcucggcaccuucaccuggacgcugagcgacuccgaggggaaggacaccccgggcggguacugccugacccgguggaugcucaucgaggccgagcugaagugcuucggcaacaccgccguggccaagugcaacgagaagcacgacgaggaguucugcgacaugcugcgccucuucgacuucaacaagcaggccauccagcggcugaaggcggaggcccagaugagcauccagcugaucaacaaggccgugaacgcccucaucaacgaccagcugaucaugaagaaccaccuccgcgacaucaugugcauccccuacugcaacuacuccaaguacugguaccugaaccacacgaccaccgggcggaccagccugcccaagugcuggcuggucuccaacggcagcuaccucaacgagacgcacuucuccgacgacaucgagcagcaggccgacaacaugaucaccgagaugcugcagaaggaguacauggagcgccagggcaagacgccccuggggcugguggaccucuucguguucagcaccuccuucuaccugaucagcaucuuccugcaccucgucaagaucccgacccaccggcacaucgugggcaaguccugccccaagccccaccgccugaaccacauggggaucugcagcugcggccuguacaagcagcccggggugccggucaaguggaagcggugaggacuaguuauaagacugacuagcccgaugggccucccaacgggcccuccuccccuccuugcaccgagauuaauaaaaaaaaaaaaaaaaaaaaaaaaaaaaaaaaaaaaaaaaaaaaaaaaaaaaaaaaaaaaaaaaaaaaaaaaaaaaaaaaaaaaaaaaaaaaaaaaaaaa

SEQ ID NO: 36422 - RNA, 1662 nt, Artificial Sequence
  mRNA product Design i-3 (A100) comprising derived and/or modified sequence from LASV(LP;Clade I)__AAF86701__GPCmut9 (opt1)
aggagaaagcuuaccaugggccagaucaucaccuucuuccaggaggugccccacgucaucgaggaggugaugaacaucgugcugaucgcccucagccugcuggccauccucaaggggcuguacaacaucgcgaccugcggcaucaucgggcuggucgccuuccucuuccugugcggcaaguccugcagccugacgcucaagggcggguacgagcugcagacccuggagcucaacauggagacccugaacaugaccaugccgcuguccugcacgaagaacagcucccaccacuacauccgcgugggcaacgagaccgggcucgagcugacccugaccaacacgagcaucaucaaccacaaguucugcaaccucuccgacgcccacaagaagaaccuguacgaccacgcccugaugagcaucaucuccaccuuccaccucagcauccccaacuucaaccaguacgaggccauguccugcgacuucaacggcgggaagaucagcgugcaguacaaccugucccacagcuacgcgggcgacgccgccgagcacugcgggaccgucgccaacggcgugcugcagaccuucaugcggauggcguggggcgggcgcuacaucgcccucgacuccggcugcgggaacugggacugcaucaugacgagcuaccaguaccugaucauccagaacaccaccugggaggaccacugccaguucucccggcccagccccaucggcuaccugggccuccugucccagcgcacccgggacaucuacaucagccgccggcugcucgggacguucaccuggacccugagcgacuccgagggcaacgagacccccgggggcuacugccugacgcgcuggaugcucaucgaggccgagcugaagugcuucgggaacaccgccguggccaagugcaacgagaagcacgacgaggaguucugcgacaugcugcggcuguucgacuucaacaagcaggcgauccgccggcugaaggccgaggcccagaugagcauccagcugaucaacaaggccgucaacgcccucaucaacgaccagcugaucaugaagaaccaccuccgcgacaucaugugcauccccuacugcaacuacuccaaguacugguaccucaaccacaccagcuccggccggaccagccugcccaagugcuggcugaucuccaacggcagcuaccucaacgagacgcaguucuccgacgacaucgagcagcaggcggacaacaugaucaccgagaugcugcagaaggaguacaucgagcgccaggggaagaccccgcugggccugguggacaucuucaucuucagcaccuccuucuaccucaucagcaucuuccugcaccugaucaagaucccgacgcaccggcacaucguggggaagcccugccccaagccccaccgccucaaccacaugggcgucugcuccugcgggcuguacaagcacccgggcgugcccaccaaguggaagcggugaggacuaguuauaagacugacuagcccgaugggccucccaacgggcccuccuccccuccuugcaccgagauuaauaaaaaaaaaaaaaaaaaaaaaaaaaaaaaaaaaaaaaaaaaaaaaaaaaaaaaaaaaaaaaaaaaaaaaaaaaaaaaaaaaaaaaaaaaaaaaaaaaaaa

SEQ ID NO: 36423 - RNA, 1662 nt, Artificial Sequence
  mRNA product Design i-3 (A100) comprising derived and/or modified sequence from LASV(803213;Clade II)__AAF86703__GPCmut9 (opt1)
aggagaaagcuuaccaugggccagaucaucaccuucuuccaggaggugccccacgucaucgaggaggugaugaacaucgugcugaucgcccucagccugcuggccauccucaaggggaucuacaacgucgcgaccugcggccuguucgggcugaucuccuuccuccugcugugcggccgcagcugcuccgugacguacaaggggguguacgagcuccagacccuggagcugaacauggccaaccucaacaugaccaugccgcugagcugcaccaagaacaacucccaccacuacaucauggucggcaacgagacgggccuggagcucacccugaccaacaccagcaucaucaaccacaaguucugcaaccuguccgacgcccacaagaagaaccucuacgaccacgcccugaugagcaucaucuccacguuccaccugagcauccccaacuucaaccaguacgaggccauguccugcgacuucaacgggggcaagaucagcgugcaguacaaccucucccacagcuucgcgguggacgccgccaaccacugcgggaccaucgccaacggcguccugcagaccuucaugcggauggcguggggcggguccuacaucgcccuggacagcggcugcgggaacugggacugcaucaugaccuccuaccaguaccucaucauccagaacacgaccugggaggaccacugccaguucagccgccccucccccaucggcuaccuggggcugcucagccagcggacccgcgacaucuacaucagccggcgccugcugggcaccuucacguggacccucuccgacagcgagggcaacgaggcccccgggggcuacugccugacccgguggaugcugaucgaggccgagcucaagugcuucgggaacaccgccguggcgaagugcaacgagaagcacgacgaggaguucugcgacaugcugcgccuguucgacuucaacaagcaggccaucaagcggcucaagacggaggcccagauguccauccagcugaucaacaaggccgugaacgcccugaucaacgaccagcucaucaugaagaaccaccuccgcgacaucaugugcauccccuacugcaacuacagccgguacugguaccugaaccacaccgucaccggcaagaccucccugccccgcugcuggcuggugagcaacggguccuaccugaacgagacgcacuucagcgacgacaucgagcagcaggcggacaacaugaucaccgagaugcuccagaaggaguacauggaccggcagggcaagaccccgcugggccugguggaccuguucgucuucuccaccagcuucuaccucaucuccaucuuccugcaccuggugaagaucccgacgcaccgccacaucguggggaagcccugccccaagccccaccggcucaaccacaugggcaucugcagcugcgggcuguacaagcacccgggcguccccgugaaguggaagcgcugaggacuaguuauaagacugacuagcccgaugggccucccaacgggcccuccuccccuccuugcaccgagauuaauaaaaaaaaaaaaaaaaaaaaaaaaaaaaaaaaaaaaaaaaaaaaaaaaaaaaaaaaaaaaaaaaaaaaaaaaaaaaaaaaaaaaaaaaaaaaaaaaaaaa

SEQ ID NO: 36424 - RNA, 1662 nt, Artificial Sequence
  mRNA product Design i-3 (A100) comprising derived and/or modified sequence from LASV(GA391;Clade III)__CAA36645__GPCmut9 (opt1)
aggagaaagcuuaccaugggccagaucgugaccuucuuccaggaggucccccacgugaucgaggaggugaugaacaucguccugaucgcccucagcauccuggccauccugaaggggcucuacaacguggcgaccugcggccugaucgggcuggugacguuccuccugcuguccggccgcagcugcucccucaucuacaaggggaccuacgagcugcagacccuggagcucaacauggagacccugaacaugacgaugccgcugagcugcaccaagaacaacucccaccacuacauccgggucggcaacgagaccggccucgagcugacccugacgaacaccagcauccucaaccacaaguucugcaaccuguccgacgcccacaagcgcaaccuguacgaccacagccucauguccaucaucagcaccuuccaccuguccauccccaacuucaaccaguacgaggccaugagcugcgacuucaacgggggcaagaucaccgugcaguacaaccugucccacagcuucgccguggacgccgcggggcacugcggcacgcucgccaacgggguccugcagaccuucaugcggauggccuggggcggcuccuacaucgcccuggacagcgggugcggcaacugggacugcaucaugaccuccuaccaguaccucaucauccagaacaccacgugggacgaccacugccaguucagccgccccucccccaucggguaccugggccugcucagccagcggacccgcgacaucuacaucagccggcgccugcugggcaccuucaccuggacgcucuccgacagcgaggggaacgagaccccgggcggguacugccugacccgguggaugcugaucgaggcggagcucaagugcuucggcaacaccgccguggccaagugcaacgagaagcacgacgaggaguucugcgacaugcugcgccuguucgacuucaacaagcaggccauccggcgccucaagacggaggcccagauguccauccagcugaucaacaaggcggugaacgcccugaucaacgaccagcucaucaugaagaaccaccuccgggacaucaugugcauccccuacugcaacuacagccgcuacugguaccugaaccacaccuccaccgggaagaccagccugccccggugcuggcugaucuccaacggcagcuaccugaacgagacgaaguucuccgacgacaucgagcagcaggccgacaacaugaucaccgagaugcugcagaaggaguacaucgaccgccagggcaagacgccccucgggcuggucgaccuguucguguucagcaccuccuucuaccucaucagcaucuuccugcaccuggugaagaucccgacccaccggcacaucgucggcaagcccugccccaagccccaccgccucaaccacauggggaucugcuccugcggccuguacaagcagccgggggugcccgugcgguggaagcgcugaggacuaguuauaagacugacuagcccgaugggccucccaacgggcccuccuccccuccuugcaccgagauuaauaaaaaaaaaaaaaaaaaaaaaaaaaaaaaaaaaaaaaaaaaaaaaaaaaaaaaaaaaaaaaaaaaaaaaaaaaaaaaaaaaaaaaaaaaaaaaaaaaaaa

SEQ ID NO: 36425 - RNA, 1665 nt, Artificial Sequence
  mRNA product Design i-3 (A100) comprising derived and/or modified sequence from LASV(AV;Clade V)__CCA30314__GPCmut9 (opt1)
aggagaaagcuuaccaugggccagaucgugaccuucuuccaggaggucccccacgugaucgaggaggugaugaacaucguccugaucgcccucagcauccuggccgugcugaaggggcucuacaacaucgcgaccugcggccugaucgggcugaucacguuccuccugcugugcggccgcuccugcagcuccaaccucuacaaggggguguacgagcugcagagccuggaccucaacauggagacccugaacaugaccaugccgcuguccugcaccaagaacaacagccaccacuacauccgggucggcaacgacacgggccucgagcugacccugaccaacaccuccauccucaaccacaaguucugcaaccugagcgacgcccacaagaaggaccuguacgaccacgcccucauguccaucaucagcacguuccaccuguccauccccaacuucaaccaguacgaggccaugagcugcgacuucaacgggggcaagaucuccgugcaguacaaccugagccacuccuacgccaucgacgcggccaaccacugcgggaccguggccaacggcauccuccagaccuucaugcgcauggccuggggcgggagcuacaucgcgcuggacuccggcugcgggaacugggacugcaucaugaccagcuaccaguaccugaucauccagaacacgaccugggagaaccacugccaguucucccggcccagccccaucggcuaccucgggcugcugagccagcgcacccgggacaucuacaucucccgccggcuccugggcaccuucacguggacccugagcgacuccgagggcaacgccacccccgggggcuacugccucacccgcuggaugcugaucgaggccgagcugaagugcuucgggaacacggccgucgccaagugcaacgagaagcacgacgaggaguucugcgacaugcuccggcuguucgacuucaacaagcaggcgaucagccgccugaaguccgaggcccagaugagcauccagcucaucaacaaggccgugaacgcccugaucaacgaccagcugaucaugaagaaccaccuccgggacaucaugugcauccccuacugcaacuacuccaaguacugguaccugaaccacaccaucaccggcaagaccagccugcccaagugcuggcucguguccaacgggagcuaccugaacgagacgcacuucuccgacgacaucgagcagcaggccgacaacaugaucaccgagaugcugcagaaggaguacauggagcgccagggcaagaccccgcugggccucgucgaccuguucguguucagcaccuccuucuaccugaucagcaucuuccuccggcuggugaagaucccgacgcaccgccacaucgucgggaagcccugccccaagccccaccggcugaaccacaugggcaucugcuccugcgggcucuacaagcagccgggcgugcccgugcgcuggaagcggugaggacuaguuauaagacugacuagcccgaugggccucccaacgggcccuccuccccuccuugcaccgagauuaauaaaaaaaaaaaaaaaaaaaaaaaaaaaaaaaaaaaaaaaaaaaaaaaaaaaaaaaaaaaaaaaaaaaaaaaaaaaaaaaaaaaaaaaaaaaaaaaaaaaa

SEQ ID NO: 36426 - RNA, 1662 nt, Artificial Sequence
  mRNA product Design i-3 (A100) comprising derived and/or modified sequence from LASV(Togo/2016/7082;Clade VI)__AMR44577__GPCmut9 (opt1)
aggagaaagcuuaccaugggccagaucaucaccuucuuccaggaggugccccacgucaucgaggaggugaugaacaucgugcugaucgcccucagccugcuggccauccucaagggggucuacaacguggcgaccugcggcaucaucgggcuggugacguuccuguuccucugcggccgcuccugcagccugaucuacaagggguccuacgagcugcagacccucgagcugaacauggagacccugaacaugaccaugccgcucagcugcacgaagaacuccagccaccacuacauccgggucggcaacgagaccggccuggagcugacccucaccaacacguccaucaucaaccacaaguucugcaaccugagcgacgcccacaagcgcaaccuguacgaccacgcccucauguccauccugagcaccuuccaccuguccauccccaacuucaaccaguacgaggccaugagcugcgacuucaacgggggcaagaucuccgugcaguacaaccucagccacgccuacgcgguggacgccgccgagcacugcgggaccgucgccaacggcgugcugcagaccuucaugcggauggcguggggcggguccuacaucgcccuggacagcggcugcgggaacugggacugcaucaugacguccuaccaguaccucaucauccagaacaccaccugggaggaccacugccaguucagccgccccucccccaucggcuaccuggggcugcucagccagcggacccgcgacaucuacaucagccggcgccugcugggcacguucaccuggacccucuccgacagcgagggcaacgagacccccgggggcuacugccugacgcgguggaugcugaucgaggccgagcucaagugcuucgggaacaccgccguggccaagugcaacgagaagcacgacgaggaguucugcgacaugcugcgccuguucgacuucaacaagcaggcgauccagcggcucaaguccgaggcccagaugagcauccagcugaucaacaaggccgucaacgcccugaucaacgaccagcucaucaugaagaaccaccuccgcgacaugaugugcauccccuacugcaacuacuccaaguacugguaccugaaccacaccagcuccggccggaccagccugcccaagugcuggcugguguccaacgggagcuaccugaacgagacgcacuucuccgacgacaucgagcagcaggccgacaacaugaucaccgagaugcuccagaaggaguacaucgaccgccagggcaagaccccgcugggccugguggaccuguucgucuucagcaccuccuucuaccucaucagcaucuuccugcaccugaucaagaucccgacgcaccggcacaucguggggaagcccugccccaagccccaccgccucaaccacaugggcaucugcuccugcgggcuguacaagcagccgggcgugcccacccgguggaagcgcugaggacuaguuauaagacugacuagcccgaugggccucccaacgggcccuccuccccuccuugcaccgagauuaauaaaaaaaaaaaaaaaaaaaaaaaaaaaaaaaaaaaaaaaaaaaaaaaaaaaaaaaaaaaaaaaaaaaaaaaaaaaaaaaaaaaaaaaaaaaaaaaaaaaa

SEQ ID NO: 36427 - RNA, 1662 nt, Artificial Sequence
  mRNA product Design i-3 (A100) comprising derived and/or modified sequence from LASV(KAK-428;Clade n.d. (VII))__ANH09740__GPCmut9 (opt1)
aggagaaagcuuaccaugggccagaucgugaccuucuuccaggaggucccccacgugaucgaggaggugaugaacaucguccugaucgcccucagccugcuggccauccucaaggggcuguacaacuucgcgaccugcggcgugaucgggcugaucacguuccuccugcugugcggccgcuccugcagcgccaccuacaaggggcaguacgagcuccagacccuggagcugaacauggagucccucaacaugaccaugccgcugagcugcacgaagaacaacucccaccacuacauccgggccggcaacaacaccggccuggagcucacccugaccaacacgagcaucaucucccacaaguucugcaaccugagcgacgcccacaagaagaaccucuacgaccacacccugauguccaucaucaccaccuuccaccugagcauccccaacuucaaccaguacgaggccauguccugcgacuucaacgggggcaagaucagcauccaguacaaccucucccacagcuacgcgggggacgccgcccagcacugcggcacgguggccaacgggguccugcagaccuucaugcgcauggcguggggcggcuccuaccuggcccucgacagcgggugccggggcugggacugcaucaucuccagcuaccaguaccugaucauccagaacaccaccugggacgaccacugccaguucucccgccccagccccaucggguaccugggcuucgugagccagaagacgcgggacaucuacaucucccgccggcuccugggcaccuucaccuggacccugagcgacuccgaggggcacgacaugccgggcggguacugccucacgcgcuggaugcugaucgaggccgaccugaagugcuucggcaacaccgccguggccaagugcaacgagaagcacgacgaggaguucugcgacauguggcggcuguucgacuucaacaagcaggcgauccagcgccugaaggccgaggcccagaugaacauccagcugaucaacaaggccgucaacgcccucaucaacgaccagcugaugaugaagaaccaccuccgggacaucaugugcauccccuacugcaacuacagcaaguucugguaccucaacaacaccaccacggggcgcaccucccugccccggugcuggcugaucagcaacggcuccuaccucaacgagacccacuucagcgacgacaucgagcagcaggcggacaacaugaucaccgagaugcugcagaaggaguacauggaccgccagggcaagacgccccuggggcucguggaccuguucguguucuccaccagcuucuaccugaucaccaucuuccugcaccucgucaagaucccgacccaccggcacaucgugggcaagcccugccccaagccccaccgccugaaccacauggggaucugcuccugcggccuguacaagcagccgggggugcccguccgguggaagcgcugaggacuaguuauaagacugacuagcccgaugggccucccaacgggcccuccuccccuccuugcaccgagauuaauaaaaaaaaaaaaaaaaaaaaaaaaaaaaaaaaaaaaaaaaaaaaaaaaaaaaaaaaaaaaaaaaaaaaaaaaaaaaaaaaaaaaaaaaaaaaaaaaaaaa

SEQ ID NO: 36428 - RNA, 1662 nt, Artificial Sequence; identical to SEQ ID NO: 36422
  mRNA product Design i-3 (A100) comprising derived and/or modified sequence from LASV(Pinneo-NIG-1969;Clade I)__AIT17836__GPCmut9 (opt1)

SEQ ID NO: 36429 - RNA, 1662 nt, Artificial Sequence
  mRNA product Design i-3 (A100) comprising derived and/or modified sequence from LASV(ISTH0009-NIG-2011;Clade II)__AIT17404__GPCmut9 (opt1)
aggagaaagcuuaccaugggccagaucaucaccuucuuccaggaggugccccacgucaucgaggaggugaugaacaucgugcugaucgcccucagccugcuggccauccucaaggggaucuacaacgucgcgaccugcggccuguucgggcugguguccuuccuccugcugugcggccgcagcugcuccacgaccuacaaggggguguacgagcuccagacccuggagcuggacauggccagccucaacaugaccaugccgcuguccugcacgaagaacaacagccaccacuacaucauggucggcaacgagaccggccuggagcucacccugaccaacacguccaucaucaaccacaaguucugcaaccugagcgacgcccacaagaagaaccucuacgaccacgcccugauguccaucaucagcaccuuccaccuguccauccccaacuucaaccaguacgaggccaugagcugcgacuucaacgggggcaagaucuccgugcaguacaaccucagccacgcguacgccguggacgccgccaaccacugcgggaccaucgcgaacggcguccugcagaccuucaugcggauggccuggggcggguccuacaucgcccuggacagcggcugcggguccugggacugcaucaugacgagcuaccaguaccucaucauccagaacaccaccugggaggaccacugccaguucucccgccccagccccaucggcuaccuggggcugcucagccagcggacccgcgacaucuacaucucccggcgccugcugggcacguucaccuggacccucagcgacuccgagggcaacgagacccccgggggcuacugccugacgcgguggaugcugaucgaggccgagcucaagugcuucgggaacaccgccguggcgaagugcaacgagaagcacgacgaggaguucugcgacaugcugcgccuguucgacuucaacaagcaggccauccggcgccucaagaccgaggcccagaugagcauccagcugaucaacaaggccgugaacgcccugaucaacgaccagcucaucaugaagaaccaccuccgggacaucaugugcaucccguacugcaacuacuccaaguacugguaccugaaccacaccgucacgggcaagaccagccugccccgcugcuggcugguguccaacgggagcuaccugaacgagacccacuucuccgacgacaucgagcagcaggcggacaacaugaucaccgagcuccugcagaaggaguacauggaccggcagggcaagacgccccugggccugguggaccucuucgucuucagcaccuccuucuaccugaucagcaucuuccugcaccucaucaagaucccgacccaccgccacaucaccgggaagcccugccccaagccccaccggcugaaccacaugggcaucugcuccugcgggcuguacaagcacccgggcgugcccgugaaguggaagcgcugaggacuaguuauaagacugacuagcccgaugggccucccaacgggcccuccuccccuccuugcaccgagauuaauaaaaaaaaaaaaaaaaaaaaaaaaaaaaaaaaaaaaaaaaaaaaaaaaaaaaaaaaaaaaaaaaaaaaaaaaaaaaaaaaaaaaaaaaaaaaaaaaaaaa

SEQ ID NO: 36430 - RNA, 1662 nt, Artificial Sequence
  mRNA product Design i-3 (A100) comprising derived and/or modified sequence from LASV(ISTH2010-NIG-2012;Clade II)__AIT17482__GPCmut9 (opt1)
aggagaaagcuuaccaugggccagaucaucaccuucuuccaggaggugccccacgucaucgaggaggugaugaacaucgugcugaucgcccucagccugcuggccauccucaaggggaucuacaacgucgcgaccugcggccuguucgggcugguguccuuccuccugcugugcggccgcagcugcuccacgaccuacaaggggguguacgagcuccagacccuggagcuggacauggccagccucaacaugaccaugccgcuguccugcacgaagaacaacagccaccacuacaucauggucggcaacgagaccggccuggagcucacccugaccaacacguccaucaucaaccacaaguucugcaaccugagcgacgcccacaagaagaaccucuacgaccacgcccugauguccaucaucagcaccuuccaccuguccauccccaacuucaaccaguacgaggccaugagcugcgacuucaacgggggcaagaucuccgugcaguacaaccucagccacgcguacgccguggacgccgccaaccacugcgggaccaucgcgaacggcguccugcagaccuucaugcggauggccuggggcggguccuacaucgcccuggacagcggcugcggguccugggacugcaucaugacgagcuaccaguaccucaucauccagaacaucaccugggaggaccacugccaguucucccgccccagccccaucggcuaccuggggcugcucagccagcggacccgcgacaucuacaucucccggcgccugcugggcaccuucacguggacccucagcgacuccgagggcaacgagacccccgggggcuacugccugacccgguggaugcugaucgaggccgagcucaagugcuucgggaacacggccguggcgaagugcaacgagaagcacgacgaggaguucugcgacaugcugcgccuguucgacuucaacaagcaggccauccggcgccucaagaccgaggcccagaugagcauccagcugaucaacaaggccgugaacgcccugaucaacgaccagcucaucaugaagaaccaccuccgggacaucaugugcauccccuacugcaacuacuccaaguacugguaccugaaccacaccgucaccggcaagacgagccugccccgcugcuggcugguguccaacgggagcuaccugaacgagacccacuucuccgacgacaucgagcagcaggcggacaacaugaucaccgagcuccugcagaaggaguacaucgaccggcagggcaagaccccgcugggccugguggaccucuucgucuucagcacguccuucuaccugaucagcaucuuccugcaccucgugaagaucccgacccaccgccacguggucgggaagcccugccccaagccccaccggcugaaccacaugggcaucugcuccugcgggcuguacaagcacccgggcgugcccgugaaguggaagcgcugaggacuaguuauaagacugacuagcccgaugggccucccaacgggcccuccuccccuccuugcaccgagauuaauaaaaaaaaaaaaaaaaaaaaaaaaaaaaaaaaaaaaaaaaaaaaaaaaaaaaaaaaaaaaaaaaaaaaaaaaaaaaaaaaaaaaaaaaaaaaaaaaaaaa

SEQ ID NO: 36431 - RNA, 1662 nt, Artificial Sequence
  mRNA product Design i-3 (A100) comprising derived and/or modified sequence from LASV(Lassa virus/H.sapiens-wt/NGA/2015/ISTH_0543;Clade II)__AVO03639__GPCmut9 (opt1)
aggagaaagcuuaccaugggccagaucaucaccuucuuccaggaggugccccacgucaucgaggaggugaugaacaucgugcugaucgcccucagccugcuggccauccucaaggggaucuacaacgucgcgaccugcggccuguucgggcugguguccuuccuccugcugugcggccgcagcugcuccacgaccuacaaggggguguacgagcuccagacccuggagcuggacauggccaaccucaacaugaccaugccgcugagcugcacgaagaacaacucccaccacuacaucauggucggcaacgagaccggccuggagcucacccugaccaacacgagcaucaucaaccacaaguucugcaaccuguccgacgcccacaagaagaaccucuacgaccacgcccugaugagcaucaucuccaccuuccaccugagcauccccaacuucaaccaguacgaggccauguccugcgacuucaacgggggcaagaucagcgugcaguacaaccucucccacaccuacgcgguggacgccgccaaccacugcgggaccaucgccaacggcguccugcagacguucaugcggauggcguggggcgggagcuacaucgcccuggacuccggcugcgggagcugggacugcaucaugaccuccuaccaguaccucgugauccagaacaccaccugggaggaccacugccaguucagccgccccucccccaucggcuaccuggggcugcucagccagcggacgcgcgacaucuacaucagccggcgccugcugggcaccuucaccuggacccucuccgacagcgagggcaacgagacgcccgggggcuacugccugacccgguggaugcugaucgaggccgagcucaagugcuucgggaacaccgccguggccaagugcaacgagaagcacgacgaggaguucugcgacaugcugcgccuguucgacuucaacaagcaggcgauccggcgccucaagaccgaggcccagauguccauccagcugaucaacaaggccgucaacgcccugaucaacgaccagcucaucaugaagaaccaccuccgggacaucaugugcauccccuacugcaacuacagcaaguacugguaccugaaccacacggugaccggcaagaccucccugccccgcugcuggcuggugagcaacggguccuaccugaacgagacccacuucagcgacgacaucgagcagcaggccgacaacaugaucacggagcuccugcagaaggaguacaucgaccggcagggcaagaccccgcugggccuggucgaccucuucguguucuccaccagcuucuaccugaucuccaucuuccugcaccucgugaagaucccgacccaccgccacaucacggggaagcccugccccaagccccaccggcugaaccacaugggcaucugcagcugcgggcuguacaagcacccgggcguccccgugaaguggaagcgcugaggacuaguuauaagacugacuagcccgaugggccucccaacgggcccuccuccccuccuugcaccgagauuaauaaaaaaaaaaaaaaaaaaaaaaaaaaaaaaaaaaaaaaaaaaaaaaaaaaaaaaaaaaaaaaaaaaaaaaaaaaaaaaaaaaaaaaaaaaaaaaaaaaaa

SEQ ID NO: 36432 - RNA, 1662 nt, Artificial Sequence
  mRNA product Design i-3 (A100) comprising derived and/or modified sequence from LASV(Lassa virus/H.sapiens-wt/NGA/2016/ISTH_0009;Clade II)__AVO03571__GPCmut9 (opt1)
aggagaaagcuuaccaugggccagaucaucaccuucuuccaggaggugccccacgucaucgaggaggugaugaacaucgugcugaucgcccucagccugcuggccauccucaaggggaucuacaacgucgcgaccugcggccugcuggggcucguguccuuccugcugcucugcggccgcagcugcuccacgaccuacaaggggguguacgagcugcagacccuggagcucgacauggccagccugaacaugaccaugccgcuguccugcacgaagaacaacagccaccacuacaucauggucggcaacgagaccggccucgagcugacccugaccaacacguccaucaucaaccacaaguucugcaaccucagcgacgcccacaagaagaaccuguacgaccacgcccugauguccaucaucagcaccuuccaccucuccauccccaacuucaaccaguacgaggccaugagcugcgacuucaacgggggccggaucuccgugcaguacaaccugagccacuccuacgcgguggacgccgccaaccacugcgggaccaucgccaacggcguccugcagaccuucaugcgcauggcguggggcgggagcuacaucgcccucgacuccggcugcgggagcugggacugcaucaugacguccuaccaguaccugaucauccagaacaccaccugggaggaccacugccaguucagccggcccagccccaucggcuaccuggggcuccugucccagcgcacccgggacaucuacaucagccgccggcugcucggcacguucaccuggacccuguccgacagcgagggcaacgagacccccgggggcuacugccugacgcgcuggaugcucaucgaggccgagcugaagugcuucgggaacaccgccguggccaagugcaacgagaagcacgacgaggaguucugcgacaugcugcggcuguucgacuucaacaagcaggcgauccgccggcugaagaccgaggcccagauguccauccagcugaucaacaaggccgugaacgcccucaucaacgaccagcugaucaugaagaaccaccuccgcgacaucaugugcaucccguacugcaacuacagcaaguacugguaccucaaccacaccgucacgggcaagaccucccugccccggugcuggcuggugagcaacggguccuaccucaacgagacccacuucagcgacgacaucgagcagcaggccgacaacaugaucaccgagcugcugcagaaggaguacaucgaccgccagggcaagacgccccugggccucguggaccuguucgucuucuccaccagcuucuaccugaucuccaucuuccuccaccuggugaagaucccgacccaccggcacaucaccgggaagcccugccccaagccccaccgccugaaccacaugggcaucugcagcugcgggcucuacaaccacccgggcgugcccgucaaguggaagcggugaggacuaguuauaagacugacuagcccgaugggccucccaacgggcccuccuccccuccuugcaccgagauuaauaaaaaaaaaaaaaaaaaaaaaaaaaaaaaaaaaaaaaaaaaaaaaaaaaaaaaaaaaaaaaaaaaaaaaaaaaaaaaaaaaaaaaaaaaaaaaaaaaaaa

SEQ ID NO: 36433 - RNA, 1662 nt, Artificial Sequence
  mRNA product Design i-3 (A100) comprising derived and/or modified sequence from LASV(Lassa virus/H.sapiens-wt/NGA/2016/ISTH_0017;Clade II)__AVO03567__GPCmut9 (opt1)
aggagaaagcuuaccaugggccagaucaucaccuucuuccaggaggugccccacgucaucgaggaggugaugaacaucgugcugaucgcccucagccugcuggccauccucaaggggaucuacaacgucgcgaccugcggccuguucgggcugguguccuuccuccugcugugcggccgcagcugcuccacgaccuacaaggggguguacgagcuccagacccuggagcuggacauggccagccucaacaugaccaugccgcuguccugcacgaagaacaacagccaccacuacaucauggucggcaacgagaccggccuggagcucacccugaccaacacguccaucaucaaccacaaguucugcaaccugagcgacgcccacaagaagaaccucuacgaccacgcccugauguccaucaucagcaccuuccaccuguccauccccaacuucaaccaguacgaggccaugagcugcgacuucaacgggggcaagaucuccgugcaguacaaccucagccacaccuacgcgaucgacgccgccaaccacugcgggaccaucgccaacggcgugcugcagacguucaugcggauggcguggggcggguccuacaucgcccuggacagcggcugcggguccugggacugcaucaugaccagcuaccaguaccucaucauccagaacaccaccugggaggaccacugccaguucucccgccccagccccaucggcuaccuggggcugcucagccagcggacgcgcgacaucuacaucucccggcgccugcugggcaccuucaccuggacccucagcgacuccgagggcaacgagacgcccgggggcuacugccugacccgguggaugcugaucgaggccgagcucaagugcuucgggaacaccgccgucgccaagugcaacgagaagcacgacgaggaguucugcgacaugcugcgccuguucgacuucaacaagcaggcgauccggcgccucaagaccgaggcccagaugagcauccagcugaucaacaaggccgugaacgcccugaucaacgaccagcucaucaugaagaaccaccuccgggacaucaugugcauccccuacugcaacuacuccaaguacugguaccugaaccacacggugaccggcaagaccagccugccccgcugcuggcuggucuccaacgggagcuaccugaacgagacccacuucuccgacgacaucgagcagcaggccgacaacaugaucacggagcuccugcagaaggaguacauggaccggcagggcaagaccccgcugggccugguggaccucuucguguucagcaccuccuucuaccugaucagcaucuuccugcaccucguccgcaucccgacccaccggcacgugaucgggaagcccugccccaagccccaccgccugaaccacaugggcaucugcuccugcgggcuguacaagcacccgggcgugcccgucaaguggaagcggugaggacuaguuauaagacugacuagcccgaugggccucccaacgggcccuccuccccuccuugcaccgagauuaauaaaaaaaaaaaaaaaaaaaaaaaaaaaaaaaaaaaaaaaaaaaaaaaaaaaaaaaaaaaaaaaaaaaaaaaaaaaaaaaaaaaaaaaaaaaaaaaaaaaa

SEQ ID NO: 36434 - RNA, 1662 nt, Artificial Sequence
  mRNA product Design i-3 (A100) comprising derived and/or modified sequence from LASV(Lassa virus/H.sapiens-wt/NGA/2018/ISTH_0959;Clade II)__AVV65099__GPCmut9 (opt1)
aggagaaagcuuaccaugggccagaucaucaccuucuuccaggaggugccccacgucaucgaggaggugaugaacaucgugcugaucgcccucagccugcuggccauccucaaggggaucuacaacgucgugaccugcggccuguucgggcugguguccuuccuccugcugugcggccgcagcugcuccacgaccuacaagggggucuacgagcuccagacccuggagcuggacauggcgagccucaacaugaccaugccgcuguccugcacgaagaacaacagccaccacuacaucauggugggcaacgagaccggccuggagcucacccugaccaacacguccaucaucaaccacaaguucugcaaccugagcgacgcccacaagaagaaccucuacgaccacgcccugauguccaucaucagcaccuuccaccuguccauccccaacuucaaccaguacgaggccaugagcugcgacuucaacgggggcaagaucuccgugcaguacaaccucagccacgccuacgcgaucgacgccgccaaccacugcgggaccaucgccaacggcguccugcagaccuucaugcggauggcguggggcggguccuacaucgcccuggacagcggcugcggguccugggacugcaucaugacgagcuaccaguaccucaucauccagaacaccaccugggaggaccacugccaguucucccgccccagccccaucggcuaccuggggcugcucagccagcggacccgcgacaucuacaucucccggcgccugcugggcacguucaccuggacccucagcgacuccgagggcaacgagacccccgggggcuacugccugacgcgguggaugcugaucgaggccgagcucaagugcuucgggaacaccgccguggccaagugcaacgagaagcacgacgaggaguucugcgacaugcugcgccuguucgacuucaacaagcaggcgauccggcgccucaagaccgaggcccagaugagcauccagcugaucaacaaggccgugaacgcccugaucaacgaccagcucaucaugaagaaccaccuccgggacaucaugugcaucccguacugcaacuacuccaaguacugguaccugaaccacaccgucacgggcaagaccagccugccccgcugcuggcugguguccaacgggagcuaccugaacgagacccacuucuccgacgacaucgagcagcaggccgacaacaugaucaccgagcuccugcagaaggaguacaucgaccggcagggcaagacgccccugggccugguggaccucuucgucuucagcaccuccuucuaccugaucagcaucuuccugcaccucgugaagaucccgacccaccgccacgugaucgggaagcccugccccaagccccaccggcugaaccacaugggcaucugcuccugcgggcuguacaagcacccgggcguccccgugaaguggaagcgcugaggacuaguuauaagacugacuagcccgaugggccucccaacgggcccuccuccccuccuugcaccgagauuaauaaaaaaaaaaaaaaaaaaaaaaaaaaaaaaaaaaaaaaaaaaaaaaaaaaaaaaaaaaaaaaaaaaaaaaaaaaaaaaaaaaaaaaaaaaaaaaaaaaaa

SEQ ID NO: 36435 - RNA, 1662 nt, Artificial Sequence
  mRNA product Design i-3 (A100) comprising derived and/or modified sequence from LASV(LASV003-NIG-2008;Clade II)__AIT17580__GPCmut9 (opt1)
aggagaaagcuuaccaugggccagaucaucaccuucuuccaggaggugccccacgucaucgaggaggugaugaacaucgugcugaucgcccucagccugcuggccauccucaaggggaucuacaacgucgcgaccugcggccuguucgggcugguguccuuccuccugcugugcggccgcagcugcuccacgaccuacaaggggguguacgagcuccagacccuggagcuggacauggccagccucaacaugaccaugccgcuguccugcacgaagaacaacagccaccacuacaucauggucggcaacgagaccggccuggagcucacccugaccaacacguccaucaucaaccacaaguucugcaaccugagcgacgcccacaagaagaaccucuacgaccacgcccugauguccaucaucagcaccuuccaccuguccauccccaacuucaaccaguacgaggccaugagcugcgacuucaacgggggcaagaucuccgugcaguacaaccucagccacaccuacgcgguggacgccgccaaccacugcgggaccaucgccaacggcguccugcagacguucaugcggauggcguggggcggguccuacaucgcccuggacagcggcugcggguccugggacugcaucaugaccagcuaccaguaccucaucauccagaacaccaccugggaggaccacugccaguucucccgccccagccccaucggcuaccuggggcugcucagccagcggacgcgcgacaucuacaucucccggcgccugcugggcaccuucaccuggacccucagcgacuccgagagcaacgagacgccgggcggguacugccugacccgguggaugcugaucgaggccgagcucaagugcuucggcaacaccgccguggccaagugcaacgagaagcacgacgaggaguucugcgacaugcugcgccuguucgacuucaacaagcaggcgauccggcgccucaaggccgaggcccagauguccauccagcugaucaacaaggccgugaacgcccugaucaacgaccagcucaucaugaagaaccaccuccgggacaucaugugcauccccuacugcaacuacagcaaguacugguaccugaaccacaccgucacggggcgcaccucccugccccggugcuggcuggugagcaacggcuccuaccugaacgagacccacuucagcgacgacaucgagcagcaggcggacaacaugaucaccgagcuccugcagaaggaguacauggaccgccaggggaagacgccccugggccugguggaccucuucgucuucuccaccagcuucuaccugaucuccaucuuccugcaccucgugaagaucccgacccaccggcacgugaucggcaagcccugccccaagccccaccgccugaaccacauggggaucugcagcugcggccuguacaagcacccggggguccccgugaaguggaagcggugaggacuaguuauaagacugacuagcccgaugggccucccaacgggcccuccuccccuccuugcaccgagauuaauaaaaaaaaaaaaaaaaaaaaaaaaaaaaaaaaaaaaaaaaaaaaaaaaaaaaaaaaaaaaaaaaaaaaaaaaaaaaaaaaaaaaaaaaaaaaaaaaaaaa

SEQ ID NO: 36436 - RNA, 1662 nt, Artificial Sequence
  mRNA product Design i-3 (A100) comprising derived and/or modified sequence from LASV(LASV035-NIG-2009;Clade II)__AIT17588__GPCmut9 (opt1)
aggagaaagcuuaccaugggccagaucaucaccuucuuccaggaggugccccacgucaucgaggaggugaugaacaucgugcugaucgcccucagccugcuggccauccucaaggggaucuacaacgucgcgaccugcggccuguucgggcugguguccuuccuccugcugugcggccgcagcugcuccacgaccuacaaggggguguacgagcuccagacccuggagcuggacauggccagccucaacaugaccaugccgcuguccugcacgaagaacaacagccaccacuacaucauggucggcaacgagaccggccuggagcucacccugaccaacacguccaucaucaaccacaaguucugcaaccugagcgacgcccacaagaagaaccucuacgaccacgcccugauguccaucaucagcaccuuccaccuguccauccccaacuucaaccaguacgaggccaugagcugcgacuucaacgggggcaagaucuccgugcaguacaaccucagccacgcguacgccguggacgccgccaaccacugcgggaccaucgcgaacggcguccugcagaccuucaugcggauggccuggggcggguccuacaucgcccuggacagcggcugcggguccugggacugcaucaugacgagcuaccaguaccucaucauccagaacaccaccugggaggaccacugccaguucucccgccccagccccaucggcuaccuggggcugcucagccagcggacccgcgacaucuacaucucccggcgccugcugggcacguucaccuggacccucagcgacuccgagggcaacgagacccccgggggcuacugccugacgcgguggaugcugaucgaggccgagcucaagugcuucgggaacaccgccguggcgaagugcaacgagaagcacgacgaggaguucugcgacaugcugcgccuguucgacuucaacaagcaggccauccggcgccucaaggccgaggcccagaugagcauccagcugaucaacaaggccgugaacgcgcugaucaacgaccagcucaucaugaagaaccaccuccgggacaucaugugcauccccuacugcaacuacuccaaguacugguaccugaaccacaccgucaccggcaagacgagccugccccgcugcuggcugguguccaacgggagcuaccugaacgagacccacuucuccgacgacaucgagcagcaggccgacaacaugaucaccgagcuccugcagaaggaguacaucgaccggcagggcaagaccccgcugggccugguggaccucuucgucuucagcacguccuucuaccugaucagcaucuuccugcaccucgugaagaucccgacccaccgccacgugaucgggaagcccugccccaagccccaccggcugaaccacaugggcaucugcuccugcgggcuguacaagcacccgggcguccccgugaaguggaagcgcugaggacuaguuauaagacugacuagcccgaugggccucccaacgggcccuccuccccuccuugcaccgagauuaauaaaaaaaaaaaaaaaaaaaaaaaaaaaaaaaaaaaaaaaaaaaaaaaaaaaaaaaaaaaaaaaaaaaaaaaaaaaaaaaaaaaaaaaaaaaaaaaaaaaa

SEQ ID NO: 36437 - RNA, 1662 nt, Artificial Sequence
  mRNA product Design i-3 (A100) comprising derived and/or modified sequence from LASV(LASV1000-NIG-2009;Clade II)__AIT17782__GPCmut9 (opt1)
aggagaaagcuuaccaugggccagaucaucaccuucuuccaggaggugccccacgucaucgaggaggugaugaacaucgugcugaucgcccucagccugcuggccauccucaaggggaucuacaacgucgcgaccugcggccuguucgggcugguguccuuccuccugcugugcggccgcagcugcuccacgaccuacaaggggguguacgagcuccagacccuggagcuggacauggccagccucaacaugaccaugccgcuguccugcacgaagaacaacagccaccacuacaucauggucggcaacgagaccggccuggagcucacccugaccaacacguccaucaucaaccacaaguucugcaaccugagcgacgcccacaagaagaaccucuacgaccacgcccugauguccaucaucagcaccuuccaccuguccauccccaacuucaaccaguacgaggccaugagcugcgacuucaacgggggcaagaucuccgugcaguacaaccucagccacaccuacgcgguggacgccgccaaccacugcgggaccaucgccaacggcguccugcagacguucaugcggauggcguggggcggguccuacaucgcccuggacagcggcugcggguccugggacugcaucaugaccagcuaccaguaccucaucauccagaacaccaccugggaggaccacugccaguucucccgccccagccccaucggcuaccuggggcugcucagccagcggacgcgcgacaucuacaucucccggcgccugcugggcaccuucaccuggacccucagcgacuccgagggcaacgagacgcccgggggcuacugccugacccgguggaugcugaucgaggccgagcucaagugcuucgggaacaccgccguggccaagugcaacgagaagcacgacgaggaguucugcgacaugcugcgccuguucgacuucaacaagcaggcgaucaagcggcucaagaccgaggcccagaugagcauccagcugaucaacaaggccgugaacgcccugaucaacgaccagcucaucaugaagaaccaccuccgcgacaucaugugcauccccuacugcaacuacuccaaguacugguaccugaaccacacggucaccggcaagaccagccugccccggugcuggcugguguccaacgggagcuaccugaacgagacccacuucuccgacgacaucgagcagcaggccgacaacaugaucacggagcuccugcagaaggaguacaucgaccgccagggcaagaccccgcugggccugguggaccucuucgucuucagcaccuccuucuaccugaucagcaucuuccugcaccucgugaagaucccgacccaccggcacguggucgggaagcccugccccaagccccaccgccugaaccacaugggcaucugcuccugcgggcuguacaagcacccgggcgugcccgugaaguggaagcggugaggacuaguuauaagacugacuagcccgaugggccucccaacgggcccuccuccccuccuugcaccgagauuaauaaaaaaaaaaaaaaaaaaaaaaaaaaaaaaaaaaaaaaaaaaaaaaaaaaaaaaaaaaaaaaaaaaaaaaaaaaaaaaaaaaaaaaaaaaaaaaaaaaaa

SEQ ID NO: 36438 - RNA, 1662 nt, Artificial Sequence
  mRNA product Design i-3 (A100) comprising derived and/or modified sequence from LASV(LASV221-NIG-2010;Clade II)__AIT17624__GPCmut9 (opt1)
aggagaaagcuuaccaugggccagaucaucaccuucuuccaggaggugccccacgucaucgaggaggugaugaacaucgugcugaucgcccucagccugcuggccauccucaaggggaucuacaacgucgcgaccugcggccuguucgggcugguguccuuccuccugcugugcggccgcagcugcuccacgaccuacaaggggguguacgagcuccagacccuggagcuggacauggccagccucaacaugaccaugccgcuguccugcacgaagaacaacagccaccacuacaucauggucggcaacgagaccggccuggagcucacccugaccaacacguccaucaucaaccacaaguucugcaaccugagcgacgcccacaagaagaaccucuacgaccacgcccugauguccaucaucagcaccuuccaccuguccauccccaacuucaaccaguacgaggccaugagcugcgacuucaacgggggcaagaucuccgugcaguacaaccucagccacaccuacgcgaucgacgccgccaaccacugcgggaccaucgccaacggcgugcugcagacguucaugcggauggcguggggcggguccuacaucgcccuggacagcggcugcggguccugggacugcaucaugaccagcuaccaguaccucaucauccagaacaccaccugggaggaccacugccaguucucccgccccagccccaucggcuaccuggggcugcucagccagcggacgcgcgacaucuacaucucccggcgccugcugggcaccuucaccuggacccucagcgacuccgagggcaacgagacgcccgggggcuacugccugacccgguggaugcugaucgaggccgagcucaagugcuucgggaacaccgccgucgccaagugcaacgagaagcacgacgaggaguucugcgacaugcugcgccuguucgacuucaacaagcaggcgauccggcgccucaagaccgaggcccagaugagcauccagcugaucaacaaggccgugaacgcccugaucaacgaccagcucaucaugaagaaccaccuccgggacaucaugugcauccccuacugcaacuacuccaaguacugguaccugaaccacacggugaccggcaagaccagccugccccgcugcuggcuggucuccaacgggagcuaccugaacgagacccacuucuccgacgacaucgagcagcaggccgacaacaugaucacggagaugcuccagaaggaguacauggaccggcagggcaagaccccgcugggccugguggaccuguucguguucagcaccuccuucuaccucaucagcaucuuccugcaccuggucaagaucccgacccaccgccacgugaucgggaagcccugccccaagccccaccggcucaaccacaugggcaucugcuccugcgggcuguacaagcacccgggcgugcccgucaaguggaagcgcugaggacuaguuauaagacugacuagcccgaugggccucccaacgggcccuccuccccuccuugcaccgagauuaauaaaaaaaaaaaaaaaaaaaaaaaaaaaaaaaaaaaaaaaaaaaaaaaaaaaaaaaaaaaaaaaaaaaaaaaaaaaaaaaaaaaaaaaaaaaaaaaaaaaa

SEQ ID NO: 36439 - RNA, 1662 nt, Artificial Sequence
  mRNA product Design i-3 (A100) comprising derived and/or modified sequence from LASV(LASV237-NIG-2010;Clade II)__AIT17638__GPCmut9 (opt1)
aggagaaagcuuaccaugggccagaucaucaccuucuuccaggaggugccccacgucaucgaggaggugaugaacaucgugcugaucgcccucagccugcuggccauccucaaggggaucuacaacgucgcgaccugcggccuguucgggcugguguccuuccuccugcugugcggccgcagcugcuccacgaccuacaaggggguguacgagcuccagacccuggagcuggacauggccagccucaacaugaccaugccgcuguccugcacgaagaacaacagccaccacuacaucauggucggcaacgagaccggccuggagcucacccugaccaacacguccaucaucaaccacaaguucugcaaccugagcgacgcccacaagaaggaccucuacgaccacgcccugauguccaucaucagcaccuuccaccuguccauccccaacuucaaccaguacgaggccaugagcugcgacuucaacgggggcaagaucuccgugcaguacaaccucagccacaccuacgcgguggacgccgccaaccacugcgggaccaucgccaacggcguccugcagacguucaugcggauggcguggggcggguccuacaucgcccuggacagcggcugcggguccugggacugcaucaugaccagcuaccaguaccucaucauccagaacaccaccugggaggaccacugccaguucucccgccccagccccaucggcuaccuggggcugcucagccagcggacgcgcgacaucuacaucucccggcgccugcugggcaccuucaccuggacccucagcgacuccgagggcaacgagacgcccgggggcuacugccugacccgguggaugcugaucgaggccgagcucaagugcuucgggaacaccgccguggccaagugcaacgagaagcacgacgaggaguucugcgacaugcugcgccuguucgacuucaacaagcaggcgauccggcgccucaagaccgaggcccagaugagcauccagcugaucaacaaggccgugaacgcccugaucaacgaccagcucaucaugaagaaccaccuccgggacaucaugugcauccccuacugcaacuacuccaaguacugguaccugaaccacacggucaccggcaagaccagccugccccgcugcuggcugguguccaacgggagcuaccugaacgagacccacuucuccgacgacaucgagcagcaggccgacaacaugaucacggagcuccugcagaaggaguacauggaccggcagggcaagaccccgcugggccugguggaccucuucgucuucagcaccuccuucuaccugaucagcaucuuccugcaccucaucaagaucccgacccaccgccacaucacggggaagcccugccccaagccccaccggcugaaccacaugggcaucugcuccugcgggcuguacaagcacccgggcgugcccgugaaguggaagcgcugaggacuaguuauaagacugacuagcccgaugggccucccaacgggcccuccuccccuccuugcaccgagauuaauaaaaaaaaaaaaaaaaaaaaaaaaaaaaaaaaaaaaaaaaaaaaaaaaaaaaaaaaaaaaaaaaaaaaaaaaaaaaaaaaaaaaaaaaaaaaaaaaaaaa

SEQ ID NO: 36440 - RNA, 1662 nt, Artificial Sequence
  mRNA product Design i-3 (A100) comprising derived and/or modified sequence from LASV(LASV253-NIG-2011;Clade II)__AIT17670__GPCmut9 (opt1)
aggagaaagcuuaccaugggccagaucaucaccuucuuccaggaggugccccacgucaucgaggaggugaugaacaucgugcugaucgcccucagccugcuggccauccucaaggggaucuacaacgucgcgaccugcggccuguucgggcugguguccuuccuccugcugugcggccgcagcugcuccacgaccuacaaggggguguacgagcuccagacccuggagcuggacauggccagccucaacaugaccaugccgcuguccugcacgaagaacaacagccaccacuacaucauggucggcaacgagaccggccuggagcucacccugaccaacacguccaucaucaaccacaaguucugcaaccugagcgacgcccacaagaagaaccucuacgaccacgcccugauguccaucaucagcaccuuccaccuguccauccccaacuucaaccaguacgaggccaugagcugcgacuucaacgggggcaagaucuccgugcaguacaaccucagccacaccuacgcgguggacgccgccaaccacugcgggaccaucgccaacggcguccugcagacguucaugcggauggcguggggcggguccuacaucgcccuggacagcggcugcggguccugggacugcaucaugaccagcuaccaguaccucaucauccagaacaccaccugggaggaccacugccaguucucccgccccagccccaucggcuaccuggggcugcucagccagcggacgcgcgacaucuacaucucccggcgccugcugggcaccuucaccuggacccucagcgacuccgagggcaacgagacgcccgggggcuacugccugacccgguggaugcugaucgaggccgagcucaagugcuucgggaacaccgccguggccaagugcaacgagaagcacgacgaggaguucugcgacaugcugcgccuguucgacuucaacaagcaggcgauccggcgccucaaggccgaggcccagaugagcauccagcugaucaacaaggccgugaacgcccugaucaacgaccagcucaucaugaagaaccaccuccgggacaucaugugcaucccguacugcaacuacuccaaguacugguaccugaaccacaccgucacgggccgcaccagccugccccggugcuggcugguguccaacgggagcuaccugaacgagacccacuucuccgacgacaucgagcagcaggcggacaacaugaucaccgagcuccugcagaaggaguacaucgaccgccagggcaagacgccccugggccugguggaccucuucgucuucagcaccuccuucuaccugaucagcaucuuccugcaccucgugaagaucccgacccaccggcacaucaucgggaagcccugccccaagccccaccgccugaaccacaugggcaucugcuccugcgggcuguacaagcacccgggcgugcccgucaaguggaagcggugaggacuaguuauaagacugacuagcccgaugggccucccaacgggcccuccuccccuccuugcaccgagauuaauaaaaaaaaaaaaaaaaaaaaaaaaaaaaaaaaaaaaaaaaaaaaaaaaaaaaaaaaaaaaaaaaaaaaaaaaaaaaaaaaaaaaaaaaaaaaaaaaaaaa

SEQ ID NO: 36441 - RNA, 1662 nt, Artificial Sequence
  mRNA product Design i-3 (A100) comprising derived and/or modified sequence from LASV(LASV254-NIG-2011;Clade II)__AIT17674__GPCmut9 (opt1)
aggagaaagcuuaccaugggccagaucaucaccuucuuccaggaggugccccacgucaucgaggaggugaugaacaucgugcugaucgcccucagccugcuggccauccucaaggggaucuacaacgucgcgaccugcggccuguucgggcugguguccuuccuccugcugugcggccgcagcugcuccacgaccuacaaggggguguacgagcuccagacccuggagcuggacaugaccaaccucaacaugacgaugccgcugagcugcaccaagaacaacucccaccacuacaucauggucggcaacgagaccggccuggagcucacccugacgaacaccagcaucaucaaccacaaguucugcaaccuguccgacgcccacaagaagaaccucuacaaccacgcccugaugagcaucaucuccaccuuccaccugagcauccccaacuucaaccaguacgaggccauguccugcgacuucaacgggggcaagaucagcgugcaguacaaccucucccacagcuacgccguggacgcggccaaccacugcgggaccaucgccaacggcguccugcagacguucaugcggauggccuggggcggguccuacaucgcgcuggacagcggcugcgggaacugggacugcaucaugaccuccuaccaguaccucaucauccagaacaccaccugggaggaccacugccaguucagccgccccucccccaucggcuaccuggggcugcucagccagcggacgcgcgacaucuacaucagccggcgccugcugggcaccuucaccuggacccucuccgacagcgagggcaacgagacgcccgggggcuacugccugacccgguggaugcugaucgaggccgagcucaagugcuucgggaacaccgccguggccaagugcaacgagaagcacgacgaggaguucugcgacaugcugcgccuguucgacuucaacaagcaggccauccggcgccucaagaccgaggcgcaggccaacauccagcugaucaacaaggccgugaacgcccugaucaacgaccagcucaucaugaagaaccaccuccgggacaucaugugcauccccuacugcaacuacuccaaguacugguaccugaaccacacggucaccggcaagaccagccugccccgcugcuggcugguguccaacgggagcuaccugaacgagacccacuucuccgacgacaucgagcagcaggccgacaacaugaucacggagcuccugcagaaggaguacauggaccggcagggcaagaccccgcugggccugguggaccucuucgucuucagcaccuccuucuaccugaucagcaucuuccugcaccucgugaagaucccgacccaccgccacgugaucgggaagcccugccccaagccccaccggcugaaccacaugggcaucugcuccugcgggcuguacaagcacccgggcguccccgugaaguggaagcgcugaggacuaguuauaagacugacuagcccgaugggccucccaacgggcccuccuccccuccuugcaccgagauuaauaaaaaaaaaaaaaaaaaaaaaaaaaaaaaaaaaaaaaaaaaaaaaaaaaaaaaaaaaaaaaaaaaaaaaaaaaaaaaaaaaaaaaaaaaaaaaaaaaaaa

SEQ ID NO: 36442 - RNA, 1662 nt, Artificial Sequence
  mRNA product Design i-3 (A100) comprising derived and/or modified sequence from LASV(Nig08-A19;Clade III)__ADU56618__GPCmut9 (opt1)
aggagaaagcuuaccaugggccagaucgugaccuucuuccaggaggucccccacgugaucgaggaggugaugaacaucguccugaucgcccucagcauccuggccauccugaaggggcucuacaacaucgcgaccugcggccugaucgggcuggugacguuccuccugcuguccggccgcagcugcuccaugaccuacaaggggguguacgagcuccagacccuggagcugaacaugaacacccucaacaugacgaugccgcugagcugcaccaagaacaacucccaccacuacaucauggucggcaacgagaccggccuggagcucacccugacgaacaccagccugcuccaccacaaguucugcaaccuguccgacgcccacaagaagaaccuguacgaccacacccucaugagcaucaucuccaccuuccaccugagcauccccaacuucaaccaguacgaggccauguccugcgacuucaacgggggcaagaucacggugcaguacaaccugagccacuccuacgccaucgacgccgcgaaccacugcgggaccguggccaacggcguccuccagaccuucaugcggauggccuggggcgggagcuacaucgcccuggacuccggcugcgggaagugggacugcaucaugaccagcuaccaguaccugaucauccagaacacgaccugggaggaccacugccaguucucccgccccagccccaucggcuaccucgggcugcugucccagcggacccgcgacaucuacaucagccggcgccuccugggcaccuucacguggacccugagcgacuccgagggcaacgagacccccgggggcuacugccucacccgguggaugcugaucgaggcggagcugaagugcuucgggaacacggccguggccaagugcaacgagaagcacgacgaggaguucugcgacaugcuccgccuguucgacuucaacaagcaggccauccggcgccugaaggccgaggcgcagaugagcauccagcucaucaacaaggccgugaacgcccugaucaacgaccagcugaucaugaagaaccaccuccgggacaucaugugcauccccuacugcaacuacuccaaguacugguaccugaaccacaccagcaccggccgcaccucccugccccggugcuggcucgucagcaacggguccuaccugaacgagacgcacuucagcgacgacaucgagcagcaggccgacaacaugaucaccgagaugcugcagaaggaguaccuggaccgccagggcaagaccccgcucggccugguggaccuguucguguucuccaccagcuucuaccucaucuccaucuuccugcaccuggucaagaucccgacgcaccggcacaucguggggaagcccugccccaagccccaccgccucaaccacaugggcaucugcagcugcgggcuguacaagcagccgggcgugcccguccgguggaagcgcugaggacuaguuauaagacugacuagcccgaugggccucccaacgggcccuccuccccuccuugcaccgagauuaauaaaaaaaaaaaaaaaaaaaaaaaaaaaaaaaaaaaaaaaaaaaaaaaaaaaaaaaaaaaaaaaaaaaaaaaaaaaaaaaaaaaaaaaaaaaaaaaaaaaa

SEQ ID NO: 36443 - RNA, 1665 nt, Artificial Sequence
  mRNA product Design i-3 (A100) comprising derived and/or modified sequence from LASV(G1180-SLE-2010;Clade IV)__AIT17168__GPCmut9 (opt1)
aggagaaagcuuaccaugggccagaucgugaccuucuuccaggaggucccccacgugaucgaggaggugaugaacaucguccugaucgcccucagcauccuggccgugcugaaggggcucuacaacuucgcgaccugcggccugguggggcugcucaccuuccugcugcucugcggccgcuccugcaccgccagccgguacaagggggucuacgagcugcagacccuggagcucaacauggagacccugaacaugacgaugccgcuguccugcaccaagaacaacagccaccacuacaucauggugggcaacgagaccggccucgagcugacccugacgaacaccuccaucaucaaccacaaguucugcaaccucagcgacgcccacaagaagaaccuguacgaccacgcccugauguccaucaucagcaccuuccaccucuccauccccaacuucaaccaguacgaggccaugagcugcgacuucaacgggggcaagaucuccgugcaguacaaccugagccacuccuacgcgggggacgccgccaaccacugcggcaccgucgccaacggggugcugcagacguucaugcgcauggcguggggcggcagcuacaucgcccucgacuccgggugcggcagcugggacugcaucaugaccuccuaccaguaccugaucauccagaacaccaccugggaggaccacugccaguucagccggcccucccccaucggguaccugggccuccugagccagcgcacgcgggacaucuacaucagccgccggcugcucggcaccuucaccuggacccuguccgacagcgaggggaaggacacgccgggcggguacugccugacccgcuggaugcucaucgaggccgagcugaagugcuucggcaacaccgccguggccaagugcaacgagaagcacgacgaggaguucugcgacaugcugcggcuguucgacuucaacaagcaggcgauccagcgccugaaggccgaggcccagauguccauccagcugaucaacaaggccgucaacgcccucaucaacgaccagcugaucaugaagaaccaccuccgggacaucaugugcauccccuacugcaacuacagcaaguacugguaccucaaccacaccacgaccgggaagaccucccugcccaagugcuggcuggugagcaacggcuccuaccucaacgagacccacuucagcgacgacaucgagcagcaggcggacaacaugaucacggagaugcugcagaaggaguacauggagcgccagggcaagacgccccuggggcugguggaccucuucgucuucuccaccagcuucuaccugaucuccaucuuccugcaccucgugaagaucccgacccaccggcacaucgugggcaagagcugccccaagccccaccgccugaaccacauggggaucugcuccugcggccuguacaagcagcccggggucccggugaaguggaagcggugaggacuaguuauaagacugacuagcccgaugggccucccaacgggcccuccuccccuccuugcaccgagauuaauaaaaaaaaaaaaaaaaaaaaaaaaaaaaaaaaaaaaaaaaaaaaaaaaaaaaaaaaaaaaaaaaaaaaaaaaaaaaaaaaaaaaaaaaaaaaaaaaaaaa

SEQ ID NO: 36444 - RNA, 1665 nt, Artificial Sequence
  mRNA product Design i-3 (A100) comprising derived and/or modified sequence from LASV(G1442-SLE-2011;Clade IV)__AIT17180__GPCmut9 (opt1)
aggagaaagcuuaccaugggccagaucgugaccuucuuccaggaggucccccacgugaucgaggaggugaugaacaucguccugaucgcccucagcauccuggccgugcugaaggggcucuacaacguggcgaccugcggccugaucgggcuggucacguuccuccugcugugcggccgcuccugcaccaccacccucuacaaggggguguacgagcugcagacgcuggagcucaacauggagacccugaacaugaccaugccgcugagcugcaccaagaacaacucccaccacuacauccgggugggcaacgagacgggccucgagcugacccugaccaacaccagcaucaucaaccacaaguucugcaaccucuccgacgcccacaagaagaaccuguacgaccacgcccugaugagcaucaucuccacguuccaccucagcauccccaacuucaaccaguacgaggccauguccugcgacuucaacgggggcaagaucagcguccaguacaaccugucccacagcuacgccggggacgcggccaaccacugcggcaccguggccaacggggugcugcagaccuucaugcgcauggccuggggcggcuccuacaucgcgcucgacagcgggugcggcaacugggacugcaucaugaccuccuaccaguaccugaucauccagaacacgaccugggacgaccacugccaguucagccggcccucccccaucggguaccugggccuccugagccagcgcacccgggacgucuacaucucccgccggcugcucggcaccuucacguggacccugagcgacagcgaggggaaggacaccccgggcggguacugccugacccgcuggaugcucaucgaggccgagcugaagugcuucggcaacacggccguggccaagugcaacgagaagcacgacgaggaguucugcgacaugcugcggcuguucgacuucaacaagcaggccauccagcgccugaaggcggaggcccagauguccauccagcugaucaacaaggccgugaacgcccucaucaacgaccagcugaucaugaagaaccaccuccgggacaucaugugcauccccuacugcaacuacagcaaguacugguaccucaacaacaccgccaccgggaagaccucccugcccaagugcuggcugaucagcaacggcuccuaccucaacgagacgcacuucagcgacgacaucgagcaggaggcggacaacaugaucaccgagaugcugcagaaggaguacauggagcgccagggcaagacgccccuggggcuggucgaccucuucguguucuccaccagcuucuaccugaucuccaucuuccugcaccucgugaagaucccgacccaccggcacaucgucggcaagagcugccccaagccccaccgccugaaccacauggggaucugcuccugcggccuguacaagcagcccggggugccggugcgguggaagcgcugaggacuaguuauaagacugacuagcccgaugggccucccaacgggcccuccuccccuccuugcaccgagauuaauaaaaaaaaaaaaaaaaaaaaaaaaaaaaaaaaaaaaaaaaaaaaaaaaaaaaaaaaaaaaaaaaaaaaaaaaaaaaaaaaaaaaaaaaaaaaaaaaaaaa

SEQ ID NO: 36445 - RNA, 1665 nt, Artificial Sequence
  mRNA product Design i-3 (A100) comprising derived and/or modified sequence from LASV(G3010-SLE-2013;Clade IV)__AIT17344__GPCmut9 (opt1)
aggagaaagcuuaccaugggccagaucgugaccuucuuccaggaggucccccacgugaucgaggaggugaugaacaucguccugaucgcccucagcauccuggccgugcugaaggggcucuacaacuucgcgaccugcggccugguggggcuggucacguuccuccugcugugcggccgcuccugcaccaccagccucuacaaggggguguacgagcugcagacccuggagcucaacauggagacgcugaacaugaccaugccgcuguccugcaccaagaacaacagccaccacuacaucauggugggcaacgagaccggccucgagcugacgcugaccaacaccuccaucaucaaccacaaguucugcaaccucagcgacgcccacaagaagaaccuguacaaccacgcccugauguccaucaucagcaccuuccaccucuccauccccaacuucaaccaguacgaggccaugagcugcgacuucaacgggggcaagaucuccguccaguacaaccugagccacuccuacgccggggacgcggccagccacugcggcacgguggccaacggggugcugcagaccuucaugcggauggccuggggcggcuccuacaucgcgcucgacagcgggugcggcaagugggacugcaucaugaccuccuaccaguaccugaucauccagaacaccacgugggaggaccacugccaguucagccgccccucccccaucggguaccugggccuccugagccagcggacccgcgacaucuacaucagccggcgccugcucggcaccuucaccuggacgcuguccgacagcgaggggaaggacaccccgggcggguacugccugacccgguggaugcucaucgaggccgagcugaagugcuucggcaacaccgccgucgccaagugcaacgagaagcacgacgaggaguucugcgacaugcugcgccucuucgacuucaacaagcaggccauccagcggcugaagacggaggcgcagauguccauccagcugaucaacaaggccgugaacgcccucaucaacgaccagcugaucaugaagaaccaccuccgcgacaucaugugcauccccuacugcaacuacagcaaguacugguaccugaaccacaccaccaccgggaagacgucccugcccaagugcuggcuggugagcaacggcuccuaccucaacgagacccacuucagcgacgacaucgagcagcaggccgacaacaugaucaccgagaugcugcagaaggaguacauggagcggcagggcaagacgccccuggggcuggucgaccucuucguguucuccaccagcuucuaccugaucuccaucuuccugcaccucgugaagaucccgacccaccgccacaucgucggcaagagcugccccaagccccaccggcugaaccacauggggaucugcuccugcggccuguacaagcagcccggggugccggugcgcuggaagcggugaggacuaguuauaagacugacuagcccgaugggccucccaacgggcccuccuccccuccuugcaccgagauuaauaaaaaaaaaaaaaaaaaaaaaaaaaaaaaaaaaaaaaaaaaaaaaaaaaaaaaaaaaaaaaaaaaaaaaaaaaaaaaaaaaaaaaaaaaaaaaaaaaaaa

SEQ ID NO: 36446 - RNA, 1665 nt, Artificial Sequence
  mRNA product Design i-3 (A100) comprising derived and/or modified sequence from LASV(G502-SLE-2009;Clade IV)__AIT17126__GPCmut9 (opt1)
aggagaaagcuuaccaugggccagaucgugaccuucuuccaggaggucccccacgugaucgaggaggugaugaacaucguccugaucgcccucagcauccuggccgugcugaaggggcucuacaacuucgcgaccugcggccugguggggcugcucacguuccugcugcucugcggccgcuccugcaccaccgggcuguacaagggcgucuacgagcugcagacccucgagcugaacauggagacgcugaacaugaccaugccgcucagcugcaccaagaacaacucccaccacuacaucauggugggcaacgagaccgggcuggagcugacgcucaccaacaccagcaucaucaaccacaaguucugcaaccuguccgacgcccacaagaagaaccuguacgaccacgcccucaugagcaucaucuccaccuuccaccugagcauccccaacuucaaccaguacgaggccauguccugcgacuucaacggcgggaagaucagcgugcaguacaaccugucccacagcuacgccggcgacgcggccgaccacugcgggacggucgccaacggcgugcuccagaccuucaugcggauggccuggggcggguccuacaucgcgcuggacagcggcugcgggcgcugggacugcaucaugaccuccuaccaguaccugaucauccagaacaccacgugggaggaccacugccaguucagccggcccucccccaucggcuaccucggccugcugagccagcgcacccgggacaucuacaucucccgccggcuccuggggaccuucaccuggacgcugagcgacagcgagggcaaggacacccccgggggcuacugccucacccgcuggaugcugaucgaggccgagcugaagugcuucgggaacaccgccguggccaagugcaacgagaagcacgacgaggaguucugcgacaugcuccggcuguucgacuucaacaagcaggccauccagcgccugaaggcggaggcccagauguccauccagcucaucaacaaggccgucaacgcccugaucaacgaccagcuggugaugaagaaccaccuccgggacaucaugugcauccccuacugcaacuacagccgcuacugguaccugaaccacacgaccaccggccggaccucccugcccaagugcuggcucgugagcaacggcuccuaccugaacgagacgcacuucagcgacgacaucgagcagcaggccgacaacaugaucaccgagaugcugcagaaggaguacauggagcgccaggggaagaccccgcugggccucgucgaccuguucguguucuccaccagcuucuaccugaucuccaucuuccuccaccuggugaagaucccgacgcaccggcacaucgucggcaagagcugccccaagccccaccgccugaaccacauggggaucugcuccugcgggcucuacaagcagcccggcgugccggugaaguggaagcggugaggacuaguuauaagacugacuagcccgaugggccucccaacgggcccuccuccccuccuugcaccgagauuaauaaaaaaaaaaaaaaaaaaaaaaaaaaaaaaaaaaaaaaaaaaaaaaaaaaaaaaaaaaaaaaaaaaaaaaaaaaaaaaaaaaaaaaaaaaaaaaaaaaaa

SEQ ID NO: 36447 - RNA, 1665 nt, Artificial Sequence
  mRNA product Design i-3 (A100) comprising derived and/or modified sequence from LASV(G733-SLE-2010;Clade IV)__AIT17154__GPCmut9 (opt1)
aggagaaagcuuaccaugggccagaucgugaccuucuuccaggaggucccccacgugaucgaggaggugaugaacaucguccugaucgcccucagcauccuggccgugcugaaggggcucuacaacuucgcgaccugcggcaucguggggcuggucuccuuccugcuccugugcggccgcagcugcacgaccucccuguacaaggggguguacgagcuccagacccuggagcugaacauggagacccucaacaugacgaugccgcugagcugcaccaagaacaacucccaccacuacaucauggugggcaacgagaccggccuggagcucacccugacgaacaccagcaucaucaaccacaaguucugcaaccuguccgacgcccacaagaagaaccucuacgaccacgcccugaugagcaucaucuccaccuuccaccugagcauccccaacuucaaccaguacgaggccauguccugcgacuucaacgggggcaagaucagcguccaguacaaccucucccacagcuacgccggggacgcggccaaccacugcggcaccaucgccaacggggugcugcagacguucaugcggauggccuggggcggcuccuacaucgcgcuggacagcgggugcgaccgcugggacugcaucaugaccuccuaccaguaccucaucauccagaacaccaccugggaggaccacugccaguucagccggcccucccccaucggcuaccuggggcugcucagccagcgcacgcgggacaucuacaucagccgccggcugcugggcaccuucaccuggacccucuccgacagcgagggcaaggacacgcccgggggcuacugccugacccgcuggaugcugaucgaggccgagcucaagugcuucgggaacaccgccguggccaagugcaacgagaagcacgacgaggaguucugcgacaugcugcggcuguucgacuucaacaagcaggccauccagcgccucaaggcggaggcccagauguccauccagcugaucaacaaggccgucaacgcccugaucaacgaccagcucaucaugaagaaccaccuccgggacaucaugugcauccccuacugcaacuacagcaaguacugguaccugaaccacaccacgaccggcaagaccucccugcccaagugcuggcuggugagcaacggguccuaccugaacgagacccacuucagcgacgacaucgagcagcaggccgacaacaugaucacggagaugcuccagaaggaguacauggagcgccagggcaagaccccgcugggccugguggaccuguucgucuucuccaccagcuucuaccucaucuccaucuuccugcaccuggugaagaucccgacccaccggcacguggucggcaagagcugccccaagccccaccgccucaaccacauggggaucugcuccugcgggcuguacggccagcccggggugccggugaaguggaagcggugaggacuaguuauaagacugacuagcccgaugggccucccaacgggcccuccuccccuccuugcaccgagauuaauaaaaaaaaaaaaaaaaaaaaaaaaaaaaaaaaaaaaaaaaaaaaaaaaaaaaaaaaaaaaaaaaaaaaaaaaaaaaaaaaaaaaaaaaaaaaaaaaaaaa

SEQ ID NO: 36448 - RNA, 1665 nt, Artificial Sequence
  mRNA product Design i-3 (A100) comprising derived and/or modified sequence from MOPV/LASV reassortant(IGS-1;Clade IV)__AFY05576__GPCmut9 (opt1)
aggagaaagcuuaccaugggccagaucgugaccuucuuccaggaggucccccacgugaucgaggaggugaugaacaucguccugaucgcccucagcgugcuggccgugcugaaggggcucuacaacuucgcgaccugcggccuggucgggcuggugacguuccuccugcugugcggccgcuccugcaccaccagccucuacaaggggguguacgagcugcagacccuggagcucaacauggagacgcugaacaugaccaugccgcuguccugcaccaagaacaacagccaccacuacaucauggucggcaacgagaccggccucgagcugacgcugaccaacaccuccaucaucaaccacaaguucugcaaccucagcgacgcccacaagaagaaccuguacgaccacgcccugauguccaucaucagcaccuuccaccucuccauccccaacuucaaccaguacgaggccaugagcugcgacuucaacgggggcaagaucuccgugcaguacaaccugagccacuccuacgccggggacgcggccaaccacugcggcacgguggccaacgggguccugcagaccuucaugcggauggccuggggcggcagcuacaucgcgcucgacuccgggugcggcaacugggacugcaucaugaccagcuaccaguaccugaucauccagaacaccacgugggaggaccacugccaguucucccgccccagccccaucggguaccugggccuccugucccagcggacccgcgacaucuacaucagccggcgccugcucggcaccuucaccuggacgcugagcgacuccgagggggaggacaccccgggcggguacugccugacccgguggaugcucaucgaggccgagcugaagugcuucggcaacaccgccguggccaagugcaacgagaagcacgacgaggaguucugcgacaugcugcgccucuucgacuucaacaagcaggccauccagcggcugaaggcggaggcccagaugagcauccagcugaucaacaaggccgugaacgcccucaucaacgaccagcugaucaugaagaaccaccuccgcgacaucaugugcauccccuacugcaacuacuccaaguacugguaccugaaccacacgaccaccgggcggaccagccugcccaagugcuggcuggucuccaacggcagcuaccucaacgagacgcacuucuccgacgacaucgagcagcaggccgacaacaugaucaccgagaugcugcagaaggaguacauggagcgccagggcaagacgccccuggggcugguggaccucuucguguucagcaccuccuucuaccugaucagcaucuuccugcaccucgucaagaucccgacccaccggcacaucgugggcaaguccugccccaagccccaccgccugaaccacauggggaucugcagcugcggccuguacaagcagcccggggugccggucaaguggaagcggugaggacuaguuauaagacugacuagcccgaugggccucccaacgggcccuccuccccuccuugcaccgagauuaauaaaaaaaaaaaaaaaaaaaaaaaaaaaaaaaaaaaaaaaaaaaaaaaaaaaaaaaaaaaaaaaaaaaaaaaaaaaaaaaaaaaaaaaaaaaaaaaaaaaa

SEQ ID NO: 36449 - RNA, 1665 nt, Artificial Sequence
  mRNA product Design i-3 (A100) comprising derived and/or modified sequence from LASV(LM765-SLE-2012;Clade IV)__AIT17814__GPCmut9 (opt1)
aggagaaagcuuaccaugggccagaucgugaccuucuuccaggaggucccccacgugaucgaggaggugaugaacaucguccugaucgcccucagcauccuggccgugcugaaggggcucuacaacuucgcgaccugcggccugguggggcuggucacguuccuccugcugugcggccgcuccugcaccaccagccucuacaaggggguguacgagcugcagacccuggagcucaacauggagacgcugaacaugaccaugccgcuguccugcaccaagaacaacagccaccacuacaucauggugggcaacgagaccggccucgagcugacgcugaccaacaccuccaucaucgaccacaaguucugcaaccucagcgacgcccaccggaagaaccuguacgaccacgcccugauguccaucaucagcaccuuccaccucuccauccccaacuucaaccaguacgaggccaugagcugcgacuucaacgggggcaagaucuccguccaguacaaccugagccacuccuacgccaaggacgcggccgaccacugcgggacgguggccaacggcgugcugcagaccuucaugcgcauggccuggggcgggagcuacaucgcgcucgacuccggcugcgggcggugggacugcaucaugaccagcuaccaguaccugaucauccagaacaccacgugggaggaccacugccaguucucccgccccagccccaucggcuaccuggggcuccugucccagcggacccgcgacaucuacaucagccggcgccugcucggcaccuucaccuggacgcugagcgacuccgagggcaaggacacccccgggggcuacugccugacccgguggaugcucaucgaggccgagcugaagugcuucgggaacaccgccgucgccaagugcaacgagaagcacgacgaggaguucugcgacaugcugcgccucuucgacuucaacaagcaggccauccagcggcugaaggcggaggcccagaugagcauccagcugaucaacaaggccgugaacgcccucaucaacgaccagcugaucaugaagaaccaccuccgcgacaucaugugcauccccuacugcaacuacuccaaguacugguaccugaaccacacgaccaccggcaagaccagccugcccaagugcuggcugguguccaacgggagcuaccucaacgagacgcacuucuccgacgacaucgagcagcaggccgacaacaugaucaccgagaugcugcagaaggaguacauggagcggcagggcaagaccccgcugggccuggucgaccucuucguguucagcaccuccuucuaccugaucagcaucuuccugcaccucgugaagaucccgacgcaccgccacaucgucgggaagcccugccccaagccccaccggcugaaccacaugggcaucugcuccugcgggcuguacaagcagccgggcgugcccgugaaguggaagcgcugaggacuaguuauaagacugacuagcccgaugggccucccaacgggcccuccuccccuccuugcaccgagauuaauaaaaaaaaaaaaaaaaaaaaaaaaaaaaaaaaaaaaaaaaaaaaaaaaaaaaaaaaaaaaaaaaaaaaaaaaaaaaaaaaaaaaaaaaaaaaaaaaaaaa

SEQ ID NO: 36450 - RNA, 1665 nt, Artificial Sequence
  mRNA product Design i-3 (A100) comprising derived and/or modified sequence from LASV(LM776-SLE-2012;Clade IV)__AIT17824__GPCmut9 (opt1)
aggagaaagcuuaccaugggccagaucgugaccuucuuccaggaggucccccacgugaucgaggaggugaugaacaucguccugaucgcccucagcauccuggccgugcugaaggggcucuacaacuucgcgaccugcggccugguggggcuggucacguuccuccugcugugcggccgcuccugcaccaccagcguguacaaggggguguacgagcuccagacccuggagcugaacauggagacgcucaacaugaccaugccgcuguccugcaccaagaacaacagccaccacuacaucauggucggcaacgagaccggccuggagcucacgcugaccaacaccuccaucaucaaccacaaguucugcaaccugagcgacgcccacaagaagaaccucuacgaccacgcccugauguccaucaucagcaccuuccaccuguccauccccaacuucaaccaguacgaggccaugagcugcgacuucaacgggggcaagaucuccgugcaguacaaccucagccacuccuacgccggggacgcggccaaccacugcggcacgguggccaacgggguccugcagaccuucaugcggauggccuggggcggcagcuacaucgcgcuggacuccgggugcggcaagugggacugcaucaugaccagcuaccaguaccucaucauccagaacaccacgugggaggaccacugccaguucucccgccccagccccaucggguaccugggccugcucucccagcggacccgcgacaucuacaucagccggcgccugcugggcaccuucaccuggacgcucagcgacuccgaggggaaggacaccccgggcggguacugccugacccgguggaugcugaucgaggccgagcucaagugcuucggcaacaccgccguggccaagugcaacgagaagcacgacgaggaguucugcgacaugcugcgccuguucgacuucaacaagcaggccauccagcggcucaaggcggaggcccagaugagcauccagcugaucaacaaggccgugaacgcccugaucaacgaccagcucaucaugaagaaccaccuccgcgacaucaugugcauccccuacugcaacuacuccaaguacugguaccugaaccacacgaccaccgggaagaccagccugcccaagugcuggcuggucuccaacggcagcuaccugaacgagacgcacuucuccgacgacaucgagcagcaggccgacaacaugaucaccgagaugcuccagaaggaguacauggagcggcagggcaagacgccccuggggcugguggaccuguucguguucagcaccuccuucuaccucaucagcaucuuccugcaccuggucaagaucccgacccaccgccacaucgugggcaaguccugccccaagccccaccggcucaaccacauggggaucugcagcugcggccuguacaagcagcccggggugccgguccgcuggaagcggugaggacuaguuauaagacugacuagcccgaugggccucccaacgggcccuccuccccuccuugcaccgagauuaauaaaaaaaaaaaaaaaaaaaaaaaaaaaaaaaaaaaaaaaaaaaaaaaaaaaaaaaaaaaaaaaaaaaaaaaaaaaaaaaaaaaaaaaaaaaaaaaaaaaa

SEQ ID NO: 36451 - RNA, 1665 nt, Artificial Sequence
  mRNA product Design i-3 (A100) comprising derived and/or modified sequence from LASV(Mad39;Clade IV)__ANH09722__GPCmut9 (opt1)
aggagaaagcuuaccaugggccagaucgugaccuucuuccaggaggucccccacgugaucgaggaggugaugaacaucguccugaucgcccucagcauccuggccgugcugaaggggcucuacaacguggcgaccugcggccugaucgggcuggucacguuccuccugcugugcggccgcuccugcaccaccacccucuacaaggggguguacgagcugcaggcccuggagcucaacauggagacgcugaacaugaccaugccgcugagcugcaccaagaacaacucccaccacuacauccgggugggcaacgagaccggccucgagcugacgcugaccaacaccagccucaucaaccacaaguucugcaaccuguccgacgcccacaagaagaaccuguacgaccacgcccucaugagcaucaucuccaccuuccaccugagcauccccaacuucaaccaguacgaggccauguccugcgacuucaacgacgggaagaucagcguccaguacaaccugucccacacguacgcgggcgacaccgccaaccacugcgggaccguggccaacggcgugcuccagaccuucaugcgcauggccuggggcgggagcuacaucgcgcuggacuccggcugcgggggcugggacugcaucaugacgagcuaccaguaccugaucauccagaacaccaccugggaggaccacugccaguucucccggcccagccccaucggguaccucggccugcugucccagcgcacccgggacaucuacaucagccgccggcuccugggcacguucaccuggacccuguccgacagcgaggggaaggacaccccgggcggguacugccucacgcgcuggaugcugaucgaggccgagcugaagugcuucggcaacaccgccgucgccaagugcaacgagaagcacgacgaggaguucugcgacaugcuccggcuguucgacuucaacaagcaggccauccagcgccugaaggcggaggcccagaugagcauccagcucaucaacaaggccgugaacgcccugaucaacgaccagcugaucaugaagaaccaccuccgggacaucaugugcauccccuacugcaacuacuccaaguacugguaccugaaccacaccgugaccgggaagacgagccugcccaagugcuggcucgucuccaacggcagcuaccugaacgagacccacuucuccgacgacaucgagcagcaggccgacaacaugaucaccgagaugcugcagaaggaguacauggagcgccagggcaagacgccccuggggcucguggaccuguucguguucagcaccuccuucuaccugaucagcaucuuccuccaccuggucaagaucccgacccaccggcacguggugggcaagcccugccccaagccccaccgccugaaccacauggggaucugcuccugcggcuucuacaagcagccggggguccccgugcgguggaagcgcugaggacuaguuauaagacugacuagcccgaugggccucccaacgggcccuccuccccuccuugcaccgagauuaauaaaaaaaaaaaaaaaaaaaaaaaaaaaaaaaaaaaaaaaaaaaaaaaaaaaaaaaaaaaaaaaaaaaaaaaaaaaaaaaaaaaaaaaaaaaaaaaaaaaa

SEQ ID NO: 36452 - RNA, 1665 nt, Artificial Sequence
  mRNA product Design i-3 (A100) comprising derived and/or modified sequence from LASV(Z0947-SLE-2011;Clade IV)__AIT17840__GPCmut9 (opt1)
aggagaaagcuuaccaugggccagaucgugaccuucuuccaggaggucccccacgugaucgaggaggugaugaacaucguccugaucgcccucagcauccuggccgugcugaaggggcucuacaacuucgcgaccugcggccugguggggcuggucacguuccuccugcugugcggccgcuccugcaccaucagccucuacaaggggguguacgagcugcagacccuggagcucaacauggagacccugaacaugacgaugccgcuguccugcaccaagaacaacagccaccacuacaucauggugggcaacgagaccggccucgagcugacccugacgaacaccuccaucaucaaccacaaguucugcaaccucagcgacgcccacaagaagaaccuguacgaccacgcccugauguccaucaucagcaccuuccaccucuccauccccaacuucaaccaguacgaggccaugagcugcgacuucaacgggggcaagaucuccguccaguacaaccugagccacuccuacgccggggacgcggccaaccacugcggcaccguggccaacggggugcugcagacguucaugcggauggccuggggcggcagcuacaucgcgcucgacuccgggugcgaccgcugggacugcaucaugaccagcuaccaguaccugaucauccagaacaccaccugggaggaccacugccaguucucccggcccagccccaucggcuaccuggggcuccugucccagcgcacgcgggacaucuacaucagccgccggcugcucggcaccuucaccuggacccugagcgacuccgagggcaaggacacgcccgggggcuacugccugacccgcuggaugcucaucgaggccgagcugaagugcuucgggaacaccgccgucgccaagugcaacgagaagcacgacgaggaguucugcgacaugcugcggcuguucgacuucaacaagcaggccauccagcgccugaaggcggaggcccagaugagcauccagcugaucaacaaggccgugaacgcccucaucaacgaccagcugaucaugaagaaccaccuccgggacaucaugugcauccccuacugcaacuacuccaaguacugguaccucaaccacaccacgaccggcaagaccagccugcccaagugcuggcugguguccaacgggagcuaccucaacgagacccacuucuccgacgacaucgagcagcaggccgacaacaugaucacggagaugcugcagaaggaguacauggagcgccagggcaagaccccgcugggccuggucgaccucuucguguucagcaccuccuucuaccugaucagcaucuuccugcaccucgugaagaucccgacccaccggcacaucgucgggaagcccugccccaagccccaccgccugaaccacaugggcaucugcuccugcgggcuguacaagcagccgggcgugcccgugaaguggaagcggugaggacuaguuauaagacugacuagcccgaugggccucccaacgggcccuccuccccuccuugcaccgagauuaauaaaaaaaaaaaaaaaaaaaaaaaaaaaaaaaaaaaaaaaaaaaaaaaaaaaaaaaaaaaaaaaaaaaaaaaaaaaaaaaaaaaaaaaaaaaaaaaaaaaa

SEQ ID NO: 36453 - RNA, 1665 nt, Artificial Sequence
  mRNA product Design i-3 (A100) comprising derived and/or modified sequence from LASV(Josiah;Clade IV)__NP_694870__GPCmut9 (opt4)
aggagaaagcuuaccaugggccagaucgugaccuucuuccaggaggugccccacgugaucgaggaggugaugaacaucgugcugaucgcccugagcgugcuggccgugcugaagggccuguacaacuucgccaccugcggccuggugggccuggugaccuuccugcugcugugcggcagaagcugcaccaccagccuguacaagggcguguacgagcugcagacccuggagcugaacauggagacccugaacaugaccaugccccugagcugcaccaagaacaacagccaccacuacaucauggugggcaacgagaccggccuggagcugacccugaccaacaccagcaucaucaaccacaaguucugcaaccugagcgacgcccacaagaagaaccuguacgaccacgcccugaugagcaucaucagcaccuuccaccugagcauccccaacuucaaccaguacgaggccaugagcugcgacuucaacggcggcaagaucagcgugcaguacaaccugagccacagcuacgccggcgacgccgccaaccacugcggcaccguggccaacggcgugcugcagaccuucaugagaauggccuggggcggcagcuacaucgcccuggacagcggcugcggcaacugggacugcaucaugaccagcuaccaguaccugaucauccagaacaccaccugggaggaccacugccaguucagcagacccagccccaucggcuaccugggccugcugagccagagaaccagagacaucuacaucagcagaagacugcugggcaccuucaccuggacccugagcgacagcgagggcaaggacacccccggcggcuacugccugaccagauggaugcugaucgaggccgagcugaagugcuucggcaacaccgccguggccaagugcaacgagaagcacgacgaggaguucugcgacaugcugagacuguucgacuucaacaagcaggccauccagagacugaaggccgaggcccagaugagcauccagcugaucaacaaggccgugaacgcccugaucaacgaccagcugaucaugaagaaccaccugagagacaucaugugcauccccuacugcaacuacagcaaguacugguaccugaaccacaccaccaccggcagaaccagccugcccaagugcuggcuggugagcaacggcagcuaccugaacgagacccacuucagcgacgacaucgagcagcaggccgacaacaugaucaccgagaugcugcagaaggaguacauggagagacagggcaagaccccccugggccugguggaccuguucguguucagcaccagcuucuaccugaucagcaucuuccugcaccuggugaagauccccacccacagacacaucgugggcaagagcugccccaagccccacagacugaaccacaugggcaucugcagcugcggccuguacaagcagcccggcgugcccgugaaguggaagagaugaggacuaguuauaagacugacuagcccgaugggccucccaacgggcccuccuccccuccuugcaccgagauuaauaaaaaaaaaaaaaaaaaaaaaaaaaaaaaaaaaaaaaaaaaaaaaaaaaaaaaaaaaaaaaaaaaaaaaaaaaaaaaaaaaaaaaaaaaaaaaaaaaaaa

SEQ ID NO: 36454 - RNA, 1662 nt, Artificial Sequence
  mRNA product Design i-3 (A100) comprising derived and/or modified sequence from LASV(LP;Clade I)__AAF86701__GPCmut9 (opt4)
aggagaaagcuuaccaugggccagaucaucaccuucuuccaggaggugccccacgugaucgaggaggugaugaacaucgugcugaucgcccugagccugcuggccauccugaagggccuguacaacaucgccaccugcggcaucaucggccugguggccuuccuguuccugugcggcaagagcugcagccugacccugaagggcggcuacgagcugcagacccuggagcugaacauggagacccugaacaugaccaugccccugagcugcaccaagaacagcagccaccacuacaucagagugggcaacgagaccggccuggagcugacccugaccaacaccagcaucaucaaccacaaguucugcaaccugagcgacgcccacaagaagaaccuguacgaccacgcccugaugagcaucaucagcaccuuccaccugagcauccccaacuucaaccaguacgaggccaugagcugcgacuucaacggcggcaagaucagcgugcaguacaaccugagccacagcuacgccggcgacgccgccgagcacugcggcaccguggccaacggcgugcugcagaccuucaugagaauggccuggggcggcagauacaucgcccuggacagcggcugcggcaacugggacugcaucaugaccagcuaccaguaccugaucauccagaacaccaccugggaggaccacugccaguucagcagacccagccccaucggcuaccugggccugcugagccagagaaccagagacaucuacaucagcagaagacugcugggcaccuucaccuggacccugagcgacagcgagggcaacgagacccccggcggcuacugccugaccagauggaugcugaucgaggccgagcugaagugcuucggcaacaccgccguggccaagugcaacgagaagcacgacgaggaguucugcgacaugcugagacuguucgacuucaacaagcaggccaucagaagacugaaggccgaggcccagaugagcauccagcugaucaacaaggccgugaacgcccugaucaacgaccagcugaucaugaagaaccaccugagagacaucaugugcauccccuacugcaacuacagcaaguacugguaccugaaccacaccagcagcggcagaaccagccugcccaagugcuggcugaucagcaacggcagcuaccugaacgagacccaguucagcgacgacaucgagcagcaggccgacaacaugaucaccgagaugcugcagaaggaguacaucgagagacagggcaagaccccccugggccugguggacaucuucaucuucagcaccagcuucuaccugaucagcaucuuccugcaccugaucaagauccccacccacagacacaucgugggcaagcccugccccaagccccacagacugaaccacaugggcgugugcagcugcggccuguacaagcaccccggcgugcccaccaaguggaagagaugaggacuaguuauaagacugacuagcccgaugggccucccaacgggcccuccuccccuccuugcaccgagauuaauaaaaaaaaaaaaaaaaaaaaaaaaaaaaaaaaaaaaaaaaaaaaaaaaaaaaaaaaaaaaaaaaaaaaaaaaaaaaaaaaaaaaaaaaaaaaaaaaaaaa

SEQ ID NO: 36455 - RNA, 1662 nt, Artificial Sequence
  mRNA product Design i-3 (A100) comprising derived and/or modified sequence from LASV(803213;Clade II)__AAF86703__GPCmut9 (opt4)
aggagaaagcuuaccaugggccagaucaucaccuucuuccaggaggugccccacgugaucgaggaggugaugaacaucgugcugaucgcccugagccugcuggccauccugaagggcaucuacaacguggccaccugcggccuguucggccugaucagcuuccugcugcugugcggcagaagcugcagcgugaccuacaagggcguguacgagcugcagacccuggagcugaacauggccaaccugaacaugaccaugccccugagcugcaccaagaacaacagccaccacuacaucauggugggcaacgagaccggccuggagcugacccugaccaacaccagcaucaucaaccacaaguucugcaaccugagcgacgcccacaagaagaaccuguacgaccacgcccugaugagcaucaucagcaccuuccaccugagcauccccaacuucaaccaguacgaggccaugagcugcgacuucaacggcggcaagaucagcgugcaguacaaccugagccacagcuucgccguggacgccgccaaccacugcggcaccaucgccaacggcgugcugcagaccuucaugagaauggccuggggcggcagcuacaucgcccuggacagcggcugcggcaacugggacugcaucaugaccagcuaccaguaccugaucauccagaacaccaccugggaggaccacugccaguucagcagacccagccccaucggcuaccugggccugcugagccagagaaccagagacaucuacaucagcagaagacugcugggcaccuucaccuggacccugagcgacagcgagggcaacgaggcccccggcggcuacugccugaccagauggaugcugaucgaggccgagcugaagugcuucggcaacaccgccguggccaagugcaacgagaagcacgacgaggaguucugcgacaugcugagacuguucgacuucaacaagcaggccaucaagagacugaagaccgaggcccagaugagcauccagcugaucaacaaggccgugaacgcccugaucaacgaccagcugaucaugaagaaccaccugagagacaucaugugcauccccuacugcaacuacagcagauacugguaccugaaccacaccgugaccggcaagaccagccugcccagaugcuggcuggugagcaacggcagcuaccugaacgagacccacuucagcgacgacaucgagcagcaggccgacaacaugaucaccgagaugcugcagaaggaguacauggacagacagggcaagaccccccugggccugguggaccuguucguguucagcaccagcuucuaccugaucagcaucuuccugcaccuggugaagauccccacccacagacacaucgugggcaagcccugccccaagccccacagacugaaccacaugggcaucugcagcugcggccuguacaagcaccccggcgugcccgugaaguggaagagaugaggacuaguuauaagacugacuagcccgaugggccucccaacgggcccuccuccccuccuugcaccgagauuaauaaaaaaaaaaaaaaaaaaaaaaaaaaaaaaaaaaaaaaaaaaaaaaaaaaaaaaaaaaaaaaaaaaaaaaaaaaaaaaaaaaaaaaaaaaaaaaaaaaaa

SEQ ID NO: 36456 - RNA, 1662 nt, Artificial Sequence
  mRNA product Design i-3 (A100) comprising derived and/or modified sequence from LASV(GA391;Clade III)__CAA36645__GPCmut9 (opt4)
aggagaaagcuuaccaugggccagaucgugaccuucuuccaggaggugccccacgugaucgaggaggugaugaacaucgugcugaucgcccugagcauccuggccauccugaagggccuguacaacguggccaccugcggccugaucggccuggugaccuuccugcugcugagcggcagaagcugcagccugaucuacaagggcaccuacgagcugcagacccuggagcugaacauggagacccugaacaugaccaugccccugagcugcaccaagaacaacagccaccacuacaucagagugggcaacgagaccggccuggagcugacccugaccaacaccagcauccugaaccacaaguucugcaaccugagcgacgcccacaagagaaaccuguacgaccacagccugaugagcaucaucagcaccuuccaccugagcauccccaacuucaaccaguacgaggccaugagcugcgacuucaacggcggcaagaucaccgugcaguacaaccugagccacagcuucgccguggacgccgccggccacugcggcacccuggccaacggcgugcugcagaccuucaugagaauggccuggggcggcagcuacaucgcccuggacagcggcugcggcaacugggacugcaucaugaccagcuaccaguaccugaucauccagaacaccaccugggacgaccacugccaguucagcagacccagccccaucggcuaccugggccugcugagccagagaaccagagacaucuacaucagcagaagacugcugggcaccuucaccuggacccugagcgacagcgagggcaacgagacccccggcggcuacugccugaccagauggaugcugaucgaggccgagcugaagugcuucggcaacaccgccguggccaagugcaacgagaagcacgacgaggaguucugcgacaugcugagacuguucgacuucaacaagcaggccaucagaagacugaagaccgaggcccagaugagcauccagcugaucaacaaggccgugaacgcccugaucaacgaccagcugaucaugaagaaccaccugagagacaucaugugcauccccuacugcaacuacagcagauacugguaccugaaccacaccagcaccggcaagaccagccugcccagaugcuggcugaucagcaacggcagcuaccugaacgagaccaaguucagcgacgacaucgagcagcaggccgacaacaugaucaccgagaugcugcagaaggaguacaucgacagacagggcaagaccccccugggccugguggaccuguucguguucagcaccagcuucuaccugaucagcaucuuccugcaccuggugaagauccccacccacagacacaucgugggcaagcccugccccaagccccacagacugaaccacaugggcaucugcagcugcggccuguacaagcagcccggcgugcccgugagauggaagagaugaggacuaguuauaagacugacuagcccgaugggccucccaacgggcccuccuccccuccuugcaccgagauuaauaaaaaaaaaaaaaaaaaaaaaaaaaaaaaaaaaaaaaaaaaaaaaaaaaaaaaaaaaaaaaaaaaaaaaaaaaaaaaaaaaaaaaaaaaaaaaaaaaaaa

SEQ ID NO: 36457 - RNA, 1665 nt, Artificial Sequence
  mRNA product Design i-3 (A100) comprising derived and/or modified sequence from LASV(AV;Clade V)__CCA30314__GPCmut9 (opt4)
aggagaaagcuuaccaugggccagaucgugaccuucuuccaggaggugccccacgugaucgaggaggugaugaacaucgugcugaucgcccugagcauccuggccgugcugaagggccuguacaacaucgccaccugcggccugaucggccugaucaccuuccugcugcugugcggcagaagcugcagcagcaaccuguacaagggcguguacgagcugcagagccuggaccugaacauggagacccugaacaugaccaugccccugagcugcaccaagaacaacagccaccacuacaucagagugggcaacgacaccggccuggagcugacccugaccaacaccagcauccugaaccacaaguucugcaaccugagcgacgcccacaagaaggaccuguacgaccacgcccugaugagcaucaucagcaccuuccaccugagcauccccaacuucaaccaguacgaggccaugagcugcgacuucaacggcggcaagaucagcgugcaguacaaccugagccacagcuacgccaucgacgccgccaaccacugcggcaccguggccaacggcauccugcagaccuucaugagaauggccuggggcggcagcuacaucgcccuggacagcggcugcggcaacugggacugcaucaugaccagcuaccaguaccugaucauccagaacaccaccugggagaaccacugccaguucagcagacccagccccaucggcuaccugggccugcugagccagagaaccagagacaucuacaucagcagaagacugcugggcaccuucaccuggacccugagcgacagcgagggcaacgccacccccggcggcuacugccugaccagauggaugcugaucgaggccgagcugaagugcuucggcaacaccgccguggccaagugcaacgagaagcacgacgaggaguucugcgacaugcugagacuguucgacuucaacaagcaggccaucagcagacugaagagcgaggcccagaugagcauccagcugaucaacaaggccgugaacgcccugaucaacgaccagcugaucaugaagaaccaccugagagacaucaugugcauccccuacugcaacuacagcaaguacugguaccugaaccacaccaucaccggcaagaccagccugcccaagugcuggcuggugagcaacggcagcuaccugaacgagacccacuucagcgacgacaucgagcagcaggccgacaacaugaucaccgagaugcugcagaaggaguacauggagagacagggcaagaccccccugggccugguggaccuguucguguucagcaccagcuucuaccugaucagcaucuuccugagacuggugaagauccccacccacagacacaucgugggcaagcccugccccaagccccacagacugaaccacaugggcaucugcagcugcggccuguacaagcagcccggcgugcccgugagauggaagagaugaggacuaguuauaagacugacuagcccgaugggccucccaacgggcccuccuccccuccuugcaccgagauuaauaaaaaaaaaaaaaaaaaaaaaaaaaaaaaaaaaaaaaaaaaaaaaaaaaaaaaaaaaaaaaaaaaaaaaaaaaaaaaaaaaaaaaaaaaaaaaaaaaaaa

SEQ ID NO: 36458 - RNA, 1662 nt, Artificial Sequence
  mRNA product Design i-3 (A100) comprising derived and/or modified sequence from LASV(Togo/2016/7082;Clade VI)__AMR44577__GPCmut9 (opt4)
aggagaaagcuuaccaugggccagaucaucaccuucuuccaggaggugccccacgugaucgaggaggugaugaacaucgugcugaucgcccugagccugcuggccauccugaagggcguguacaacguggccaccugcggcaucaucggccuggugaccuuccuguuccugugcggcagaagcugcagccugaucuacaagggcagcuacgagcugcagacccuggagcugaacauggagacccugaacaugaccaugccccugagcugcaccaagaacagcagccaccacuacaucagagugggcaacgagaccggccuggagcugacccugaccaacaccagcaucaucaaccacaaguucugcaaccugagcgacgcccacaagagaaaccuguacgaccacgcccugaugagcauccugagcaccuuccaccugagcauccccaacuucaaccaguacgaggccaugagcugcgacuucaacggcggcaagaucagcgugcaguacaaccugagccacgccuacgccguggacgccgccgagcacugcggcaccguggccaacggcgugcugcagaccuucaugagaauggccuggggcggcagcuacaucgcccuggacagcggcugcggcaacugggacugcaucaugaccagcuaccaguaccugaucauccagaacaccaccugggaggaccacugccaguucagcagacccagccccaucggcuaccugggccugcugagccagagaaccagagacaucuacaucagcagaagacugcugggcaccuucaccuggacccugagcgacagcgagggcaacgagacccccggcggcuacugccugaccagauggaugcugaucgaggccgagcugaagugcuucggcaacaccgccguggccaagugcaacgagaagcacgacgaggaguucugcgacaugcugagacuguucgacuucaacaagcaggccauccagagacugaagagcgaggcccagaugagcauccagcugaucaacaaggccgugaacgcccugaucaacgaccagcugaucaugaagaaccaccugagagacaugaugugcauccccuacugcaacuacagcaaguacugguaccugaaccacaccagcagcggcagaaccagccugcccaagugcuggcuggugagcaacggcagcuaccugaacgagacccacuucagcgacgacaucgagcagcaggccgacaacaugaucaccgagaugcugcagaaggaguacaucgacagacagggcaagaccccccugggccugguggaccuguucguguucagcaccagcuucuaccugaucagcaucuuccugcaccugaucaagauccccacccacagacacaucgugggcaagcccugccccaagccccacagacugaaccacaugggcaucugcagcugcggccuguacaagcagcccggcgugcccaccagauggaagagaugaggacuaguuauaagacugacuagcccgaugggccucccaacgggcccuccuccccuccuugcaccgagauuaauaaaaaaaaaaaaaaaaaaaaaaaaaaaaaaaaaaaaaaaaaaaaaaaaaaaaaaaaaaaaaaaaaaaaaaaaaaaaaaaaaaaaaaaaaaaaaaaaaaaa

SEQ ID NO: 36459 - RNA, 1662 nt, Artificial Sequence
  mRNA product Design i-3 (A100) comprising derived and/or modified sequence from LASV(KAK-428;Clade n.d. (VII))__ANH09740__GPCmut9 (opt4)
aggagaaagcuuaccaugggccagaucgugaccuucuuccaggaggugccccacgugaucgaggaggugaugaacaucgugcugaucgcccugagccugcuggccauccugaagggccuguacaacuucgccaccugcggcgugaucggccugaucaccuuccugcugcugugcggcagaagcugcagcgccaccuacaagggccaguacgagcugcagacccuggagcugaacauggagagccugaacaugaccaugccccugagcugcaccaagaacaacagccaccacuacaucagagccggcaacaacaccggccuggagcugacccugaccaacaccagcaucaucagccacaaguucugcaaccugagcgacgcccacaagaagaaccuguacgaccacacccugaugagcaucaucaccaccuuccaccugagcauccccaacuucaaccaguacgaggccaugagcugcgacuucaacggcggcaagaucagcauccaguacaaccugagccacagcuacgccggcgacgccgcccagcacugcggcaccguggccaacggcgugcugcagaccuucaugagaauggccuggggcggcagcuaccuggcccuggacagcggcugcagaggcugggacugcaucaucagcagcuaccaguaccugaucauccagaacaccaccugggacgaccacugccaguucagcagacccagccccaucggcuaccugggcuucgugagccagaagaccagagacaucuacaucagcagaagacugcugggcaccuucaccuggacccugagcgacagcgagggccacgacaugcccggcggcuacugccugaccagauggaugcugaucgaggccgaccugaagugcuucggcaacaccgccguggccaagugcaacgagaagcacgacgaggaguucugcgacauguggagacuguucgacuucaacaagcaggccauccagagacugaaggccgaggcccagaugaacauccagcugaucaacaaggccgugaacgcccugaucaacgaccagcugaugaugaagaaccaccugagagacaucaugugcauccccuacugcaacuacagcaaguucugguaccugaacaacaccaccaccggcagaaccagccugcccagaugcuggcugaucagcaacggcagcuaccugaacgagacccacuucagcgacgacaucgagcagcaggccgacaacaugaucaccgagaugcugcagaaggaguacauggacagacagggcaagaccccccugggccugguggaccuguucguguucagcaccagcuucuaccugaucaccaucuuccugcaccuggugaagauccccacccacagacacaucgugggcaagcccugccccaagccccacagacugaaccacaugggcaucugcagcugcggccuguacaagcagcccggcgugcccgugagauggaagagaugaggacuaguuauaagacugacuagcccgaugggccucccaacgggcccuccuccccuccuugcaccgagauuaauaaaaaaaaaaaaaaaaaaaaaaaaaaaaaaaaaaaaaaaaaaaaaaaaaaaaaaaaaaaaaaaaaaaaaaaaaaaaaaaaaaaaaaaaaaaaaaaaaaaa

SEQ ID NO: 36460 - RNA, 1662 nt, Artificial Sequence; identical to SEQ ID NO: 36454
  mRNA product Design i-3 (A100) comprising derived and/or modified sequence from LASV(Pinneo-NIG-1969;Clade I)__AIT17836__GPCmut9 (opt4)

SEQ ID NO: 36461 - RNA, 1662 nt, Artificial Sequence
  mRNA product Design i-3 (A100) comprising derived and/or modified sequence from LASV(ISTH0009-NIG-2011;Clade II)__AIT17404__GPCmut9 (opt4)
aggagaaagcuuaccaugggccagaucaucaccuucuuccaggaggugccccacgugaucgaggaggugaugaacaucgugcugaucgcccugagccugcuggccauccugaagggcaucuacaacguggccaccugcggccuguucggccuggugagcuuccugcugcugugcggcagaagcugcagcaccaccuacaagggcguguacgagcugcagacccuggagcuggacauggccagccugaacaugaccaugccccugagcugcaccaagaacaacagccaccacuacaucauggugggcaacgagaccggccuggagcugacccugaccaacaccagcaucaucaaccacaaguucugcaaccugagcgacgcccacaagaagaaccuguacgaccacgcccugaugagcaucaucagcaccuuccaccugagcauccccaacuucaaccaguacgaggccaugagcugcgacuucaacggcggcaagaucagcgugcaguacaaccugagccacgccuacgccguggacgccgccaaccacugcggcaccaucgccaacggcgugcugcagaccuucaugagaauggccuggggcggcagcuacaucgcccuggacagcggcugcggcagcugggacugcaucaugaccagcuaccaguaccugaucauccagaacaccaccugggaggaccacugccaguucagcagacccagccccaucggcuaccugggccugcugagccagagaaccagagacaucuacaucagcagaagacugcugggcaccuucaccuggacccugagcgacagcgagggcaacgagacccccggcggcuacugccugaccagauggaugcugaucgaggccgagcugaagugcuucggcaacaccgccguggccaagugcaacgagaagcacgacgaggaguucugcgacaugcugagacuguucgacuucaacaagcaggccaucagaagacugaagaccgaggcccagaugagcauccagcugaucaacaaggccgugaacgcccugaucaacgaccagcugaucaugaagaaccaccugagagacaucaugugcauccccuacugcaacuacagcaaguacugguaccugaaccacaccgugaccggcaagaccagccugcccagaugcuggcuggugagcaacggcagcuaccugaacgagacccacuucagcgacgacaucgagcagcaggccgacaacaugaucaccgagcugcugcagaaggaguacauggacagacagggcaagaccccccugggccugguggaccuguucguguucagcaccagcuucuaccugaucagcaucuuccugcaccugaucaagauccccacccacagacacaucaccggcaagcccugccccaagccccacagacugaaccacaugggcaucugcagcugcggccuguacaagcaccccggcgugcccgugaaguggaagagaugaggacuaguuauaagacugacuagcccgaugggccucccaacgggcccuccuccccuccuugcaccgagauuaauaaaaaaaaaaaaaaaaaaaaaaaaaaaaaaaaaaaaaaaaaaaaaaaaaaaaaaaaaaaaaaaaaaaaaaaaaaaaaaaaaaaaaaaaaaaaaaaaaaaa

SEQ ID NO: 36462 - RNA, 1662 nt, Artificial Sequence
  mRNA product Design i-3 (A100) comprising derived and/or modified sequence from LASV(ISTH2010-NIG-2012;Clade II)__AIT17482__GPCmut9 (opt4)
aggagaaagcuuaccaugggccagaucaucaccuucuuccaggaggugccccacgugaucgaggaggugaugaacaucgugcugaucgcccugagccugcuggccauccugaagggcaucuacaacguggccaccugcggccuguucggccuggugagcuuccugcugcugugcggcagaagcugcagcaccaccuacaagggcguguacgagcugcagacccuggagcuggacauggccagccugaacaugaccaugccccugagcugcaccaagaacaacagccaccacuacaucauggugggcaacgagaccggccuggagcugacccugaccaacaccagcaucaucaaccacaaguucugcaaccugagcgacgcccacaagaagaaccuguacgaccacgcccugaugagcaucaucagcaccuuccaccugagcauccccaacuucaaccaguacgaggccaugagcugcgacuucaacggcggcaagaucagcgugcaguacaaccugagccacgccuacgccguggacgccgccaaccacugcggcaccaucgccaacggcgugcugcagaccuucaugagaauggccuggggcggcagcuacaucgcccuggacagcggcugcggcagcugggacugcaucaugaccagcuaccaguaccugaucauccagaacaucaccugggaggaccacugccaguucagcagacccagccccaucggcuaccugggccugcugagccagagaaccagagacaucuacaucagcagaagacugcugggcaccuucaccuggacccugagcgacagcgagggcaacgagacccccggcggcuacugccugaccagauggaugcugaucgaggccgagcugaagugcuucggcaacaccgccguggccaagugcaacgagaagcacgacgaggaguucugcgacaugcugagacuguucgacuucaacaagcaggccaucagaagacugaagaccgaggcccagaugagcauccagcugaucaacaaggccgugaacgcccugaucaacgaccagcugaucaugaagaaccaccugagagacaucaugugcauccccuacugcaacuacagcaaguacugguaccugaaccacaccgugaccggcaagaccagccugcccagaugcuggcuggugagcaacggcagcuaccugaacgagacccacuucagcgacgacaucgagcagcaggccgacaacaugaucaccgagcugcugcagaaggaguacaucgacagacagggcaagaccccccugggccugguggaccuguucguguucagcaccagcuucuaccugaucagcaucuuccugcaccuggugaagauccccacccacagacacguggugggcaagcccugccccaagccccacagacugaaccacaugggcaucugcagcugcggccuguacaagcaccccggcgugcccgugaaguggaagagaugaggacuaguuauaagacugacuagcccgaugggccucccaacgggcccuccuccccuccuugcaccgagauuaauaaaaaaaaaaaaaaaaaaaaaaaaaaaaaaaaaaaaaaaaaaaaaaaaaaaaaaaaaaaaaaaaaaaaaaaaaaaaaaaaaaaaaaaaaaaaaaaaaaaa

SEQ ID NO: 36463 - RNA, 1662 nt, Artificial Sequence
  mRNA product Design i-3 (A100) comprising derived and/or modified sequence from LASV(Lassa virus/H.sapiens-wt/NGA/2015/ISTH_0543;Clade II)__AVO03639__GPCmut9 (opt4)
aggagaaagcuuaccaugggccagaucaucaccuucuuccaggaggugccccacgugaucgaggaggugaugaacaucgugcugaucgcccugagccugcuggccauccugaagggcaucuacaacguggccaccugcggccuguucggccuggugagcuuccugcugcugugcggcagaagcugcagcaccaccuacaagggcguguacgagcugcagacccuggagcuggacauggccaaccugaacaugaccaugccccugagcugcaccaagaacaacagccaccacuacaucauggugggcaacgagaccggccuggagcugacccugaccaacaccagcaucaucaaccacaaguucugcaaccugagcgacgcccacaagaagaaccuguacgaccacgcccugaugagcaucaucagcaccuuccaccugagcauccccaacuucaaccaguacgaggccaugagcugcgacuucaacggcggcaagaucagcgugcaguacaaccugagccacaccuacgccguggacgccgccaaccacugcggcaccaucgccaacggcgugcugcagaccuucaugagaauggccuggggcggcagcuacaucgcccuggacagcggcugcggcagcugggacugcaucaugaccagcuaccaguaccuggugauccagaacaccaccugggaggaccacugccaguucagcagacccagccccaucggcuaccugggccugcugagccagagaaccagagacaucuacaucagcagaagacugcugggcaccuucaccuggacccugagcgacagcgagggcaacgagacccccggcggcuacugccugaccagauggaugcugaucgaggccgagcugaagugcuucggcaacaccgccguggccaagugcaacgagaagcacgacgaggaguucugcgacaugcugagacuguucgacuucaacaagcaggccaucagaagacugaagaccgaggcccagaugagcauccagcugaucaacaaggccgugaacgcccugaucaacgaccagcugaucaugaagaaccaccugagagacaucaugugcauccccuacugcaacuacagcaaguacugguaccugaaccacaccgugaccggcaagaccagccugcccagaugcuggcuggugagcaacggcagcuaccugaacgagacccacuucagcgacgacaucgagcagcaggccgacaacaugaucaccgagcugcugcagaaggaguacaucgacagacagggcaagaccccccugggccugguggaccuguucguguucagcaccagcuucuaccugaucagcaucuuccugcaccuggugaagauccccacccacagacacaucaccggcaagcccugccccaagccccacagacugaaccacaugggcaucugcagcugcggccuguacaagcaccccggcgugcccgugaaguggaagagaugaggacuaguuauaagacugacuagcccgaugggccucccaacgggcccuccuccccuccuugcaccgagauuaauaaaaaaaaaaaaaaaaaaaaaaaaaaaaaaaaaaaaaaaaaaaaaaaaaaaaaaaaaaaaaaaaaaaaaaaaaaaaaaaaaaaaaaaaaaaaaaaaaaaa

SEQ ID NO: 36464 - RNA, 1662 nt, Artificial Sequence
  mRNA product Design i-3 (A100) comprising derived and/or modified sequence from LASV(Lassa virus/H.sapiens-wt/NGA/2016/ISTH_0009;Clade II)__AVO03571__GPCmut9 (opt4)
aggagaaagcuuaccaugggccagaucaucaccuucuuccaggaggugccccacgugaucgaggaggugaugaacaucgugcugaucgcccugagccugcuggccauccugaagggcaucuacaacguggccaccugcggccugcugggccuggugagcuuccugcugcugugcggcagaagcugcagcaccaccuacaagggcguguacgagcugcagacccuggagcuggacauggccagccugaacaugaccaugccccugagcugcaccaagaacaacagccaccacuacaucauggugggcaacgagaccggccuggagcugacccugaccaacaccagcaucaucaaccacaaguucugcaaccugagcgacgcccacaagaagaaccuguacgaccacgcccugaugagcaucaucagcaccuuccaccugagcauccccaacuucaaccaguacgaggccaugagcugcgacuucaacggcggcagaaucagcgugcaguacaaccugagccacagcuacgccguggacgccgccaaccacugcggcaccaucgccaacggcgugcugcagaccuucaugagaauggccuggggcggcagcuacaucgcccuggacagcggcugcggcagcugggacugcaucaugaccagcuaccaguaccugaucauccagaacaccaccugggaggaccacugccaguucagcagacccagccccaucggcuaccugggccugcugagccagagaaccagagacaucuacaucagcagaagacugcugggcaccuucaccuggacccugagcgacagcgagggcaacgagacccccggcggcuacugccugaccagauggaugcugaucgaggccgagcugaagugcuucggcaacaccgccguggccaagugcaacgagaagcacgacgaggaguucugcgacaugcugagacuguucgacuucaacaagcaggccaucagaagacugaagaccgaggcccagaugagcauccagcugaucaacaaggccgugaacgcccugaucaacgaccagcugaucaugaagaaccaccugagagacaucaugugcauccccuacugcaacuacagcaaguacugguaccugaaccacaccgugaccggcaagaccagccugcccagaugcuggcuggugagcaacggcagcuaccugaacgagacccacuucagcgacgacaucgagcagcaggccgacaacaugaucaccgagcugcugcagaaggaguacaucgacagacagggcaagaccccccugggccugguggaccuguucguguucagcaccagcuucuaccugaucagcaucuuccugcaccuggugaagauccccacccacagacacaucaccggcaagcccugccccaagccccacagacugaaccacaugggcaucugcagcugcggccuguacaaccaccccggcgugcccgugaaguggaagagaugaggacuaguuauaagacugacuagcccgaugggccucccaacgggcccuccuccccuccuugcaccgagauuaauaaaaaaaaaaaaaaaaaaaaaaaaaaaaaaaaaaaaaaaaaaaaaaaaaaaaaaaaaaaaaaaaaaaaaaaaaaaaaaaaaaaaaaaaaaaaaaaaaaaa

SEQ ID NO: 36465 - RNA, 1662 nt, Artificial Sequence
  mRNA product Design i-3 (A100) comprising derived and/or modified sequence from LASV(Lassa virus/H.sapiens-wt/NGA/2016/ISTH_0017;Clade II)__AVO03567__GPCmut9 (opt4)
aggagaaagcuuaccaugggccagaucaucaccuucuuccaggaggugccccacgugaucgaggaggugaugaacaucgugcugaucgcccugagccugcuggccauccugaagggcaucuacaacguggccaccugcggccuguucggccuggugagcuuccugcugcugugcggcagaagcugcagcaccaccuacaagggcguguacgagcugcagacccuggagcuggacauggccagccugaacaugaccaugccccugagcugcaccaagaacaacagccaccacuacaucauggugggcaacgagaccggccuggagcugacccugaccaacaccagcaucaucaaccacaaguucugcaaccugagcgacgcccacaagaagaaccuguacgaccacgcccugaugagcaucaucagcaccuuccaccugagcauccccaacuucaaccaguacgaggccaugagcugcgacuucaacggcggcaagaucagcgugcaguacaaccugagccacaccuacgccaucgacgccgccaaccacugcggcaccaucgccaacggcgugcugcagaccuucaugagaauggccuggggcggcagcuacaucgcccuggacagcggcugcggcagcugggacugcaucaugaccagcuaccaguaccugaucauccagaacaccaccugggaggaccacugccaguucagcagacccagccccaucggcuaccugggccugcugagccagagaaccagagacaucuacaucagcagaagacugcugggcaccuucaccuggacccugagcgacagcgagggcaacgagacccccggcggcuacugccugaccagauggaugcugaucgaggccgagcugaagugcuucggcaacaccgccguggccaagugcaacgagaagcacgacgaggaguucugcgacaugcugagacuguucgacuucaacaagcaggccaucagaagacugaagaccgaggcccagaugagcauccagcugaucaacaaggccgugaacgcccugaucaacgaccagcugaucaugaagaaccaccugagagacaucaugugcauccccuacugcaacuacagcaaguacugguaccugaaccacaccgugaccggcaagaccagccugcccagaugcuggcuggugagcaacggcagcuaccugaacgagacccacuucagcgacgacaucgagcagcaggccgacaacaugaucaccgagcugcugcagaaggaguacauggacagacagggcaagaccccccugggccugguggaccuguucguguucagcaccagcuucuaccugaucagcaucuuccugcaccuggugagaauccccacccacagacacgugaucggcaagcccugccccaagccccacagacugaaccacaugggcaucugcagcugcggccuguacaagcaccccggcgugcccgugaaguggaagagaugaggacuaguuauaagacugacuagcccgaugggccucccaacgggcccuccuccccuccuugcaccgagauuaauaaaaaaaaaaaaaaaaaaaaaaaaaaaaaaaaaaaaaaaaaaaaaaaaaaaaaaaaaaaaaaaaaaaaaaaaaaaaaaaaaaaaaaaaaaaaaaaaaaaa

SEQ ID NO: 36466 - RNA, 1662 nt, Artificial Sequence
  mRNA product Design i-3 (A100) comprising derived and/or modified sequence from LASV(Lassa virus/H.sapiens-wt/NGA/2018/ISTH_0959;Clade II)__AVV65099__GPCmut9 (opt4)
aggagaaagcuuaccaugggccagaucaucaccuucuuccaggaggugccccacgugaucgaggaggugaugaacaucgugcugaucgcccugagccugcuggccauccugaagggcaucuacaacguggugaccugcggccuguucggccuggugagcuuccugcugcugugcggcagaagcugcagcaccaccuacaagggcguguacgagcugcagacccuggagcuggacauggccagccugaacaugaccaugccccugagcugcaccaagaacaacagccaccacuacaucauggugggcaacgagaccggccuggagcugacccugaccaacaccagcaucaucaaccacaaguucugcaaccugagcgacgcccacaagaagaaccuguacgaccacgcccugaugagcaucaucagcaccuuccaccugagcauccccaacuucaaccaguacgaggccaugagcugcgacuucaacggcggcaagaucagcgugcaguacaaccugagccacgccuacgccaucgacgccgccaaccacugcggcaccaucgccaacggcgugcugcagaccuucaugagaauggccuggggcggcagcuacaucgcccuggacagcggcugcggcagcugggacugcaucaugaccagcuaccaguaccugaucauccagaacaccaccugggaggaccacugccaguucagcagacccagccccaucggcuaccugggccugcugagccagagaaccagagacaucuacaucagcagaagacugcugggcaccuucaccuggacccugagcgacagcgagggcaacgagacccccggcggcuacugccugaccagauggaugcugaucgaggccgagcugaagugcuucggcaacaccgccguggccaagugcaacgagaagcacgacgaggaguucugcgacaugcugagacuguucgacuucaacaagcaggccaucagaagacugaagaccgaggcccagaugagcauccagcugaucaacaaggccgugaacgcccugaucaacgaccagcugaucaugaagaaccaccugagagacaucaugugcauccccuacugcaacuacagcaaguacugguaccugaaccacaccgugaccggcaagaccagccugcccagaugcuggcuggugagcaacggcagcuaccugaacgagacccacuucagcgacgacaucgagcagcaggccgacaacaugaucaccgagcugcugcagaaggaguacaucgacagacagggcaagaccccccugggccugguggaccuguucguguucagcaccagcuucuaccugaucagcaucuuccugcaccuggugaagauccccacccacagacacgugaucggcaagcccugccccaagccccacagacugaaccacaugggcaucugcagcugcggccuguacaagcaccccggcgugcccgugaaguggaagagaugaggacuaguuauaagacugacuagcccgaugggccucccaacgggcccuccuccccuccuugcaccgagauuaauaaaaaaaaaaaaaaaaaaaaaaaaaaaaaaaaaaaaaaaaaaaaaaaaaaaaaaaaaaaaaaaaaaaaaaaaaaaaaaaaaaaaaaaaaaaaaaaaaaaa

SEQ ID NO: 36467 - RNA, 1662 nt, Artificial Sequence
  mRNA product Design i-3 (A100) comprising derived and/or modified sequence from LASV(LASV003-NIG-2008;Clade II)__AIT17580__GPCmut9 (opt4)
aggagaaagcuuaccaugggccagaucaucaccuucuuccaggaggugccccacgugaucgaggaggugaugaacaucgugcugaucgcccugagccugcuggccauccugaagggcaucuacaacguggccaccugcggccuguucggccuggugagcuuccugcugcugugcggcagaagcugcagcaccaccuacaagggcguguacgagcugcagacccuggagcuggacauggccagccugaacaugaccaugccccugagcugcaccaagaacaacagccaccacuacaucauggugggcaacgagaccggccuggagcugacccugaccaacaccagcaucaucaaccacaaguucugcaaccugagcgacgcccacaagaagaaccuguacgaccacgcccugaugagcaucaucagcaccuuccaccugagcauccccaacuucaaccaguacgaggccaugagcugcgacuucaacggcggcaagaucagcgugcaguacaaccugagccacaccuacgccguggacgccgccaaccacugcggcaccaucgccaacggcgugcugcagaccuucaugagaauggccuggggcggcagcuacaucgcccuggacagcggcugcggcagcugggacugcaucaugaccagcuaccaguaccugaucauccagaacaccaccugggaggaccacugccaguucagcagacccagccccaucggcuaccugggccugcugagccagagaaccagagacaucuacaucagcagaagacugcugggcaccuucaccuggacccugagcgacagcgagagcaacgagacccccggcggcuacugccugaccagauggaugcugaucgaggccgagcugaagugcuucggcaacaccgccguggccaagugcaacgagaagcacgacgaggaguucugcgacaugcugagacuguucgacuucaacaagcaggccaucagaagacugaaggccgaggcccagaugagcauccagcugaucaacaaggccgugaacgcccugaucaacgaccagcugaucaugaagaaccaccugagagacaucaugugcauccccuacugcaacuacagcaaguacugguaccugaaccacaccgugaccggcagaaccagccugcccagaugcuggcuggugagcaacggcagcuaccugaacgagacccacuucagcgacgacaucgagcagcaggccgacaacaugaucaccgagcugcugcagaaggaguacauggacagacagggcaagaccccccugggccugguggaccuguucguguucagcaccagcuucuaccugaucagcaucuuccugcaccuggugaagauccccacccacagacacgugaucggcaagcccugccccaagccccacagacugaaccacaugggcaucugcagcugcggccuguacaagcaccccggcgugcccgugaaguggaagagaugaggacuaguuauaagacugacuagcccgaugggccucccaacgggcccuccuccccuccuugcaccgagauuaauaaaaaaaaaaaaaaaaaaaaaaaaaaaaaaaaaaaaaaaaaaaaaaaaaaaaaaaaaaaaaaaaaaaaaaaaaaaaaaaaaaaaaaaaaaaaaaaaaaaa

SEQ ID NO: 36468 - RNA, 1662 nt, Artificial Sequence
  mRNA product Design i-3 (A100) comprising derived and/or modified sequence from LASV(LASV035-NIG-2009;Clade II)__AIT17588__GPCmut9 (opt4)
aggagaaagcuuaccaugggccagaucaucaccuucuuccaggaggugccccacgugaucgaggaggugaugaacaucgugcugaucgcccugagccugcuggccauccugaagggcaucuacaacguggccaccugcggccuguucggccuggugagcuuccugcugcugugcggcagaagcugcagcaccaccuacaagggcguguacgagcugcagacccuggagcuggacauggccagccugaacaugaccaugccccugagcugcaccaagaacaacagccaccacuacaucauggugggcaacgagaccggccuggagcugacccugaccaacaccagcaucaucaaccacaaguucugcaaccugagcgacgcccacaagaagaaccuguacgaccacgcccugaugagcaucaucagcaccuuccaccugagcauccccaacuucaaccaguacgaggccaugagcugcgacuucaacggcggcaagaucagcgugcaguacaaccugagccacgccuacgccguggacgccgccaaccacugcggcaccaucgccaacggcgugcugcagaccuucaugagaauggccuggggcggcagcuacaucgcccuggacagcggcugcggcagcugggacugcaucaugaccagcuaccaguaccugaucauccagaacaccaccugggaggaccacugccaguucagcagacccagccccaucggcuaccugggccugcugagccagagaaccagagacaucuacaucagcagaagacugcugggcaccuucaccuggacccugagcgacagcgagggcaacgagacccccggcggcuacugccugaccagauggaugcugaucgaggccgagcugaagugcuucggcaacaccgccguggccaagugcaacgagaagcacgacgaggaguucugcgacaugcugagacuguucgacuucaacaagcaggccaucagaagacugaaggccgaggcccagaugagcauccagcugaucaacaaggccgugaacgcccugaucaacgaccagcugaucaugaagaaccaccugagagacaucaugugcauccccuacugcaacuacagcaaguacugguaccugaaccacaccgugaccggcaagaccagccugcccagaugcuggcuggugagcaacggcagcuaccugaacgagacccacuucagcgacgacaucgagcagcaggccgacaacaugaucaccgagcugcugcagaaggaguacaucgacagacagggcaagaccccccugggccugguggaccuguucguguucagcaccagcuucuaccugaucagcaucuuccugcaccuggugaagauccccacccacagacacgugaucggcaagcccugccccaagccccacagacugaaccacaugggcaucugcagcugcggccuguacaagcaccccggcgugcccgugaaguggaagagaugaggacuaguuauaagacugacuagcccgaugggccucccaacgggcccuccuccccuccuugcaccgagauuaauaaaaaaaaaaaaaaaaaaaaaaaaaaaaaaaaaaaaaaaaaaaaaaaaaaaaaaaaaaaaaaaaaaaaaaaaaaaaaaaaaaaaaaaaaaaaaaaaaaaa

SEQ ID NO: 36469 - RNA, 1662 nt, Artificial Sequence
  mRNA product Design i-3 (A100) comprising derived and/or modified sequence from LASV(LASV1000-NIG-2009;Clade II)__AIT17782__GPCmut9 (opt4)
aggagaaagcuuaccaugggccagaucaucaccuucuuccaggaggugccccacgugaucgaggaggugaugaacaucgugcugaucgcccugagccugcuggccauccugaagggcaucuacaacguggccaccugcggccuguucggccuggugagcuuccugcugcugugcggcagaagcugcagcaccaccuacaagggcguguacgagcugcagacccuggagcuggacauggccagccugaacaugaccaugccccugagcugcaccaagaacaacagccaccacuacaucauggugggcaacgagaccggccuggagcugacccugaccaacaccagcaucaucaaccacaaguucugcaaccugagcgacgcccacaagaagaaccuguacgaccacgcccugaugagcaucaucagcaccuuccaccugagcauccccaacuucaaccaguacgaggccaugagcugcgacuucaacggcggcaagaucagcgugcaguacaaccugagccacaccuacgccguggacgccgccaaccacugcggcaccaucgccaacggcgugcugcagaccuucaugagaauggccuggggcggcagcuacaucgcccuggacagcggcugcggcagcugggacugcaucaugaccagcuaccaguaccugaucauccagaacaccaccugggaggaccacugccaguucagcagacccagccccaucggcuaccugggccugcugagccagagaaccagagacaucuacaucagcagaagacugcugggcaccuucaccuggacccugagcgacagcgagggcaacgagacccccggcggcuacugccugaccagauggaugcugaucgaggccgagcugaagugcuucggcaacaccgccguggccaagugcaacgagaagcacgacgaggaguucugcgacaugcugagacuguucgacuucaacaagcaggccaucaagagacugaagaccgaggcccagaugagcauccagcugaucaacaaggccgugaacgcccugaucaacgaccagcugaucaugaagaaccaccugagagacaucaugugcauccccuacugcaacuacagcaaguacugguaccugaaccacaccgugaccggcaagaccagccugcccagaugcuggcuggugagcaacggcagcuaccugaacgagacccacuucagcgacgacaucgagcagcaggccgacaacaugaucaccgagcugcugcagaaggaguacaucgacagacagggcaagaccccccugggccugguggaccuguucguguucagcaccagcuucuaccugaucagcaucuuccugcaccuggugaagauccccacccacagacacguggugggcaagcccugccccaagccccacagacugaaccacaugggcaucugcagcugcggccuguacaagcaccccggcgugcccgugaaguggaagagaugaggacuaguuauaagacugacuagcccgaugggccucccaacgggcccuccuccccuccuugcaccgagauuaauaaaaaaaaaaaaaaaaaaaaaaaaaaaaaaaaaaaaaaaaaaaaaaaaaaaaaaaaaaaaaaaaaaaaaaaaaaaaaaaaaaaaaaaaaaaaaaaaaaaa

SEQ ID NO: 36470 - RNA, 1662 nt, Artificial Sequence
  mRNA product Design i-3 (A100) comprising derived and/or modified sequence from LASV(LASV221-NIG-2010;Clade II)__AIT17624__GPCmut9 (opt4)
aggagaaagcuuaccaugggccagaucaucaccuucuuccaggaggugccccacgugaucgaggaggugaugaacaucgugcugaucgcccugagccugcuggccauccugaagggcaucuacaacguggccaccugcggccuguucggccuggugagcuuccugcugcugugcggcagaagcugcagcaccaccuacaagggcguguacgagcugcagacccuggagcuggacauggccagccugaacaugaccaugccccugagcugcaccaagaacaacagccaccacuacaucauggugggcaacgagaccggccuggagcugacccugaccaacaccagcaucaucaaccacaaguucugcaaccugagcgacgcccacaagaagaaccuguacgaccacgcccugaugagcaucaucagcaccuuccaccugagcauccccaacuucaaccaguacgaggccaugagcugcgacuucaacggcggcaagaucagcgugcaguacaaccugagccacaccuacgccaucgacgccgccaaccacugcggcaccaucgccaacggcgugcugcagaccuucaugagaauggccuggggcggcagcuacaucgcccuggacagcggcugcggcagcugggacugcaucaugaccagcuaccaguaccugaucauccagaacaccaccugggaggaccacugccaguucagcagacccagccccaucggcuaccugggccugcugagccagagaaccagagacaucuacaucagcagaagacugcugggcaccuucaccuggacccugagcgacagcgagggcaacgagacccccggcggcuacugccugaccagauggaugcugaucgaggccgagcugaagugcuucggcaacaccgccguggccaagugcaacgagaagcacgacgaggaguucugcgacaugcugagacuguucgacuucaacaagcaggccaucagaagacugaagaccgaggcccagaugagcauccagcugaucaacaaggccgugaacgcccugaucaacgaccagcugaucaugaagaaccaccugagagacaucaugugcauccccuacugcaacuacagcaaguacugguaccugaaccacaccgugaccggcaagaccagccugcccagaugcuggcuggugagcaacggcagcuaccugaacgagacccacuucagcgacgacaucgagcagcaggccgacaacaugaucaccgagaugcugcagaaggaguacauggacagacagggcaagaccccccugggccugguggaccuguucguguucagcaccagcuucuaccugaucagcaucuuccugcaccuggugaagauccccacccacagacacgugaucggcaagcccugccccaagccccacagacugaaccacaugggcaucugcagcugcggccuguacaagcaccccggcgugcccgugaaguggaagagaugaggacuaguuauaagacugacuagcccgaugggccucccaacgggcccuccuccccuccuugcaccgagauuaauaaaaaaaaaaaaaaaaaaaaaaaaaaaaaaaaaaaaaaaaaaaaaaaaaaaaaaaaaaaaaaaaaaaaaaaaaaaaaaaaaaaaaaaaaaaaaaaaaaaa

SEQ ID NO: 36471 - RNA, 1662 nt, Artificial Sequence
  mRNA product Design i-3 (A100) comprising derived and/or modified sequence from LASV(LASV237-NIG-2010;Clade II)__AIT17638__GPCmut9 (opt4)
aggagaaagcuuaccaugggccagaucaucaccuucuuccaggaggugccccacgugaucgaggaggugaugaacaucgugcugaucgcccugagccugcuggccauccugaagggcaucuacaacguggccaccugcggccuguucggccuggugagcuuccugcugcugugcggcagaagcugcagcaccaccuacaagggcguguacgagcugcagacccuggagcuggacauggccagccugaacaugaccaugccccugagcugcaccaagaacaacagccaccacuacaucauggugggcaacgagaccggccuggagcugacccugaccaacaccagcaucaucaaccacaaguucugcaaccugagcgacgcccacaagaaggaccuguacgaccacgcccugaugagcaucaucagcaccuuccaccugagcauccccaacuucaaccaguacgaggccaugagcugcgacuucaacggcggcaagaucagcgugcaguacaaccugagccacaccuacgccguggacgccgccaaccacugcggcaccaucgccaacggcgugcugcagaccuucaugagaauggccuggggcggcagcuacaucgcccuggacagcggcugcggcagcugggacugcaucaugaccagcuaccaguaccugaucauccagaacaccaccugggaggaccacugccaguucagcagacccagccccaucggcuaccugggccugcugagccagagaaccagagacaucuacaucagcagaagacugcugggcaccuucaccuggacccugagcgacagcgagggcaacgagacccccggcggcuacugccugaccagauggaugcugaucgaggccgagcugaagugcuucggcaacaccgccguggccaagugcaacgagaagcacgacgaggaguucugcgacaugcugagacuguucgacuucaacaagcaggccaucagaagacugaagaccgaggcccagaugagcauccagcugaucaacaaggccgugaacgcccugaucaacgaccagcugaucaugaagaaccaccugagagacaucaugugcauccccuacugcaacuacagcaaguacugguaccugaaccacaccgugaccggcaagaccagccugcccagaugcuggcuggugagcaacggcagcuaccugaacgagacccacuucagcgacgacaucgagcagcaggccgacaacaugaucaccgagcugcugcagaaggaguacauggacagacagggcaagaccccccugggccugguggaccuguucguguucagcaccagcuucuaccugaucagcaucuuccugcaccugaucaagauccccacccacagacacaucaccggcaagcccugccccaagccccacagacugaaccacaugggcaucugcagcugcggccuguacaagcaccccggcgugcccgugaaguggaagagaugaggacuaguuauaagacugacuagcccgaugggccucccaacgggcccuccuccccuccuugcaccgagauuaauaaaaaaaaaaaaaaaaaaaaaaaaaaaaaaaaaaaaaaaaaaaaaaaaaaaaaaaaaaaaaaaaaaaaaaaaaaaaaaaaaaaaaaaaaaaaaaaaaaaa

SEQ ID NO: 36472 - RNA, 1662 nt, Artificial Sequence
  mRNA product Design i-3 (A100) comprising derived and/or modified sequence from LASV(LASV253-NIG-2011;Clade II)__AIT17670__GPCmut9 (opt4)
aggagaaagcuuaccaugggccagaucaucaccuucuuccaggaggugccccacgugaucgaggaggugaugaacaucgugcugaucgcccugagccugcuggccauccugaagggcaucuacaacguggccaccugcggccuguucggccuggugagcuuccugcugcugugcggcagaagcugcagcaccaccuacaagggcguguacgagcugcagacccuggagcuggacauggccagccugaacaugaccaugccccugagcugcaccaagaacaacagccaccacuacaucauggugggcaacgagaccggccuggagcugacccugaccaacaccagcaucaucaaccacaaguucugcaaccugagcgacgcccacaagaagaaccuguacgaccacgcccugaugagcaucaucagcaccuuccaccugagcauccccaacuucaaccaguacgaggccaugagcugcgacuucaacggcggcaagaucagcgugcaguacaaccugagccacaccuacgccguggacgccgccaaccacugcggcaccaucgccaacggcgugcugcagaccuucaugagaauggccuggggcggcagcuacaucgcccuggacagcggcugcggcagcugggacugcaucaugaccagcuaccaguaccugaucauccagaacaccaccugggaggaccacugccaguucagcagacccagccccaucggcuaccugggccugcugagccagagaaccagagacaucuacaucagcagaagacugcugggcaccuucaccuggacccugagcgacagcgagggcaacgagacccccggcggcuacugccugaccagauggaugcugaucgaggccgagcugaagugcuucggcaacaccgccguggccaagugcaacgagaagcacgacgaggaguucugcgacaugcugagacuguucgacuucaacaagcaggccaucagaagacugaaggccgaggcccagaugagcauccagcugaucaacaaggccgugaacgcccugaucaacgaccagcugaucaugaagaaccaccugagagacaucaugugcauccccuacugcaacuacagcaaguacugguaccugaaccacaccgugaccggcagaaccagccugcccagaugcuggcuggugagcaacggcagcuaccugaacgagacccacuucagcgacgacaucgagcagcaggccgacaacaugaucaccgagcugcugcagaaggaguacaucgacagacagggcaagaccccccugggccugguggaccuguucguguucagcaccagcuucuaccugaucagcaucuuccugcaccuggugaagauccccacccacagacacaucaucggcaagcccugccccaagccccacagacugaaccacaugggcaucugcagcugcggccuguacaagcaccccggcgugcccgugaaguggaagagaugaggacuaguuauaagacugacuagcccgaugggccucccaacgggcccuccuccccuccuugcaccgagauuaauaaaaaaaaaaaaaaaaaaaaaaaaaaaaaaaaaaaaaaaaaaaaaaaaaaaaaaaaaaaaaaaaaaaaaaaaaaaaaaaaaaaaaaaaaaaaaaaaaaaa

SEQ ID NO: 36473 - RNA, 1662 nt, Artificial Sequence
  mRNA product Design i-3 (A100) comprising derived and/or modified sequence from LASV(LASV254-NIG-2011;Clade II)__AIT17674__GPCmut9 (opt4)
aggagaaagcuuaccaugggccagaucaucaccuucuuccaggaggugccccacgugaucgaggaggugaugaacaucgugcugaucgcccugagccugcuggccauccugaagggcaucuacaacguggccaccugcggccuguucggccuggugagcuuccugcugcugugcggcagaagcugcagcaccaccuacaagggcguguacgagcugcagacccuggagcuggacaugaccaaccugaacaugaccaugccccugagcugcaccaagaacaacagccaccacuacaucauggugggcaacgagaccggccuggagcugacccugaccaacaccagcaucaucaaccacaaguucugcaaccugagcgacgcccacaagaagaaccuguacaaccacgcccugaugagcaucaucagcaccuuccaccugagcauccccaacuucaaccaguacgaggccaugagcugcgacuucaacggcggcaagaucagcgugcaguacaaccugagccacagcuacgccguggacgccgccaaccacugcggcaccaucgccaacggcgugcugcagaccuucaugagaauggccuggggcggcagcuacaucgcccuggacagcggcugcggcaacugggacugcaucaugaccagcuaccaguaccugaucauccagaacaccaccugggaggaccacugccaguucagcagacccagccccaucggcuaccugggccugcugagccagagaaccagagacaucuacaucagcagaagacugcugggcaccuucaccuggacccugagcgacagcgagggcaacgagacccccggcggcuacugccugaccagauggaugcugaucgaggccgagcugaagugcuucggcaacaccgccguggccaagugcaacgagaagcacgacgaggaguucugcgacaugcugagacuguucgacuucaacaagcaggccaucagaagacugaagaccgaggcccaggccaacauccagcugaucaacaaggccgugaacgcccugaucaacgaccagcugaucaugaagaaccaccugagagacaucaugugcauccccuacugcaacuacagcaaguacugguaccugaaccacaccgugaccggcaagaccagccugcccagaugcuggcuggugagcaacggcagcuaccugaacgagacccacuucagcgacgacaucgagcagcaggccgacaacaugaucaccgagcugcugcagaaggaguacauggacagacagggcaagaccccccugggccugguggaccuguucguguucagcaccagcuucuaccugaucagcaucuuccugcaccuggugaagauccccacccacagacacgugaucggcaagcccugccccaagccccacagacugaaccacaugggcaucugcagcugcggccuguacaagcaccccggcgugcccgugaaguggaagagaugaggacuaguuauaagacugacuagcccgaugggccucccaacgggcccuccuccccuccuugcaccgagauuaauaaaaaaaaaaaaaaaaaaaaaaaaaaaaaaaaaaaaaaaaaaaaaaaaaaaaaaaaaaaaaaaaaaaaaaaaaaaaaaaaaaaaaaaaaaaaaaaaaaaa

SEQ ID NO: 36474 - RNA, 1662 nt, Artificial Sequence
  mRNA product Design i-3 (A100) comprising derived and/or modified sequence from LASV(Nig08-A19;Clade III)__ADU56618__GPCmut9 (opt4)
aggagaaagcuuaccaugggccagaucgugaccuucuuccaggaggugccccacgugaucgaggaggugaugaacaucgugcugaucgcccugagcauccuggccauccugaagggccuguacaacaucgccaccugcggccugaucggccuggugaccuuccugcugcugagcggcagaagcugcagcaugaccuacaagggcguguacgagcugcagacccuggagcugaacaugaacacccugaacaugaccaugccccugagcugcaccaagaacaacagccaccacuacaucauggugggcaacgagaccggccuggagcugacccugaccaacaccagccugcugcaccacaaguucugcaaccugagcgacgcccacaagaagaaccuguacgaccacacccugaugagcaucaucagcaccuuccaccugagcauccccaacuucaaccaguacgaggccaugagcugcgacuucaacggcggcaagaucaccgugcaguacaaccugagccacagcuacgccaucgacgccgccaaccacugcggcaccguggccaacggcgugcugcagaccuucaugagaauggccuggggcggcagcuacaucgcccuggacagcggcugcggcaagugggacugcaucaugaccagcuaccaguaccugaucauccagaacaccaccugggaggaccacugccaguucagcagacccagccccaucggcuaccugggccugcugagccagagaaccagagacaucuacaucagcagaagacugcugggcaccuucaccuggacccugagcgacagcgagggcaacgagacccccggcggcuacugccugaccagauggaugcugaucgaggccgagcugaagugcuucggcaacaccgccguggccaagugcaacgagaagcacgacgaggaguucugcgacaugcugagacuguucgacuucaacaagcaggccaucagaagacugaaggccgaggcccagaugagcauccagcugaucaacaaggccgugaacgcccugaucaacgaccagcugaucaugaagaaccaccugagagacaucaugugcauccccuacugcaacuacagcaaguacugguaccugaaccacaccagcaccggcagaaccagccugcccagaugcuggcuggugagcaacggcagcuaccugaacgagacccacuucagcgacgacaucgagcagcaggccgacaacaugaucaccgagaugcugcagaaggaguaccuggacagacagggcaagaccccccugggccugguggaccuguucguguucagcaccagcuucuaccugaucagcaucuuccugcaccuggugaagauccccacccacagacacaucgugggcaagcccugccccaagccccacagacugaaccacaugggcaucugcagcugcggccuguacaagcagcccggcgugcccgugagauggaagagaugaggacuaguuauaagacugacuagcccgaugggccucccaacgggcccuccuccccuccuugcaccgagauuaauaaaaaaaaaaaaaaaaaaaaaaaaaaaaaaaaaaaaaaaaaaaaaaaaaaaaaaaaaaaaaaaaaaaaaaaaaaaaaaaaaaaaaaaaaaaaaaaaaaaa

SEQ ID NO: 36475 - RNA, 1665 nt, Artificial Sequence
  mRNA product Design i-3 (A100) comprising derived and/or modified sequence from LASV(G1180-SLE-2010;Clade IV)__AIT17168__GPCmut9 (opt4)
aggagaaagcuuaccaugggccagaucgugaccuucuuccaggaggugccccacgugaucgaggaggugaugaacaucgugcugaucgcccugagcauccuggccgugcugaagggccuguacaacuucgccaccugcggccuggugggccugcugaccuuccugcugcugugcggcagaagcugcaccgccagcagauacaagggcguguacgagcugcagacccuggagcugaacauggagacccugaacaugaccaugccccugagcugcaccaagaacaacagccaccacuacaucauggugggcaacgagaccggccuggagcugacccugaccaacaccagcaucaucaaccacaaguucugcaaccugagcgacgcccacaagaagaaccuguacgaccacgcccugaugagcaucaucagcaccuuccaccugagcauccccaacuucaaccaguacgaggccaugagcugcgacuucaacggcggcaagaucagcgugcaguacaaccugagccacagcuacgccggcgacgccgccaaccacugcggcaccguggccaacggcgugcugcagaccuucaugagaauggccuggggcggcagcuacaucgcccuggacagcggcugcggcagcugggacugcaucaugaccagcuaccaguaccugaucauccagaacaccaccugggaggaccacugccaguucagcagacccagccccaucggcuaccugggccugcugagccagagaaccagagacaucuacaucagcagaagacugcugggcaccuucaccuggacccugagcgacagcgagggcaaggacacccccggcggcuacugccugaccagauggaugcugaucgaggccgagcugaagugcuucggcaacaccgccguggccaagugcaacgagaagcacgacgaggaguucugcgacaugcugagacuguucgacuucaacaagcaggccauccagagacugaaggccgaggcccagaugagcauccagcugaucaacaaggccgugaacgcccugaucaacgaccagcugaucaugaagaaccaccugagagacaucaugugcauccccuacugcaacuacagcaaguacugguaccugaaccacaccaccaccggcaagaccagccugcccaagugcuggcuggugagcaacggcagcuaccugaacgagacccacuucagcgacgacaucgagcagcaggccgacaacaugaucaccgagaugcugcagaaggaguacauggagagacagggcaagaccccccugggccugguggaccuguucguguucagcaccagcuucuaccugaucagcaucuuccugcaccuggugaagauccccacccacagacacaucgugggcaagagcugccccaagccccacagacugaaccacaugggcaucugcagcugcggccuguacaagcagcccggcgugcccgugaaguggaagagaugaggacuaguuauaagacugacuagcccgaugggccucccaacgggcccuccuccccuccuugcaccgagauuaauaaaaaaaaaaaaaaaaaaaaaaaaaaaaaaaaaaaaaaaaaaaaaaaaaaaaaaaaaaaaaaaaaaaaaaaaaaaaaaaaaaaaaaaaaaaaaaaaaaaa

SEQ ID NO: 36476 - RNA, 1665 nt, Artificial Sequence
  mRNA product Design i-3 (A100) comprising derived and/or modified sequence from LASV(G1442-SLE-2011;Clade IV)__AIT17180__GPCmut9 (opt4)
aggagaaagcuuaccaugggccagaucgugaccuucuuccaggaggugccccacgugaucgaggaggugaugaacaucgugcugaucgcccugagcauccuggccgugcugaagggccuguacaacguggccaccugcggccugaucggccuggugaccuuccugcugcugugcggcagaagcugcaccaccacccuguacaagggcguguacgagcugcagacccuggagcugaacauggagacccugaacaugaccaugccccugagcugcaccaagaacaacagccaccacuacaucagagugggcaacgagaccggccuggagcugacccugaccaacaccagcaucaucaaccacaaguucugcaaccugagcgacgcccacaagaagaaccuguacgaccacgcccugaugagcaucaucagcaccuuccaccugagcauccccaacuucaaccaguacgaggccaugagcugcgacuucaacggcggcaagaucagcgugcaguacaaccugagccacagcuacgccggcgacgccgccaaccacugcggcaccguggccaacggcgugcugcagaccuucaugagaauggccuggggcggcagcuacaucgcccuggacagcggcugcggcaacugggacugcaucaugaccagcuaccaguaccugaucauccagaacaccaccugggacgaccacugccaguucagcagacccagccccaucggcuaccugggccugcugagccagagaaccagagacguguacaucagcagaagacugcugggcaccuucaccuggacccugagcgacagcgagggcaaggacacccccggcggcuacugccugaccagauggaugcugaucgaggccgagcugaagugcuucggcaacaccgccguggccaagugcaacgagaagcacgacgaggaguucugcgacaugcugagacuguucgacuucaacaagcaggccauccagagacugaaggccgaggcccagaugagcauccagcugaucaacaaggccgugaacgcccugaucaacgaccagcugaucaugaagaaccaccugagagacaucaugugcauccccuacugcaacuacagcaaguacugguaccugaacaacaccgccaccggcaagaccagccugcccaagugcuggcugaucagcaacggcagcuaccugaacgagacccacuucagcgacgacaucgagcaggaggccgacaacaugaucaccgagaugcugcagaaggaguacauggagagacagggcaagaccccccugggccugguggaccuguucguguucagcaccagcuucuaccugaucagcaucuuccugcaccuggugaagauccccacccacagacacaucgugggcaagagcugccccaagccccacagacugaaccacaugggcaucugcagcugcggccuguacaagcagcccggcgugcccgugagauggaagagaugaggacuaguuauaagacugacuagcccgaugggccucccaacgggcccuccuccccuccuugcaccgagauuaauaaaaaaaaaaaaaaaaaaaaaaaaaaaaaaaaaaaaaaaaaaaaaaaaaaaaaaaaaaaaaaaaaaaaaaaaaaaaaaaaaaaaaaaaaaaaaaaaaaaa

SEQ ID NO: 36477 - RNA, 1665 nt, Artificial Sequence
  mRNA product Design i-3 (A100) comprising derived and/or modified sequence from LASV(G3010-SLE-2013;Clade IV)__AIT17344__GPCmut9 (opt4)
aggagaaagcuuaccaugggccagaucgugaccuucuuccaggaggugccccacgugaucgaggaggugaugaacaucgugcugaucgcccugagcauccuggccgugcugaagggccuguacaacuucgccaccugcggccuggugggccuggugaccuuccugcugcugugcggcagaagcugcaccaccagccuguacaagggcguguacgagcugcagacccuggagcugaacauggagacccugaacaugaccaugccccugagcugcaccaagaacaacagccaccacuacaucauggugggcaacgagaccggccuggagcugacccugaccaacaccagcaucaucaaccacaaguucugcaaccugagcgacgcccacaagaagaaccuguacaaccacgcccugaugagcaucaucagcaccuuccaccugagcauccccaacuucaaccaguacgaggccaugagcugcgacuucaacggcggcaagaucagcgugcaguacaaccugagccacagcuacgccggcgacgccgccagccacugcggcaccguggccaacggcgugcugcagaccuucaugagaauggccuggggcggcagcuacaucgcccuggacagcggcugcggcaagugggacugcaucaugaccagcuaccaguaccugaucauccagaacaccaccugggaggaccacugccaguucagcagacccagccccaucggcuaccugggccugcugagccagagaaccagagacaucuacaucagcagaagacugcugggcaccuucaccuggacccugagcgacagcgagggcaaggacacccccggcggcuacugccugaccagauggaugcugaucgaggccgagcugaagugcuucggcaacaccgccguggccaagugcaacgagaagcacgacgaggaguucugcgacaugcugagacuguucgacuucaacaagcaggccauccagagacugaagaccgaggcccagaugagcauccagcugaucaacaaggccgugaacgcccugaucaacgaccagcugaucaugaagaaccaccugagagacaucaugugcauccccuacugcaacuacagcaaguacugguaccugaaccacaccaccaccggcaagaccagccugcccaagugcuggcuggugagcaacggcagcuaccugaacgagacccacuucagcgacgacaucgagcagcaggccgacaacaugaucaccgagaugcugcagaaggaguacauggagagacagggcaagaccccccugggccugguggaccuguucguguucagcaccagcuucuaccugaucagcaucuuccugcaccuggugaagauccccacccacagacacaucgugggcaagagcugccccaagccccacagacugaaccacaugggcaucugcagcugcggccuguacaagcagcccggcgugcccgugagauggaagagaugaggacuaguuauaagacugacuagcccgaugggccucccaacgggcccuccuccccuccuugcaccgagauuaauaaaaaaaaaaaaaaaaaaaaaaaaaaaaaaaaaaaaaaaaaaaaaaaaaaaaaaaaaaaaaaaaaaaaaaaaaaaaaaaaaaaaaaaaaaaaaaaaaaaa

SEQ ID NO: 36478 - RNA, 1665 nt, Artificial Sequence
  mRNA product Design i-3 (A100) comprising derived and/or modified sequence from LASV(G502-SLE-2009;Clade IV)__AIT17126__GPCmut9 (opt4)
aggagaaagcuuaccaugggccagaucgugaccuucuuccaggaggugccccacgugaucgaggaggugaugaacaucgugcugaucgcccugagcauccuggccgugcugaagggccuguacaacuucgccaccugcggccuggugggccugcugaccuuccugcugcugugcggcagaagcugcaccaccggccuguacaagggcguguacgagcugcagacccuggagcugaacauggagacccugaacaugaccaugccccugagcugcaccaagaacaacagccaccacuacaucauggugggcaacgagaccggccuggagcugacccugaccaacaccagcaucaucaaccacaaguucugcaaccugagcgacgcccacaagaagaaccuguacgaccacgcccugaugagcaucaucagcaccuuccaccugagcauccccaacuucaaccaguacgaggccaugagcugcgacuucaacggcggcaagaucagcgugcaguacaaccugagccacagcuacgccggcgacgccgccgaccacugcggcaccguggccaacggcgugcugcagaccuucaugagaauggccuggggcggcagcuacaucgcccuggacagcggcugcggcagaugggacugcaucaugaccagcuaccaguaccugaucauccagaacaccaccugggaggaccacugccaguucagcagacccagccccaucggcuaccugggccugcugagccagagaaccagagacaucuacaucagcagaagacugcugggcaccuucaccuggacccugagcgacagcgagggcaaggacacccccggcggcuacugccugaccagauggaugcugaucgaggccgagcugaagugcuucggcaacaccgccguggccaagugcaacgagaagcacgacgaggaguucugcgacaugcugagacuguucgacuucaacaagcaggccauccagagacugaaggccgaggcccagaugagcauccagcugaucaacaaggccgugaacgcccugaucaacgaccagcuggugaugaagaaccaccugagagacaucaugugcauccccuacugcaacuacagcagauacugguaccugaaccacaccaccaccggcagaaccagccugcccaagugcuggcuggugagcaacggcagcuaccugaacgagacccacuucagcgacgacaucgagcagcaggccgacaacaugaucaccgagaugcugcagaaggaguacauggagagacagggcaagaccccccugggccugguggaccuguucguguucagcaccagcuucuaccugaucagcaucuuccugcaccuggugaagauccccacccacagacacaucgugggcaagagcugccccaagccccacagacugaaccacaugggcaucugcagcugcggccuguacaagcagcccggcgugcccgugaaguggaagagaugaggacuaguuauaagacugacuagcccgaugggccucccaacgggcccuccuccccuccuugcaccgagauuaauaaaaaaaaaaaaaaaaaaaaaaaaaaaaaaaaaaaaaaaaaaaaaaaaaaaaaaaaaaaaaaaaaaaaaaaaaaaaaaaaaaaaaaaaaaaaaaaaaaaa

SEQ ID NO: 36479 - RNA, 1665 nt, Artificial Sequence
  mRNA product Design i-3 (A100) comprising derived and/or modified sequence from LASV(G733-SLE-2010;Clade IV)__AIT17154__GPCmut9 (opt4)
aggagaaagcuuaccaugggccagaucgugaccuucuuccaggaggugccccacgugaucgaggaggugaugaacaucgugcugaucgcccugagcauccuggccgugcugaagggccuguacaacuucgccaccugcggcaucgugggccuggugagcuuccugcugcugugcggcagaagcugcaccaccagccuguacaagggcguguacgagcugcagacccuggagcugaacauggagacccugaacaugaccaugccccugagcugcaccaagaacaacagccaccacuacaucauggugggcaacgagaccggccuggagcugacccugaccaacaccagcaucaucaaccacaaguucugcaaccugagcgacgcccacaagaagaaccuguacgaccacgcccugaugagcaucaucagcaccuuccaccugagcauccccaacuucaaccaguacgaggccaugagcugcgacuucaacggcggcaagaucagcgugcaguacaaccugagccacagcuacgccggcgacgccgccaaccacugcggcaccaucgccaacggcgugcugcagaccuucaugagaauggccuggggcggcagcuacaucgcccuggacagcggcugcgacagaugggacugcaucaugaccagcuaccaguaccugaucauccagaacaccaccugggaggaccacugccaguucagcagacccagccccaucggcuaccugggccugcugagccagagaaccagagacaucuacaucagcagaagacugcugggcaccuucaccuggacccugagcgacagcgagggcaaggacacccccggcggcuacugccugaccagauggaugcugaucgaggccgagcugaagugcuucggcaacaccgccguggccaagugcaacgagaagcacgacgaggaguucugcgacaugcugagacuguucgacuucaacaagcaggccauccagagacugaaggccgaggcccagaugagcauccagcugaucaacaaggccgugaacgcccugaucaacgaccagcugaucaugaagaaccaccugagagacaucaugugcauccccuacugcaacuacagcaaguacugguaccugaaccacaccaccaccggcaagaccagccugcccaagugcuggcuggugagcaacggcagcuaccugaacgagacccacuucagcgacgacaucgagcagcaggccgacaacaugaucaccgagaugcugcagaaggaguacauggagagacagggcaagaccccccugggccugguggaccuguucguguucagcaccagcuucuaccugaucagcaucuuccugcaccuggugaagauccccacccacagacacguggugggcaagagcugccccaagccccacagacugaaccacaugggcaucugcagcugcggccuguacggccagcccggcgugcccgugaaguggaagagaugaggacuaguuauaagacugacuagcccgaugggccucccaacgggcccuccuccccuccuugcaccgagauuaauaaaaaaaaaaaaaaaaaaaaaaaaaaaaaaaaaaaaaaaaaaaaaaaaaaaaaaaaaaaaaaaaaaaaaaaaaaaaaaaaaaaaaaaaaaaaaaaaaaaa

SEQ ID NO: 36480 - RNA, 1665 nt, Artificial Sequence
  mRNA product Design i-3 (A100) comprising derived and/or modified sequence from MOPV/LASV reassortant(IGS-1;Clade IV)__AFY05576__GPCmut9 (opt4)
aggagaaagcuuaccaugggccagaucgugaccuucuuccaggaggugccccacgugaucgaggaggugaugaacaucgugcugaucgcccugagcgugcuggccgugcugaagggccuguacaacuucgccaccugcggccuggugggccuggugaccuuccugcugcugugcggcagaagcugcaccaccagccuguacaagggcguguacgagcugcagacccuggagcugaacauggagacccugaacaugaccaugccccugagcugcaccaagaacaacagccaccacuacaucauggugggcaacgagaccggccuggagcugacccugaccaacaccagcaucaucaaccacaaguucugcaaccugagcgacgcccacaagaagaaccuguacgaccacgcccugaugagcaucaucagcaccuuccaccugagcauccccaacuucaaccaguacgaggccaugagcugcgacuucaacggcggcaagaucagcgugcaguacaaccugagccacagcuacgccggcgacgccgccaaccacugcggcaccguggccaacggcgugcugcagaccuucaugagaauggccuggggcggcagcuacaucgcccuggacagcggcugcggcaacugggacugcaucaugaccagcuaccaguaccugaucauccagaacaccaccugggaggaccacugccaguucagcagacccagccccaucggcuaccugggccugcugagccagagaaccagagacaucuacaucagcagaagacugcugggcaccuucaccuggacccugagcgacagcgagggcgaggacacccccggcggcuacugccugaccagauggaugcugaucgaggccgagcugaagugcuucggcaacaccgccguggccaagugcaacgagaagcacgacgaggaguucugcgacaugcugagacuguucgacuucaacaagcaggccauccagagacugaaggccgaggcccagaugagcauccagcugaucaacaaggccgugaacgcccugaucaacgaccagcugaucaugaagaaccaccugagagacaucaugugcauccccuacugcaacuacagcaaguacugguaccugaaccacaccaccaccggcagaaccagccugcccaagugcuggcuggugagcaacggcagcuaccugaacgagacccacuucagcgacgacaucgagcagcaggccgacaacaugaucaccgagaugcugcagaaggaguacauggagagacagggcaagaccccccugggccugguggaccuguucguguucagcaccagcuucuaccugaucagcaucuuccugcaccuggugaagauccccacccacagacacaucgugggcaagagcugccccaagccccacagacugaaccacaugggcaucugcagcugcggccuguacaagcagcccggcgugcccgugaaguggaagagaugaggacuaguuauaagacugacuagcccgaugggccucccaacgggcccuccuccccuccuugcaccgagauuaauaaaaaaaaaaaaaaaaaaaaaaaaaaaaaaaaaaaaaaaaaaaaaaaaaaaaaaaaaaaaaaaaaaaaaaaaaaaaaaaaaaaaaaaaaaaaaaaaaaaa

SEQ ID NO: 36481 - RNA, 1665 nt, Artificial Sequence
  mRNA product Design i-3 (A100) comprising derived and/or modified sequence from LASV(LM765-SLE-2012;Clade IV)__AIT17814__GPCmut9 (opt4)
aggagaaagcuuaccaugggccagaucgugaccuucuuccaggaggugccccacgugaucgaggaggugaugaacaucgugcugaucgcccugagcauccuggccgugcugaagggccuguacaacuucgccaccugcggccuggugggccuggugaccuuccugcugcugugcggcagaagcugcaccaccagccuguacaagggcguguacgagcugcagacccuggagcugaacauggagacccugaacaugaccaugccccugagcugcaccaagaacaacagccaccacuacaucauggugggcaacgagaccggccuggagcugacccugaccaacaccagcaucaucgaccacaaguucugcaaccugagcgacgcccacagaaagaaccuguacgaccacgcccugaugagcaucaucagcaccuuccaccugagcauccccaacuucaaccaguacgaggccaugagcugcgacuucaacggcggcaagaucagcgugcaguacaaccugagccacagcuacgccaaggacgccgccgaccacugcggcaccguggccaacggcgugcugcagaccuucaugagaauggccuggggcggcagcuacaucgcccuggacagcggcugcggcagaugggacugcaucaugaccagcuaccaguaccugaucauccagaacaccaccugggaggaccacugccaguucagcagacccagccccaucggcuaccugggccugcugagccagagaaccagagacaucuacaucagcagaagacugcugggcaccuucaccuggacccugagcgacagcgagggcaaggacacccccggcggcuacugccugaccagauggaugcugaucgaggccgagcugaagugcuucggcaacaccgccguggccaagugcaacgagaagcacgacgaggaguucugcgacaugcugagacuguucgacuucaacaagcaggccauccagagacugaaggccgaggcccagaugagcauccagcugaucaacaaggccgugaacgcccugaucaacgaccagcugaucaugaagaaccaccugagagacaucaugugcauccccuacugcaacuacagcaaguacugguaccugaaccacaccaccaccggcaagaccagccugcccaagugcuggcuggugagcaacggcagcuaccugaacgagacccacuucagcgacgacaucgagcagcaggccgacaacaugaucaccgagaugcugcagaaggaguacauggagagacagggcaagaccccccugggccugguggaccuguucguguucagcaccagcuucuaccugaucagcaucuuccugcaccuggugaagauccccacccacagacacaucgugggcaagcccugccccaagccccacagacugaaccacaugggcaucugcagcugcggccuguacaagcagcccggcgugcccgugaaguggaagagaugaggacuaguuauaagacugacuagcccgaugggccucccaacgggcccuccuccccuccuugcaccgagauuaauaaaaaaaaaaaaaaaaaaaaaaaaaaaaaaaaaaaaaaaaaaaaaaaaaaaaaaaaaaaaaaaaaaaaaaaaaaaaaaaaaaaaaaaaaaaaaaaaaaaa

SEQ ID NO: 36482 - RNA, 1665 nt, Artificial Sequence
  mRNA product Design i-3 (A100) comprising derived and/or modified sequence from LASV(LM776-SLE-2012;Clade IV)__AIT17824__GPCmut9 (opt4)
aggagaaagcuuaccaugggccagaucgugaccuucuuccaggaggugccccacgugaucgaggaggugaugaacaucgugcugaucgcccugagcauccuggccgugcugaagggccuguacaacuucgccaccugcggccuggugggccuggugaccuuccugcugcugugcggcagaagcugcaccaccagcguguacaagggcguguacgagcugcagacccuggagcugaacauggagacccugaacaugaccaugccccugagcugcaccaagaacaacagccaccacuacaucauggugggcaacgagaccggccuggagcugacccugaccaacaccagcaucaucaaccacaaguucugcaaccugagcgacgcccacaagaagaaccuguacgaccacgcccugaugagcaucaucagcaccuuccaccugagcauccccaacuucaaccaguacgaggccaugagcugcgacuucaacggcggcaagaucagcgugcaguacaaccugagccacagcuacgccggcgacgccgccaaccacugcggcaccguggccaacggcgugcugcagaccuucaugagaauggccuggggcggcagcuacaucgcccuggacagcggcugcggcaagugggacugcaucaugaccagcuaccaguaccugaucauccagaacaccaccugggaggaccacugccaguucagcagacccagccccaucggcuaccugggccugcugagccagagaaccagagacaucuacaucagcagaagacugcugggcaccuucaccuggacccugagcgacagcgagggcaaggacacccccggcggcuacugccugaccagauggaugcugaucgaggccgagcugaagugcuucggcaacaccgccguggccaagugcaacgagaagcacgacgaggaguucugcgacaugcugagacuguucgacuucaacaagcaggccauccagagacugaaggccgaggcccagaugagcauccagcugaucaacaaggccgugaacgcccugaucaacgaccagcugaucaugaagaaccaccugagagacaucaugugcauccccuacugcaacuacagcaaguacugguaccugaaccacaccaccaccggcaagaccagccugcccaagugcuggcuggugagcaacggcagcuaccugaacgagacccacuucagcgacgacaucgagcagcaggccgacaacaugaucaccgagaugcugcagaaggaguacauggagagacagggcaagaccccccugggccugguggaccuguucguguucagcaccagcuucuaccugaucagcaucuuccugcaccuggugaagauccccacccacagacacaucgugggcaagagcugccccaagccccacagacugaaccacaugggcaucugcagcugcggccuguacaagcagcccggcgugcccgugagauggaagagaugaggacuaguuauaagacugacuagcccgaugggccucccaacgggcccuccuccccuccuugcaccgagauuaauaaaaaaaaaaaaaaaaaaaaaaaaaaaaaaaaaaaaaaaaaaaaaaaaaaaaaaaaaaaaaaaaaaaaaaaaaaaaaaaaaaaaaaaaaaaaaaaaaaaa

SEQ ID NO: 36483 - RNA, 1665 nt, Artificial Sequence
  mRNA product Design i-3 (A100) comprising derived and/or modified sequence from LASV(Mad39;Clade IV)__ANH09722__GPCmut9 (opt4)
aggagaaagcuuaccaugggccagaucgugaccuucuuccaggaggugccccacgugaucgaggaggugaugaacaucgugcugaucgcccugagcauccuggccgugcugaagggccuguacaacguggccaccugcggccugaucggccuggugaccuuccugcugcugugcggcagaagcugcaccaccacccuguacaagggcguguacgagcugcaggcccuggagcugaacauggagacccugaacaugaccaugccccugagcugcaccaagaacaacagccaccacuacaucagagugggcaacgagaccggccuggagcugacccugaccaacaccagccugaucaaccacaaguucugcaaccugagcgacgcccacaagaagaaccuguacgaccacgcccugaugagcaucaucagcaccuuccaccugagcauccccaacuucaaccaguacgaggccaugagcugcgacuucaacgacggcaagaucagcgugcaguacaaccugagccacaccuacgccggcgacaccgccaaccacugcggcaccguggccaacggcgugcugcagaccuucaugagaauggccuggggcggcagcuacaucgcccuggacagcggcugcggcggcugggacugcaucaugaccagcuaccaguaccugaucauccagaacaccaccugggaggaccacugccaguucagcagacccagccccaucggcuaccugggccugcugagccagagaaccagagacaucuacaucagcagaagacugcugggcaccuucaccuggacccugagcgacagcgagggcaaggacacccccggcggcuacugccugaccagauggaugcugaucgaggccgagcugaagugcuucggcaacaccgccguggccaagugcaacgagaagcacgacgaggaguucugcgacaugcugagacuguucgacuucaacaagcaggccauccagagacugaaggccgaggcccagaugagcauccagcugaucaacaaggccgugaacgcccugaucaacgaccagcugaucaugaagaaccaccugagagacaucaugugcauccccuacugcaacuacagcaaguacugguaccugaaccacaccgugaccggcaagaccagccugcccaagugcuggcuggugagcaacggcagcuaccugaacgagacccacuucagcgacgacaucgagcagcaggccgacaacaugaucaccgagaugcugcagaaggaguacauggagagacagggcaagaccccccugggccugguggaccuguucguguucagcaccagcuucuaccugaucagcaucuuccugcaccuggugaagauccccacccacagacacguggugggcaagcccugccccaagccccacagacugaaccacaugggcaucugcagcugcggcuucuacaagcagcccggcgugcccgugagauggaagagaugaggacuaguuauaagacugacuagcccgaugggccucccaacgggcccuccuccccuccuugcaccgagauuaauaaaaaaaaaaaaaaaaaaaaaaaaaaaaaaaaaaaaaaaaaaaaaaaaaaaaaaaaaaaaaaaaaaaaaaaaaaaaaaaaaaaaaaaaaaaaaaaaaaaa

SEQ ID NO: 36484 - RNA, 1665 nt, Artificial Sequence
  mRNA product Design i-3 (A100) comprising derived and/or modified sequence from LASV(Z0947-SLE-2011;Clade IV)__AIT17840__GPCmut9 (opt4)
aggagaaagcuuaccaugggccagaucgugaccuucuuccaggaggugccccacgugaucgaggaggugaugaacaucgugcugaucgcccugagcauccuggccgugcugaagggccuguacaacuucgccaccugcggccuggugggccuggugaccuuccugcugcugugcggcagaagcugcaccaucagccuguacaagggcguguacgagcugcagacccuggagcugaacauggagacccugaacaugaccaugccccugagcugcaccaagaacaacagccaccacuacaucauggugggcaacgagaccggccuggagcugacccugaccaacaccagcaucaucaaccacaaguucugcaaccugagcgacgcccacaagaagaaccuguacgaccacgcccugaugagcaucaucagcaccuuccaccugagcauccccaacuucaaccaguacgaggccaugagcugcgacuucaacggcggcaagaucagcgugcaguacaaccugagccacagcuacgccggcgacgccgccaaccacugcggcaccguggccaacggcgugcugcagaccuucaugagaauggccuggggcggcagcuacaucgcccuggacagcggcugcgacagaugggacugcaucaugaccagcuaccaguaccugaucauccagaacaccaccugggaggaccacugccaguucagcagacccagccccaucggcuaccugggccugcugagccagagaaccagagacaucuacaucagcagaagacugcugggcaccuucaccuggacccugagcgacagcgagggcaaggacacccccggcggcuacugccugaccagauggaugcugaucgaggccgagcugaagugcuucggcaacaccgccguggccaagugcaacgagaagcacgacgaggaguucugcgacaugcugagacuguucgacuucaacaagcaggccauccagagacugaaggccgaggcccagaugagcauccagcugaucaacaaggccgugaacgcccugaucaacgaccagcugaucaugaagaaccaccugagagacaucaugugcauccccuacugcaacuacagcaaguacugguaccugaaccacaccaccaccggcaagaccagccugcccaagugcuggcuggugagcaacggcagcuaccugaacgagacccacuucagcgacgacaucgagcagcaggccgacaacaugaucaccgagaugcugcagaaggaguacauggagagacagggcaagaccccccugggccugguggaccuguucguguucagcaccagcuucuaccugaucagcaucuuccugcaccuggugaagauccccacccacagacacaucgugggcaagcccugccccaagccccacagacugaaccacaugggcaucugcagcugcggccuguacaagcagcccggcgugcccgugaaguggaagagaugaggacuaguuauaagacugacuagcccgaugggccucccaacgggcccuccuccccuccuugcaccgagauuaauaaaaaaaaaaaaaaaaaaaaaaaaaaaaaaaaaaaaaaaaaaaaaaaaaaaaaaaaaaaaaaaaaaaaaaaaaaaaaaaaaaaaaaaaaaaaaaaaaaaa

SEQ ID NO: 36485 - RNA, 1665 nt, Artificial Sequence
  mRNA product Design i-3 (A100) comprising derived and/or modified sequence from LASV(Josiah;Clade IV)__NP_694870__GPCmut9 (opt5)
aggagaaagcuuaccaugggccagaucgugaccuucuuucaagaggucccccacguuauugaagaggugaugaacaucgugcugauugcccucagcguccuggcugugcuuaaggggcuguacaauuucgccacaugcggacucguuggccuggugacguuucuucugcucugugggagauccugcaccacaucucuguauaaaggagucuacgaacugcagacccucgagcugaacauggaaacacuuaauaugaccaugccucugagcuguacaaagaacaauucccaucacuauaucauggugggcaacgagaccgggcucgagcugacgcuuaccaauacaucuauuaucaaccauaaauucugcaaucugagcgacgcgcacaagaaaaaccucuacgaucaugcucugauguccaucauuucuaccuuucaccugagcaucccgaauuucaaccaguaugaagccauguccugugacuuuaauggaggcaagauuagcguucaguacaaccucucucacuccuaugccggcgaugcugccaaucauugcgggacaguggcuaacggaguccugcaaaccuucaugcggauggccuggggcgggagcuacaucgcgcuugacucuggauguggcaacugggauugcauuaugacguccuaccaguaucugaucauucagaauacaaccugggaggaccacugucaguuuagccgccccucuccuaucggguaccucggacugcuuucccaaagaacacgggauaucuauauuagccgcagacugcucggcaccuucaccuggacacuguccgacucugaaggcaaggauacgcccgggggauacugccugacccgguggaugcucaucgaggccgagcugaaauguuuuggcaacacagcuguggccaagugcaaugaaaaacaugacgaggaguucugcgauaugcuucgccuguuugacuucaacaagcaggcuauucagagacucaaagccgaagcgcagaugagcauccaacugauuaauaaggccgugaacgcucuuaucaaugaucagcugaucaugaagaaccaccuccgggacauuauguguaucccuuauugcaauuacuccaaauauugguaccugaaccacaccacaaccgggcgcacgagccugcccaaguguuggcucgucucuaauggauccuaccugaacgaaacacauuucagcgacgauauugagcagcaagccgacaauaugaucaccgagaugcuucagaaagaauauauggagagacagggcaagaccccucuggggcucguugaucuguuuguguucucuaccagcuuuuaccugauuuccaucuuccuucaccucgugaaaaucccgacacaucggcacauugucggaaagucuugccccaaaccucaucgccugaaccacaugggcaucuguagcugcggccuguauaagcagcccggggugccuguuaaguggaaaagaugaggacuaguuauaagacugacuagcccgaugggccucccaacgggcccuccuccccuccuugcaccgagauuaauaaaaaaaaaaaaaaaaaaaaaaaaaaaaaaaaaaaaaaaaaaaaaaaaaaaaaaaaaaaaaaaaaaaaaaaaaaaaaaaaaaaaaaaaaaaaaaaaaaaa

SEQ ID NO: 36486 - RNA, 1662 nt, Artificial Sequence
  mRNA product Design i-3 (A100) comprising derived and/or modified sequence from LASV(LP;Clade I)__AAF86701__GPCmut9 (opt5)
aggagaaagcuuaccaugggccagaucauuaccuucuuucaagaggugccccacgucaucgaagagguuaugaacauugugcugaucgcccucagccugcuugcuauucugaaggggcucuacaauaucgccacaugcggaaucauuggccugguggcguuccuuuuucugugugggaaauccugcucucucacgcugaagggaggcuaugaacugcagacccucgagcugaacauggaaacacuuaauaugaccaugccucugagcuguaccaaaaacuccucucaucacuacaucagagucgggaaugagacaggacucgagcugacacuuaccaacacgagcauuaucaaucauaaguucugcaaccuguccgacgcucacaaaaagaaucucuaugaucaugcccugaugucuauuaucagcaccuuucaccuguccauuccgaacuucaaucaguacgaagccaugagcugugacuuuaacggcggcaagaucucugugcaguauaaucucucccacagcuacgcuggggaugccgcugagcauugcggaacaguugccaacggcgugcugcaaaccuucaugcggauggcguggggagggcgcuauaucgcccuugacucuggcugugggaauugggauugcauuaugacauccuaccaguaccugaucauucagaacaccacgugggaagaccacugucaguuuagcagacccucuccuaucggauaucucggccugcuuucccaacggacacgcgauauuuacaucagcagacggcugcucggcaccuucacauggacccuguccgacucugaggggaacgagacccccggaggcuauugccugacacgcuggaugcucaucgaagcugagcugaaauguuuugggaauacggccgucgcuaagugcaacgaaaaacaugaugaggaguucugcgacaugcuuagacuguuugauuucaauaagcaggccauucggcgccucaaagcggaagcccagaugagcauccagcugauuaacaaggcugugaaugcccuuaucaacgaccaacugauuaugaagaaucaccucagagauaucauguguaucccuuacugcaacuauuccaaauacugguaucugaaucacaccagcucuggacggacaucccugcccaaguguuggcucauuagcaacggcucuuaccugaaugagacccaguucagcgacgacaucgaacagcaagcugauaacaugauuacagagaugcuucagaaagaauacaucgagcgccaggggaagaccccucugggacucguugacauuuuuaucuucuccacgucuuuuuaucugauuagcaucuuccugcaucuuaucaaaauuccgacacacagacauaucgugggcaagcccugcccuaaaccccaccggcucaaucauaugggcgucuguuccugcgggcuguacaagcacccuggagugcccaccaaguggaaacgcugaggacuaguuauaagacugacuagcccgaugggccucccaacgggcccuccuccccuccuugcaccgagauuaauaaaaaaaaaaaaaaaaaaaaaaaaaaaaaaaaaaaaaaaaaaaaaaaaaaaaaaaaaaaaaaaaaaaaaaaaaaaaaaaaaaaaaaaaaaaaaaaaaaaa

SEQ ID NO: 36487 - RNA, 1662 nt, Artificial Sequence
  mRNA product Design i-3 (A100) comprising derived and/or modified sequence from LASV(803213;Clade II)__AAF86703__GPCmut9 (opt5)
aggagaaagcuuaccaugggccagaucauuaccuucuuucaagaggugccccacgucaucgaagagguuaugaacauugugcugaucgcccucagccugcuugcuauucugaaggggaucuacaauguggccacaugcggacucuucggccugaucuccuuucuucugcucugugggagaucuugcagcgucacguauaaaggaguguacgaacugcagacccuggagcucaacauggcgaaucugaacaugacaaugccucuuuccuguaccaagaauaacucucaucacuauauuaugguuggcaaugaaacagggcuggagcucacccugacaaacaccagcaucauuaaucauaaauucugcaaccuuuccgacgcucacaagaaaaaucuguacgaucaugcccucaugucuaucauuagcacguuucaccuguccaucccgaacuucaaucaguaugaggccaugagcugugacuuuaacggaggcaagauuucugugcaguacaaucugucccacagcuucgcugucgaugccgcuaaccauugcggcaccaucgccaacggggugcuccaaacauuuaugcggauggcguggggaggcucuuauaucgcccuggacuccggguguggaaauugggauugcauuaugaccagcuaccaguaccuuaucauucagaacacaaccugggaagaccacugucaguucucucgccccuccccuaucggcuaucuggggcuccugagccaaagaacgcgggauauuuacaucucccgcagacuucugggaacauuuaccuggacacucucugacagcgagggcaaugaagcucccggcggguauugccugacccgguggaugcugaucgaggccgagcucaaguguuucggaaacaccgcuguugccaaaugcaaugaaaagcaugaugaggaauuuugcgacaugcugcgccuuuucgauuucaacaaacaggcgauuaagagacugaaaacagaggcccagauguccauccagcucauuaauaaggcugugaacgcccugaucaaugaccaacuuauuaugaagaaccaucugcgggauaucauguguaucccuuacugcaauuauagccgcuacugguaucucaaccacacggucaccggcaaaacaucucugcccagauguuggcugguguccaaugggagcuaccucaacgaaacccacuuuucugacgacauugagcagcaggcugauaauaugaucacagagaugcugcaaaaggaauacauggaccggcagggaaaaaccccucuuggccugguggaucucuucgucuuuagcacguccuucuaucugauuucuaucuuucugcaccuuguuaagauuccgacacaucgccacaucguggggaaacccugcccuaagccccauagacucaaccacaugggaauuuguagcugcggccuguacaaacacccuggcgugcccgucaaguggaagcggugaggacuaguuauaagacugacuagcccgaugggccucccaacgggcccuccuccccuccuugcaccgagauuaauaaaaaaaaaaaaaaaaaaaaaaaaaaaaaaaaaaaaaaaaaaaaaaaaaaaaaaaaaaaaaaaaaaaaaaaaaaaaaaaaaaaaaaaaaaaaaaaaaaaa

SEQ ID NO: 36488 - RNA, 1662 nt, Artificial Sequence
  mRNA product Design i-3 (A100) comprising derived and/or modified sequence from LASV(GA391;Clade III)__CAA36645__GPCmut9 (opt5)
aggagaaagcuuaccaugggccagaucgugaccuucuuucaagaggucccccacguuauugaagaggugaugaacaucgugcugauugcccucagcauccuggcuauucuuaaggggcuguacaaugucgccacaugcggacucaucggccuggugacguuccuucugcucuccgggagaucuuguagccugaucuauaaaggaaccuacgaacugcagacacucgagcugaacauggaaacccuuaauaugacaaugccucuguccugcaccaagaacaauucucaucacuauauucggguuggcaacgagacagggcucgagcugacccuuacgaauaccagcauccugaaccauaaauuuuguaaucucuccgacgcgcacaagcgcaaccuguacgaucauucucugaugagcauuaucuccacauuccaccucagcauuccgaauuuuaaccaguaugaagcuaugucuugcgacuucaauggaggcaaaaucaccgugcaguacaaccugucccacagcuuugccgucgaugccgcuggccauugugggacacuugccaauggagugcugcaaaccuucaugagaauggcuuggggcgggucuuauauugcccucgacuccggaugcggcaacugggauuguaucaugacgagcuaccaguaccugaucauucagaacacaaccugggacgaucacugccaguuuucucggcccuccccuaucggguaucuuggacugcucagccaacgcacaagagacauuuacaucucccggcgccugcugggcaccuucaccuggacacucucugauagcgagggcaaugaaacgcccgggggauauugucugaccagauggaugcuuauugaggcggagcugaagugcuuuggcaacacagccguugcuaaguguaaugaaaaacaugacgaggaguucugcgauaugcuccggcuguuugacuucaacaagcaggccauccgcagacuuaaaaccgaagcucagauguccauccagcugauuaauaaggccgugaacgcgcucaucaaugaucaacugauuaugaaaaaccaucugcgggacaucaugugcauuccuuacuguaauuauagccgcuacugguaucucaaccacacaucuaccgggaagacgucccugcccagaugcuggcuuaucagcaauggaucuuaccugaacgaaacaaaguucagcgacgauaucgagcagcaggccgacaauaugauuaccgagaugcuccaaaaagaauacaucgaucggcagggcaagaccccucuggggcuggucgaccuuuuuguguucuccacaucuuuuuaucucauuagcaucuuccugcaccuggugaaaauuccgacccaccgccauaucgucggaaagcccuguccuaaaccccacagacucaaccauaugggcauuugcuccuguggccuguacaagcagccugggguucccgugcgguggaaaagaugaggacuaguuauaagacugacuagcccgaugggccucccaacgggcccuccuccccuccuugcaccgagauuaauaaaaaaaaaaaaaaaaaaaaaaaaaaaaaaaaaaaaaaaaaaaaaaaaaaaaaaaaaaaaaaaaaaaaaaaaaaaaaaaaaaaaaaaaaaaaaaaaaaaa

SEQ ID NO: 36489 - RNA, 1665 nt, Artificial Sequence
  mRNA product Design i-3 (A100) comprising derived and/or modified sequence from LASV(AV;Clade V)__CCA30314__GPCmut9 (opt5)
aggagaaagcuuaccaugggccagaucgugaccuucuuucaagaggucccccacguuauugaagaggugaugaacaucgugcugauugcccucagcauccuggcuguccuuaaggggcuguacaauauugccacaugcggacucaucggccugaucacguuccuucugcucugugggagauccugcucuagcaaccuguauaaaggaguguacgaacugcagucccucgaccugaauauggagacccuuaacaugacaaugccucugucuuguaccaagaauaacagccaucacuauauucggguuggcaaugauacagggcucgaacugacccuuacaaacaccuccauccugaaucauaaauuuugcaaccucucugacgcgcacaagaaagaucuguacgaccaugcucugaugagcauuaucuccacguuccaccucagcauuccgaauuuuaaccaguaugaggccaugucuugugauuucaauggaggcaagaucuccgugcaguacaaccugagccacucuuaugccauugacgcugccaaucauugcggcaccgucgcuaacgggauccuucaaacauuuaugcgcauggccuggggaggcuccuacaucgcgcuggauagcggguguggaaacugggacugcauuaugaccucuuaccaguaucucaucauucagaauacaaccugggagaaccacugucaguucuccagacccagcccuaucggcuaccuggggcuucugucccaacggacgcgcgauauuuauaucucuagacggcuccugggaacauuuaccuggacacugagcgacuccgaaggcaaugccacccccggcggguacugccucacccgcuggaugcugaucgaggcugaacuuaaguguuucggaaacacagccguggcuaaaugcaaugagaagcaugaugaggaauuuugcgacaugcugagacucuucgauuuuaacaaacaggccauuagccggcugaagucugaggcgcagauguccauccagcuuauuaauaaagccguuaacgcucugaucaaugaccaacucauuaugaagaaccaucugcgcgacaucauguguaucccuuauugcaauuacagcaaguauugguaccugaaccacacgauuaccggcaaaacaucucuccccaaguguuggcuggugagcaauggguccuaccuuaacgaaacccacuucucugaugacaucgagcagcaggccgauaauaugauuacagaaaugcugcaaaaagaguauauggagagacagggaaagaccccucucggccuggucgaccuguucguguuuagcacguccuucuaccuuaucagcauuuuucuccggcuggugaaaaucccgacacaccgccauauugucgggaagcccugcccuaaaccccacagacugaaccauaugggaaucuguucuugcggccucuauaagcagccuggcguucccgugcgguggaagcgcugaggacuaguuauaagacugacuagcccgaugggccucccaacgggcccuccuccccuccuugcaccgagauuaauaaaaaaaaaaaaaaaaaaaaaaaaaaaaaaaaaaaaaaaaaaaaaaaaaaaaaaaaaaaaaaaaaaaaaaaaaaaaaaaaaaaaaaaaaaaaaaaaaaaa

SEQ ID NO: 36490 - RNA, 1662 nt, Artificial Sequence
  mRNA product Design i-3 (A100) comprising derived and/or modified sequence from LASV(Togo/2016/7082;Clade VI)__AMR44577__GPCmut9 (opt5)
aggagaaagcuuaccaugggccagaucauuaccuucuuucaagaggugccccacgucaucgaagagguuaugaacauugugcugaucgcccucagccugcuugcuauucugaaggggguguacaaugucgccacaugcggaaucaucggccucgugacguuccuguuucuuugugggagauccugcucucugauuuauaaaggaagcuacgaacuccagacccuggagcugaacauggaaacacucaauaugaccaugccucuguccuguacaaagaacucuagccaucacuauauccggguuggcaaugagaccgggcuugagcugacacucaccaacacguccauuaucaaucauaaauucugcaaccugucugacgcgcacaagcgcaaucuuuacgaucaugcucugaugagcauucucuccaccuuucaccugagcaucccgaacuucaaucaguaugaagccaugucuugugacuuuaacggaggcaaaauuuccgugcaguacaaucugagccacgccuaugcugucgaugccgcugagcauugcggcacaguggccaacgggguucuccaaaccuucaugagaauggcguggggaggcucuuacaucgcccuggacuccggguguggaaauugggauugcaucaugacaagcuaccaguaucuuauuauccagaacaccacgugggaagaccacugucaguuuucucggcccuccccuauuggcuaccuggggcuccugagccaacgcacaagagauaucuauauuucccggcgccuucugggaaccuucacauggacccucucugacagcgagggcaacgagacccccggcggguacugccugacaagauggaugcugaucgaagcugagcucaaguguuuuggaaauacggccguggcuaagugcaacgaaaaacaugaugaggaguucugcgacaugcugcggcuuuuugauuucaauaagcaggccauccagcgccugaaauccgaagcgcagaugagcauucaacucaucaacaaggccgucaaugcucugauuaacgaccagcuuaucaugaaaaaucaccugagagauaugauguguauuccuuauugcaacuacucuaaguauugguaccucaaucacaccuccagcggccggacaucucugcccaaguguuggcuggugagcaacggguccuaccucaaugagacccauuucucugacgacaucgaacagcaagccgauaacaugaucacagagaugcugcagaaagaauauauugaccgccagggaaagaccccucuuggccugguggaucucuuugucuucagcacguccuuuuaccugaucagcauuuuccugcaccuuaucaaaauuccgacacauagacacaucguugggaagcccugcccuaaaccccaucggcucaaucacaugggaauuuguucuugcggccuguauaagcagccuggcgugcccacccgcuggaaaagaugaggacuaguuauaagacugacuagcccgaugggccucccaacgggcccuccuccccuccuugcaccgagauuaauaaaaaaaaaaaaaaaaaaaaaaaaaaaaaaaaaaaaaaaaaaaaaaaaaaaaaaaaaaaaaaaaaaaaaaaaaaaaaaaaaaaaaaaaaaaaaaaaaaaa

SEQ ID NO: 36491 - RNA, 1662 nt, Artificial Sequence
  mRNA product Design i-3 (A100) comprising derived and/or modified sequence from LASV(KAK-428;Clade n.d. (VII))__ANH09740__GPCmut9 (opt5)
aggagaaagcuuaccaugggccagaucgugaccuucuuucaagaggucccccacguuauugaagaggugaugaacaucgugcugauugcccucagccugcuugcuauccugaaggggcucuacaauuucgccacaugcggagucauuggccugaucacguuucuucugcucugugggagauccugcucugcgaccuauaaaggacaguacgaacugcagacacuggagcucaacauggaaagccugaauaugaccaugccucuuuccuguacaaagaacaauucucaucacuauauccgggcuggcaacaauaccgggcuggagcucacacugaccaacacgagcauuaucucccauaaauucugcaaucuuucugacgcccacaagaaaaaccuguacgaucauacccucaugagcauuaucacaaccuuucaccuguccauuccgaauuucaaccaguaugaggccaugagcugugacuuuaauggaggcaagaucucuauucaauacaaccugucccacagcuaugcuggcgaugccgcucagcauugcgggacaguggccaauggaguucuccagaccuucaugcgcauggcguggggcgggucuuaccuggcccuugacuccggauguagaggcugggauugcaucaucagcucuuaccaguaucugauuauccaaaacacgacaugggacgaucacugucaguuuucccggcccagcccuauuggguaccucggauucgugucccagaagacccgcgacaucuauauuucuagacggcugcuuggcacauuuaccuggacccugagcgauuccgaaggccaugacaugcccgggggauacugccucacacgcuggaugcugaucgaggcugaucugaaauguuucggcaacacggccgucgcuaagugcaaugaaaaacacgacgaggaguuuugcgauauguggagacucuucgacuucaacaagcaggccauccaacggcugaaagcggaagcccagaugaauauucagcuuaucaacaaggcugugaaugcccugauuaacgaccaacucaugaugaagaaucaucugcgcgauaucauguguauuccuuauugcaacuacagcaaauuuugguaucuuaauaacaccacaaccgggagaacaucucugccccgguguuggcucaucuccaauggaagcuaccugaacgagacccacuucucugacgauaucgaacagcaggcugacaauaugauuacggagaugcugcagaaggaauacauggaucgccaaggcaaaacaccucucgggcugguugaccuuuuuguguucagcaccuccuuuuaucugaucaccauuuuccuccaccuggucaagaucccgacacauagacacauugugggaaaacccugcccuaagccccaucggcugaaccacaugggcaucuguucuugcggccuuuacaaacagccuggggugcccguccgcuggaagagaugaggacuaguuauaagacugacuagcccgaugggccucccaacgggcccuccuccccuccuugcaccgagauuaauaaaaaaaaaaaaaaaaaaaaaaaaaaaaaaaaaaaaaaaaaaaaaaaaaaaaaaaaaaaaaaaaaaaaaaaaaaaaaaaaaaaaaaaaaaaaaaaaaaaa

SEQ ID NO: 36492 - RNA, 1662 nt, Artificial Sequence; identical to SEQ ID NO: 36486
  mRNA product Design i-3 (A100) comprising derived and/or modified sequence from LASV(Pinneo-NIG-1969;Clade I)__AIT17836__GPCmut9 (opt5)

SEQ ID NO: 36493 - RNA, 1662 nt, Artificial Sequence
  mRNA product Design i-3 (A100) comprising derived and/or modified sequence from LASV(ISTH0009-NIG-2011;Clade II)__AIT17404__GPCmut9 (opt5)
aggagaaagcuuaccaugggccagaucauuaccuucuuucaagaggugccccacgucaucgaagagguuaugaacauugugcugaucgcccucagccugcuugcuauucugaaggggaucuacaauguggccacaugcggacucuucggccuggucuccuuucuucugcucugugggagaucuugcagcacgaccuauaaaggaguguacgaacugcagacacuggagcucgacauggcgucccugaacaugaccaugccucuuucuuguacaaagaauaacagccaucacuauaucaugguuggcaaugaaaccgggcuggagcucacacugaccaacacguccauuaucaaucauaaauucugcaaccuuucugaugcucacaagaaaaaucuguacgaccaugcccucaugagcauuaucuccaccuuucaccugagcauuccgaacuucaaucaguaugaggccaugucuugugauuuuaacggaggcaagaucuccgugcaguacaaucugagccacgcuuaugccgucgacgcugccaaccauugcggcacaauugcgaauggggugcuccaaaccuucaugcggauggccuggggaggcucuuacaucgcucuggauuccggguguggaagcugggacugcaucaugacaucuuaccaguaucuuauuauccagaacaccacgugggaagaucacugucaguuuucccgccccagcccuauuggcuaccuggggcuccugucccaaagaacacgggacaucuauauuucucgcagacuucugggaaccuucacauggacccucagcgauuccgagggcaacgaaacccccggcggguacugccugacacgguggaugcugaucgaggccgagcucaaguguuuuggaaauacggcuguugccaaaugcaacgaaaagcaugacgaggaguucugcgauaugcugcgccuuuuugacuucaauaaacaggcgaucagacggcugaagaccgaagcccagaugagcauucagcucaucaacaaagcugugaaugcccugauuaacgaucaacuuaucaugaagaaucaucugcgcgacauuauguguaucccuuauugcaacuacucuaaguauugguaccucaaucacacagucaccggcaaaacaucccugcccagauguuggcuggugagcaacgggucuuaccucaaugaaacccacuucagcgacgauaucgagcagcaggcugacaacaugauuacggagcugcuucaaaaggaauauauggaucggcagggaaaaacaccucugggccucguggaccuguuugucuucuccaccucuuuuuaccugaucagcauuuuccuucaccucaucaagauuccgacccaucgccacaucacagggaaacccugcccuaagccccauagacugaaucacaugggaauuuguuccugcggccuguauaaacacccuggcguucccgugaaguggaagcggugaggacuaguuauaagacugacuagcccgaugggccucccaacgggcccuccuccccuccuugcaccgagauuaauaaaaaaaaaaaaaaaaaaaaaaaaaaaaaaaaaaaaaaaaaaaaaaaaaaaaaaaaaaaaaaaaaaaaaaaaaaaaaaaaaaaaaaaaaaaaaaaaaaaa

SEQ ID NO: 36494 - RNA, 1662 nt, Artificial Sequence
  mRNA product Design i-3 (A100) comprising derived and/or modified sequence from LASV(ISTH2010-NIG-2012;Clade II)__AIT17482__GPCmut9 (opt5)
aggagaaagcuuaccaugggccagaucauuaccuucuuucaagaggugccccacgucaucgaagagguuaugaacauugugcugaucgcccucagccugcuugcuauucugaaggggaucuacaauguggccacaugcggacucuucggccuggucuccuuucuucugcucugugggagaucuugcagcacgaccuauaaaggaguguacgaacugcagacacuggagcucgacauggcgucccugaacaugaccaugccucuuucuuguacaaagaauaacagccaucacuauaucaugguuggcaaugaaaccgggcuggagcucacacugaccaacacguccauuaucaaucauaaauucugcaaccuuucugaugcucacaagaaaaaucuguacgaccaugcccucaugagcauuaucuccaccuuucaccugagcauuccgaacuucaaucaguaugaggccaugucuugugauuuuaacggaggcaagaucuccgugcaguacaaucugagccacgcuuaugccgucgacgcugccaaccauugcggcacaauugcgaauggggugcuccaaaccuucaugcggauggccuggggaggcucuuacaucgcucuggauuccggguguggaagcugggacugcaucaugacaucuuaccaguaucuuauuauccagaacauuaccugggaagaucacugucaguuuucccgccccagcccuaucggcuaccuggggcuccugucccaaagaacgcgggacauuuauaucucucgcagacuucugggaacauucaccuggacacucagcgauuccgagggcaacgaaacccccggcggguacugccugacccgguggaugcugaucgaggccgagcucaaguguuuuggaaauacagcuguugccaaaugcaacgaaaagcaugacgaggaguucugcgauaugcugcgccuuuuugacuucaauaaacaggcgauuagacggcugaagacggaagcccagaugagcauccagcucauuaacaaagcugugaaugcccugaucaacgaucaacuuauuaugaagaaucaucugcgcgacaucauguguaucccuuauugcaacuacucuaaguauugguaccucaaucacaccgucacaggcaaaaccucccugcccagauguuggcuggugagcaacgggucuuaccucaaugaaacacacuucagcgacgauauugagcagcaggcugacaacaugaucaccgagcugcuucaaaaggaauauauugaucggcagggaaaaacgccucugggccucguggaccuguuugucuucuccacaucuuuuuaccugaucagcauuuuccuucaccucguuaagaucccgacccaucgccacgugguggggaaacccugcccuaagccccauagacugaaucacaugggaauuuguuccugcggccuguauaaacacccuggcguccccgugaaguggaagcggugaggacuaguuauaagacugacuagcccgaugggccucccaacgggcccuccuccccuccuugcaccgagauuaauaaaaaaaaaaaaaaaaaaaaaaaaaaaaaaaaaaaaaaaaaaaaaaaaaaaaaaaaaaaaaaaaaaaaaaaaaaaaaaaaaaaaaaaaaaaaaaaaaaaa

SEQ ID NO: 36495 - RNA, 1662 nt, Artificial Sequence
  mRNA product Design i-3 (A100) comprising derived and/or modified sequence from LASV(Lassa virus/H.sapiens-wt/NGA/2015/ISTH_0543;Clade II)__AVO03639__GPCmut9 (opt5)
aggagaaagcuuaccaugggccagaucauuaccuucuuucaagaggugccccacgucaucgaagagguuaugaacauugugcugaucgcccucagccugcuugcuauucugaaggggaucuacaauguggccacaugcggacucuucggccuggucuccuuucuucugcucugugggagaucuugcagcacgaccuauaaaggaguguacgaacugcagacacuggagcucgacauggcgaaccugaauaugaccaugccucuuuccuguacaaagaacaauucucaucacuauaucaugguuggcaacgaaaccgggcuggagcucacacugaccaauacgagcauuaucaaccauaaauucugcaaucuuuccgaugcucacaagaaaaaccuguacgaccaugcccucaugucuauuaucagcaccuuucaccuguccauuccgaauuucaaccaguaugaggccaugagcugugauuuuaauggaggcaagaucucugugcaguacaaccugucccacacauaugcugucgacgccgcuaaucauugcggcaccauugccaacggggugcuccaaacauucaugcggauggcguggggaggcagcuacaucgcccuggauucuggguguggauccugggacugcaucaugaccagcuaccaguaucuuguuauucagaacacgacaugggaagaucacugucaguuuucucgccccuccccuaucggcuaccuggggcuccugagccaaagaacccgggacauuuauaucucccgcagacuucugggaacauucaccuggacccucucugauagcgagggcaaugaaacacccggcggguacugccugacgcgguggaugcugauugaggcugagcucaaguguuuuggaaacaccgccguggcuaaaugcaaugaaaagcaugacgaggaguucugcgauaugcugcgccuuuuugacuucaacaaacaggccaucagacggcugaagacagaagcgcagauguccauccagcucauuaauaaagccgucaacgcucugaucaaugaucaacuuauuaugaagaaccaucugcgcgacaucauguguauuccuuauugcaauuacagcaaguauugguaccucaaccacaccgugacaggcaaaaccucucugcccagauguuggcugguguccaaugggagcuaccucaacgaaacgcacuucucugacgauaucgagcagcaggccgacaauaugaucacagagcugcuucaaaaggaauauauugaucggcagggaaaaaccccucugggccucgucgaccuguuuguuuucagcaccuccuuuuaccugaucucuauuuuccuucaccucgugaagaucccgacacaucgccacauuaccgggaaacccugcccuaagccccauagacugaaccacaugggaaucuguagcugcggccuguauaaacacccuggcgugcccgucaaguggaagcggugaggacuaguuauaagacugacuagcccgaugggccucccaacgggcccuccuccccuccuugcaccgagauuaauaaaaaaaaaaaaaaaaaaaaaaaaaaaaaaaaaaaaaaaaaaaaaaaaaaaaaaaaaaaaaaaaaaaaaaaaaaaaaaaaaaaaaaaaaaaaaaaaaaaa

SEQ ID NO: 36496 - RNA, 1662 nt, Artificial Sequence
  mRNA product Design i-3 (A100) comprising derived and/or modified sequence from LASV(Lassa virus/H.sapiens-wt/NGA/2016/ISTH_0009;Clade II)__AVO03571__GPCmut9 (opt5)
aggagaaagcuuaccaugggccagaucauuaccuucuuucaagaggugccccacgucaucgaagagguuaugaacauugugcugaucgcccucagccugcuugcuauucugaaggggaucuacaauguggccacaugcggacuccugggccuugucuccuuccugcuccugugugggagaucuugcagcacgaccuauaaaggaguguacgaacugcagacacucgagcuggacauggcgucccuuaacaugaccaugccucugucuuguacaaagaauaacagccaucacuauaucaugguuggcaaugaaaccgggcucgagcugacacuuaccaacacguccauuaucaaucauaaauuuugcaaccugucugaugcucacaagaaaaaucucuacgaccaugcccugaugagcauuaucuccaccuuccaccugagcauuccgaacuuuaaucaguaugaggccaugucuugugauuucaacggaggccggaucuccgugcaguacaaucucagccacucuuaugcugucgacgccgcuaaccauugcggcacaauugccaauggggugcugcaaaccuuuaugcgcauggcguggggaggcuccuacaucgcccuugauagcggguguggaucuugggacugcaucaugacauccuaccaguaucugauuauccagaacaccacgugggaagaucacugucaguucagcagacccuccccuauuggcuaccucgggcugcuuucucaacggacacgcgacaucuauauuagcagacggcugcucggaaccuuuacauggacccuguccgauagcgagggcaacgaaacccccggcggguacugccugacacgcuggaugcucaucgaggcugagcugaaguguuucggaaauacggccguugcuaagugcaacgaaaaacaugacgaggaauuuugcgauaugcuuagacuguucgacuuuaauaagcaggccauccggcgccucaaaaccgaggcgcagaugucuauucagcugaucaacaaggccgugaaugcucuuauuaacgaucaacugaucaugaaaaaucaccucagagacauuauguguaucccuuauugcaacuacuccaaguauugguaccugaaucacacagucaccggcaagacaagccugccccgguguuggcucgugucuaacgggagcuaccugaaugaaacccauuucuccgacgauaucgagcagcaggccgacaacaugauuacggagcuucugcaaaaagaauauaucgaucgccagggaaagacaccucucggccugguggaccuguucgucuuuucuaccagcuucuaccuuauuuccaucuuucuccaccugguuaaaauuccgacccauagacacaucacagggaagcccugcccuaaaccccaucggcugaaucacaugggaauuuguagcugcggccucuauaaccacccuggcgugcccgugaaguggaaacgcugaggacuaguuauaagacugacuagcccgaugggccucccaacgggcccuccuccccuccuugcaccgagauuaauaaaaaaaaaaaaaaaaaaaaaaaaaaaaaaaaaaaaaaaaaaaaaaaaaaaaaaaaaaaaaaaaaaaaaaaaaaaaaaaaaaaaaaaaaaaaaaaaaaaa

SEQ ID NO: 36497 - RNA, 1662 nt, Artificial Sequence
  mRNA product Design i-3 (A100) comprising derived and/or modified sequence from LASV(Lassa virus/H.sapiens-wt/NGA/2016/ISTH_0017;Clade II)__AVO03567__GPCmut9 (opt5)
aggagaaagcuuaccaugggccagaucauuaccuucuuucaagaggugccccacgucaucgaagagguuaugaacauugugcugaucgcccucagccugcuugcuauucugaaggggaucuacaauguggccacaugcggacucuucggccuggucuccuuucuucugcucugugggagaucuugcagcacgaccuauaaaggaguguacgaacugcagacacuggagcucgacauggcgucccugaacaugaccaugccucuuucuuguacaaagaauaacagccaucacuauaucaugguuggcaaugaaaccgggcuggagcucacacugaccaacacguccauuaucaaucauaaauucugcaaccuuucugaugcucacaagaaaaaucuguacgaccaugcccucaugagcauuaucuccaccuuucaccugagcauuccgaacuucaaucaguaugaggccaugucuugugauuuuaacggaggcaagaucuccgugcaguacaaucugagccacacauaugcuauugacgccgcuaaccauugcggcaccaucgccaaugggguccuccaaacauucaugcggauggcguggggaggcucuuacaucgcccuggauuccggguguggaagcugggacugcauuaugaccucuuaccaguaucuuaucauucagaacacgacaugggaagaucacugucaguuuucccgccccagcccuaucggcuaccuggggcuccugucccaaagaacccgggacauuuauaucucucgcagacuucugggaacauucaccuggacccucagcgauuccgagggcaacgaaacacccggcggguacugccugacgcgguggaugcugaucgaggcugagcucaaguguuuuggaaauaccgccguggcuaaaugcaacgaaaagcaugacgaggaguucugcgauaugcugcgccuuuuugacuucaauaaacaggccauuagacggcugaagacagaagcgcagaugagcauccagcucauuaacaaagccguuaaugcucugaucaacgaucaacuuauuaugaagaaucaucugcgcgacaucauguguaucccuuauugcaacuacucuaaguauugguaccucaaucacaccgugacaggcaaaaccucccugcccagauguuggcuggucagcaacgggucuuaccucaaugaaacgcacuucagcgacgauauugagcagcaggccgacaacaugaucacagagcugcuucaaaaggaauauauggaucggcagggaaaaaccccucugggccucguggaccuguuuguguucuccaccucuuuuuaccugauuagcaucuuccuucaccucguccgcauuccgacacauagacacguuaucgggaagcccugcccuaaaccccaucggcugaaucacaugggaauuuguuccugcggccuguauaagcacccuggcgugcccgugaaauggaagcgcugaggacuaguuauaagacugacuagcccgaugggccucccaacgggcccuccuccccuccuugcaccgagauuaauaaaaaaaaaaaaaaaaaaaaaaaaaaaaaaaaaaaaaaaaaaaaaaaaaaaaaaaaaaaaaaaaaaaaaaaaaaaaaaaaaaaaaaaaaaaaaaaaaaaa

SEQ ID NO: 36498 - RNA, 1662 nt, Artificial Sequence
  mRNA product Design i-3 (A100) comprising derived and/or modified sequence from LASV(Lassa virus/H.sapiens-wt/NGA/2018/ISTH_0959;Clade II)__AVV65099__GPCmut9 (opt5)
aggagaaagcuuaccaugggccagaucauuaccuucuuucaagaggugccccacgucaucgaagagguuaugaacauugugcugaucgcccucagccugcuugcuauucugaaggggaucuacaauguggucacaugcggacucuucggccugguguccuuucuucugcucugugggagaucuugcagcacgaccuauaaaggaguuuacgaacugcagacacuggagcucgacauggccucccugaacaugaccaugccucuuucuuguacaaagaauaacagccaucacuauaucauggugggcaaugaaaccgggcuggagcucacacugaccaacacguccauuaucaaucauaaauucugcaaccuuucugaugcgcacaagaaaaaucuguacgaccaugcucucaugagcauuaucuccaccuuucaccugagcauuccgaacuucaaucaguaugaggccaugucuugugauuuuaacggaggcaagaucuccguccaguacaaucugagccacgccuaugcuauugacgccgcuaaccauugcggcacaaucgccaauggggugcuccaaaccuucaugcggauggcguggggaggcucuuacaucgcccuggauuccggguguggaagcugggacugcauuaugacaucuuaccaguaucuuaucauucagaacaccacgugggaagaucacugucaguuuucccgccccagcccuaucggcuaccuggggcuccugucccaaagaacacgggacauuuauaucucucgcagacuucugggaaccuucacauggacccucagcgauuccgagggcaacgaaacccccggcggguacugccugacacgguggaugcugaucgaggcugagcucaaguguuuuggaaauacggccguugcuaaaugcaacgaaaagcaugacgaggaguucugcgauaugcugcgccuuuuugacuucaauaaacaggccauuagacggcugaagaccgaagcgcagaugagcauccagcucauuaacaaagccgugaaugcucugaucaacgaucaacuuauuaugaagaaucaucugcgcgacaucauguguaucccuuauugcaacuacucuaaguauugguaccucaaucacacagucaccggcaaaacaucccugcccagauguuggcuggugagcaacgggucuuaccucaaugaaacccacuucagcgacgauauugagcagcaggccgacaacaugaucacggagcugcuucaaaaggaauauauugaucggcagggaaaaacaccucugggccucguggaccuguuugucuucuccaccucuuuuuaccugaucagcauuuuccuucaccucguuaagaucccgacccaucgccacgugauugggaaacccugcccuaagccccauagacugaaucacaugggaaucuguuccugcggccuguauaaacacccuggcgugcccgucaaguggaagcggugaggacuaguuauaagacugacuagcccgaugggccucccaacgggcccuccuccccuccuugcaccgagauuaauaaaaaaaaaaaaaaaaaaaaaaaaaaaaaaaaaaaaaaaaaaaaaaaaaaaaaaaaaaaaaaaaaaaaaaaaaaaaaaaaaaaaaaaaaaaaaaaaaaaa

SEQ ID NO: 36499 - RNA, 1662 nt, Artificial Sequence
  mRNA product Design i-3 (A100) comprising derived and/or modified sequence from LASV(LASV003-NIG-2008;Clade II)__AIT17580__GPCmut9 (opt5)
aggagaaagcuuaccaugggccagaucauuaccuucuuucaagaggugccccacgucaucgaagagguuaugaacauugugcugaucgcccucagccugcuugcuauucugaaggggaucuacaauguggccacaugcggacucuucggccuggucuccuuucuucugcucugugggagaucuugcagcacgaccuauaaaggaguguacgaacugcagacacuggagcucgacauggcgucccugaacaugaccaugccucuuucuuguacaaagaauaacagccaucacuauaucaugguuggcaaugaaaccgggcuggagcucacacugaccaacacguccauuaucaaucauaaauucugcaaccuuucugaugcucacaagaaaaaucuguacgaccaugcccucaugagcauuaucuccaccuuucaccugagcauuccgaacuucaaucaguaugaggccaugucuugugauuuuaacggaggcaagaucuccgugcaguacaaucugagccacacauaugcugucgacgccgcuaaccauugcggcaccauugccaauggggugcuccaaacauucaugcggauggcguggggaggcucuuacaucgcccuggauuccggguguggaagcugggacugcaucaugaccucuuaccaguaucuuauuauccagaacacgacaugggaagaucacugucaguuuucccgccccagcccuauuggcuaccuggggcuccugucccaaagaacccgggacaucuauauuucucgcagacuucugggaacauucaccuggacccucagcgauuccgagagcaacgaaacacccggcggcuacugccugacgcgguggaugcugaucgaggcugagcucaaguguuuugggaauaccgccguugcuaaaugcaacgaaaagcaugacgaggaguucugcgauaugcugcgccuuuuugacuucaauaaacaggccaucagacggcugaaggcggaagcccagaugucuauucagcucaucaacaaagcugugaaugcccugauuaacgaucaacuuaucaugaagaaucaucugcgcgacauuauguguaucccuuauugcaacuacuccaaguauugguaccucaaucacacagucaccggaagaacaagccugccccgguguuggcuggugucuaacggcagcuaccucaaugaaacccacuucuccgacgauaucgagcagcaggcugacaacaugauuacggagcugcuucaaaaagaauauauggaucgccaggggaagacaccucugggacucguggaccuguuugucuucucuaccagcuuuuaccugaucuccauuuuccuucaccucguuaaaaucccgacccauagacacgugauuggcaagcccugcccuaaaccccaucggcugaaucacauggggaucuguagcugcggacuguauaagcacccuggcgugcccgucaaauggaagcgcugaggacuaguuauaagacugacuagcccgaugggccucccaacgggcccuccuccccuccuugcaccgagauuaauaaaaaaaaaaaaaaaaaaaaaaaaaaaaaaaaaaaaaaaaaaaaaaaaaaaaaaaaaaaaaaaaaaaaaaaaaaaaaaaaaaaaaaaaaaaaaaaaaaaa

SEQ ID NO: 36500 - RNA, 1662 nt, Artificial Sequence
  mRNA product Design i-3 (A100) comprising derived and/or modified sequence from LASV(LASV035-NIG-2009;Clade II)__AIT17588__GPCmut9 (opt5)
aggagaaagcuuaccaugggccagaucauuaccuucuuucaagaggugccccacgucaucgaagagguuaugaacauugugcugaucgcccucagccugcuugcuauucugaaggggaucuacaauguggccacaugcggacucuucggccuggucuccuuucuucugcucugugggagaucuugcagcacgaccuauaaaggaguguacgaacugcagacacuggagcucgacauggcgucccugaacaugaccaugccucuuucuuguacaaagaauaacagccaucacuauaucaugguuggcaaugaaaccgggcuggagcucacacugaccaacacguccauuaucaaucauaaauucugcaaccuuucugaugcucacaagaaaaaucuguacgaccaugcccucaugagcauuaucuccaccuuucaccugagcauuccgaacuucaaucaguaugaggccaugucuugugauuuuaacggaggcaagaucuccgugcaguacaaucugagccacgcuuaugccgucgacgcugccaaccauugcggcacaauugcgaauggggugcuccaaaccuucaugcggauggccuggggaggcucuuacaucgcucuggauuccggguguggaagcugggacugcaucaugacaucuuaccaguaucuuauuauccagaacaccacgugggaagaucacugucaguuuucccgccccagcccuauuggcuaccuggggcuccugucccaaagaacacgggacaucuauauuucucgcagacuucugggaaccuucacauggacccucagcgauuccgagggcaacgaaacccccggcggguacugccugacacgguggaugcugaucgaggccgagcucaaguguuuuggaaauacggcuguugccaaaugcaacgaaaagcaugacgaggaguucugcgauaugcugcgccuuuuugacuucaauaaacaggcgaucagacggcugaaggccgaagcucagaugagcauucagcucaucaacaaagccgugaaugcucugauuaacgaucaacuuaucaugaagaaucaucugcgcgacauuauguguaucccuuauugcaacuacucuaaguauugguaccucaaucacaccgucacaggcaaaaccucccugcccagauguuggcuggugagcaacgggucuuaccucaaugaaacacacuucagcgacgauaucgagcagcaggccgacaacaugauuaccgagcugcuucaaaaggaauauaucgaucggcagggaaaaacgccucugggccucguggaccuguuugucuucuccacaucuuuuuaccugauuagcaucuuccuucaccucguuaagauuccgacccaucgccacgugaucgggaaacccugcccuaagccccauagacugaaucacaugggaauuuguuccugcggccuguauaaacacccuggcgugcccgucaaguggaagcggugaggacuaguuauaagacugacuagcccgaugggccucccaacgggcccuccuccccuccuugcaccgagauuaauaaaaaaaaaaaaaaaaaaaaaaaaaaaaaaaaaaaaaaaaaaaaaaaaaaaaaaaaaaaaaaaaaaaaaaaaaaaaaaaaaaaaaaaaaaaaaaaaaaaa

SEQ ID NO: 36501 - RNA, 1662 nt, Artificial Sequence
  mRNA product Design i-3 (A100) comprising derived and/or modified sequence from LASV(LASV1000-NIG-2009;Clade II)__AIT17782__GPCmut9 (opt5)
aggagaaagcuuaccaugggccagaucauuaccuucuuucaagaggugccccacgucaucgaagagguuaugaacauugugcugaucgcccucagccugcuugcuauucugaaggggaucuacaauguggccacaugcggacucuucggccuggucuccuuucuucugcucugugggagaucuugcagcacgaccuauaaaggaguguacgaacugcagacacuggagcucgacauggcgucccugaacaugaccaugccucuuucuuguacaaagaauaacagccaucacuauaucaugguuggcaaugaaaccgggcuggagcucacacugaccaacacguccauuaucaaucauaaauucugcaaccuuucugaugcucacaagaaaaaucuguacgaccaugcccucaugagcauuaucuccaccuuucaccugagcauuccgaacuucaaucaguaugaggccaugucuugugauuuuaacggaggcaagaucuccgugcaguacaaucugagccacacauaugcugucgacgccgcuaaccauugcggcaccauugccaauggggugcuccaaacauucaugcggauggcguggggaggcucuuacaucgcccuggauuccggguguggaagcugggacugcaucaugaccucuuaccaguaucuuauuauccagaacacgacaugggaagaucacugucaguuuucccgccccagcccuauuggcuaccuggggcuccugucccaaagaacccgggacaucuauauuucucgcagacuucugggaacauucaccuggacccucagcgauuccgagggcaacgaaacacccggcggguacugccugacgcgguggaugcugaucgaggcugagcucaaguguuuuggaaauaccgccguugcuaaaugcaacgaaaagcaugacgaggaguucugcgauaugcugcgccuuuuugacuucaauaaacaggccaucaagagacugaaaacagaagcgcagaugagcauucagcucaucaacaaggccgugaaugcucugauuaacgaucaacuuaucaugaagaaucaucugcgggacauuauguguaucccuuauugcaacuacucuaaauauugguaccucaaucacaccgucacaggcaagaccucccugccccgcuguuggcuggugagcaacgggucuuaccucaaugaaacgcacuucagcgacgauaucgagcagcaggccgacaacaugauuacagagcugcuucaaaaagaauauaucgauagacagggaaagaccccucugggccucguggaccuguuugucuucuccaccucuuuuuaccugauuagcaucuuccuucaccucguuaaaauuccgacacaucggcacgugguggggaagcccugcccuaaaccccaucgccugaaucacaugggaaucuguuccugcggccuguauaagcacccuggcguccccgugaaguggaaaagaugaggacuaguuauaagacugacuagcccgaugggccucccaacgggcccuccuccccuccuugcaccgagauuaauaaaaaaaaaaaaaaaaaaaaaaaaaaaaaaaaaaaaaaaaaaaaaaaaaaaaaaaaaaaaaaaaaaaaaaaaaaaaaaaaaaaaaaaaaaaaaaaaaaaa

SEQ ID NO: 36502 - RNA, 1662 nt, Artificial Sequence
  mRNA product Design i-3 (A100) comprising derived and/or modified sequence from LASV(LASV221-NIG-2010;Clade II)__AIT17624__GPCmut9 (opt5)
aggagaaagcuuaccaugggccagaucauuaccuucuuucaagaggugccccacgucaucgaagagguuaugaacauugugcugaucgcccucagccugcuugcuauucugaaggggaucuacaauguggccacaugcggacucuucggccuggucuccuuucuucugcucugugggagaucuugcagcacgaccuauaaaggaguguacgaacugcagacacuggagcucgacauggcgucccugaacaugaccaugccucuuucuuguacaaagaauaacagccaucacuauaucaugguuggcaaugaaaccgggcuggagcucacacugaccaacacguccauuaucaaucauaaauucugcaaccuuucugaugcucacaagaaaaaucuguacgaccaugcccucaugagcauuaucuccaccuuucaccugagcauuccgaacuucaaucaguaugaggccaugucuugugauuuuaacggaggcaagaucuccgugcaguacaaucugagccacacauaugcuauugacgccgcuaaccauugcggcaccaucgccaaugggguccuccaaacauucaugcggauggcguggggaggcucuuacaucgcccuggauuccggguguggaagcugggacugcauuaugaccucuuaccaguaucuuaucauucagaacacgacaugggaagaucacugucaguuuucccgccccagcccuaucggcuaccuggggcuccugucccaaagaacccgggacauuuauaucucucgcagacuucugggaacauucaccuggacccucagcgauuccgagggcaacgaaacacccggcggguacugccugacgcgguggaugcugaucgaggcugagcucaaguguuuuggaaauaccgccguggcuaaaugcaacgaaaagcaugacgaggaguucugcgauaugcugcgccuuuuugacuucaauaaacaggccauuagacggcugaagacagaagcgcagaugagcauccagcucauuaacaaagccguuaaugcucugaucaacgaucaacuuauuaugaagaaucaucugcgcgacaucauguguaucccuuauugcaacuacucuaaguauugguaccucaaucacaccgugacaggcaaaaccucccugcccagauguuggcuggucagcaacgggucuuaccucaaugaaacgcacuucagcgacgauauugagcagcaggccgacaacaugaucacagagaugcugcaaaaggaauauauggaucggcagggaaaaaccccucuuggccugguggaccucuuuguguucuccaccucuuuuuaccugauuagcaucuuccugcaccuugucaagauuccgacacaucgccacguuaucgggaaacccugcccuaagccccauagacucaaucacaugggaauuuguuccugcggccuguauaaacacccuggcgugcccgugaaguggaagcggugaggacuaguuauaagacugacuagcccgaugggccucccaacgggcccuccuccccuccuugcaccgagauuaauaaaaaaaaaaaaaaaaaaaaaaaaaaaaaaaaaaaaaaaaaaaaaaaaaaaaaaaaaaaaaaaaaaaaaaaaaaaaaaaaaaaaaaaaaaaaaaaaaaaa

SEQ ID NO: 36503 - RNA, 1662 nt, Artificial Sequence
  mRNA product Design i-3 (A100) comprising derived and/or modified sequence from LASV(LASV237-NIG-2010;Clade II)__AIT17638__GPCmut9 (opt5)
aggagaaagcuuaccaugggccagaucauuaccuucuuucaagaggugccccacgucaucgaagagguuaugaacauugugcugaucgcccucagccugcuugcuauucugaaggggaucuacaauguggccacaugcggacucuucggccuggucuccuuucuucugcucugugggagaucuugcagcacgaccuauaaaggaguguacgaacugcagacacuggagcucgacauggcgucccugaacaugaccaugccucuuucuuguacaaagaauaacagccaucacuauaucaugguuggcaaugaaaccgggcuggagcucacacugaccaacacguccauuaucaaucauaaauucugcaaccuuucugaugcucacaagaaagaccuguacgaucaugcccucaugagcauuaucuccaccuuucaccugagcauuccgaauuucaaccaguaugaggccaugucuugugacuuuaauggaggcaagaucuccgugcaguacaaccugagccacacauaugcugucgaugccgcuaaucauugcggcaccauugccaacggggugcuccaaacauucaugcggauggcguggggaggcucuuacaucgcccuggacuccggguguggaagcugggauugcaucaugaccucuuaccaguaucuuauuauccagaauacgacaugggaagaccacugucaguuuucccgccccagcccuauuggcuaccuggggcuccugucccaaagaacccgggauaucuauauuucucgcagacuucugggaacauucaccuggacccucagcgacuccgagggcaacgaaacacccggcggguacugccugacgcgguggaugcugaucgaggcugagcucaaguguuuuggaaacaccgccguugcuaaaugcaaugaaaagcaugaugaggaguucugcgacaugcugcgccuuuuugauuucaacaaacaggccaucagacggcugaagacagaagcgcagaugagcauucagcucaucaauaaagccgugaacgcucugauuaaugaccaacuuaucaugaagaaccaucugcgcgacauuauguguaucccuuauugcaauuacucuaaguauugguaccucaaccacaccgucacaggcaaaaccucccugcccagauguuggcuggugagcaaugggucuuaccucaacgaaacgcacuucagcgaugacaucgagcagcaggccgauaauaugauuacagagcugcuucaaaaggaauauauggaccggcagggaaaaaccccucugggccucguggaucuguuugucuucuccaccucuuuuuaccugaucagcauuuuccuucaccucaucaagauuccgacacaucgccacaucaccgggaaacccugcccuaagccccauagacugaaccacaugggaauuuguuccugcggccuguauaaacacccuggcguucccgugaaguggaagcggugaggacuaguuauaagacugacuagcccgaugggccucccaacgggcccuccuccccuccuugcaccgagauuaauaaaaaaaaaaaaaaaaaaaaaaaaaaaaaaaaaaaaaaaaaaaaaaaaaaaaaaaaaaaaaaaaaaaaaaaaaaaaaaaaaaaaaaaaaaaaaaaaaaaa

SEQ ID NO: 36504 - RNA, 1662 nt, Artificial Sequence
  mRNA product Design i-3 (A100) comprising derived and/or modified sequence from LASV(LASV253-NIG-2011;Clade II)__AIT17670__GPCmut9 (opt5)
aggagaaagcuuaccaugggccagaucauuaccuucuuucaagaggugccccacgucaucgaagagguuaugaacauugugcugaucgcccucagccugcuugcuauucugaaggggaucuacaauguggccacaugcggacucuucggccuggucuccuuucuucugcucugugggagaucuugcagcacgaccuauaaaggaguguacgaacugcagacacuggagcucgacauggcgucccugaacaugaccaugccucuuucuuguacaaagaauaacagccaucacuauaucaugguuggcaaugaaaccgggcuggagcucacacugaccaacacguccauuaucaaucauaaauucugcaaccuuucugaugcucacaagaaaaaucuguacgaccaugcccucaugagcauuaucuccaccuuucaccugagcauuccgaacuucaaucaguaugaggccaugucuugugauuuuaacggaggcaagaucuccgugcaguacaaucugagccacacauaugcugucgacgccgcuaaccauugcggcaccauugccaauggggugcuccaaacauucaugcggauggcguggggaggcucuuacaucgcccuggauuccggguguggaagcugggacugcaucaugaccucuuaccaguaucuuauuauccagaacacgacaugggaagaucacugucaguuuucccgccccagcccuauuggcuaccuggggcuccugucccaaagaacccgggacaucuauauuucucgcagacuucugggaacauucaccuggacccucagcgauuccgagggcaacgaaacacccggcggguacugccugacgcgguggaugcugaucgaggcugagcucaaguguuuuggaaauaccgccguugcuaaaugcaacgaaaagcaugacgaggaguucugcgauaugcugcgccuuuuugacuucaauaaacaggccaucagacggcugaaggcggaagcccagaugagcauucagcucaucaacaaagcugugaaugcccugauuaacgaucaacuuaucaugaagaaucaucugcgcgacauuauguguaucccuuauugcaacuacucuaaguauugguaccucaaucacacagucaccggcagaacaucccugccccgguguuggcuggugagcaacgggucuuaccucaaugaaacccacuucagcgacgauaucgagcagcaggcugacaacaugauuacggagcugcuucaaaaagaauauaucgaucgccagggaaagacaccucugggccucguggaccuguuugucuucuccaccucuuuuuaccugauuagcaucuuccuucaccucguuaaaauuccgacccauagacacaucauugggaagcccugcccuaaaccccaucggcugaaucacaugggaaucuguuccugcggccuguauaagcacccuggcgugcccgugaaauggaagcgcugaggacuaguuauaagacugacuagcccgaugggccucccaacgggcccuccuccccuccuugcaccgagauuaauaaaaaaaaaaaaaaaaaaaaaaaaaaaaaaaaaaaaaaaaaaaaaaaaaaaaaaaaaaaaaaaaaaaaaaaaaaaaaaaaaaaaaaaaaaaaaaaaaaaa

SEQ ID NO: 36505 - RNA, 1662 nt, Artificial Sequence
  mRNA product Design i-3 (A100) comprising derived and/or modified sequence from LASV(LASV254-NIG-2011;Clade II)__AIT17674__GPCmut9 (opt5)
aggagaaagcuuaccaugggccagaucauuaccuucuuucaagaggugccccacgucaucgaagagguuaugaacauugugcugaucgcccucagccugcuugcuauucugaaggggaucuacaauguggccacaugcggacucuucggccuggucuccuuucuucugcucugugggagaucuugcagcacgaccuauaaaggaguguacgaacugcagacacuggagcucgacaugaccaaccugaauaugacaaugccucuuuccuguaccaagaacaauucucaucacuauaucaugguuggcaacgaaacagggcuggagcucacccugacgaauaccagcauuaucaaccauaaauucugcaaucuuuccgaugcgcacaagaaaaaccuguacaaucaugcucucaugucuauuaucagcacauuucaccuguccauuccgaacuucaaucaguaugaggccaugagcugugacuuuaacggaggcaagaucucugugcaguacaaucugucccacagcuaugccgucgaugcugccaaccauugcggcaccauugcuaacggggugcuccaaacauucaugcggauggccuggggaggcucuuacaucgcgcuggacuccggguguggaaauugggauugcaucaugaccagcuaccaguaucuuauuauccagaacacgacaugggaagaccacugucaguuuucucgccccuccccuauuggcuaccuggggcuccugagccaaagaacccgggauaucuauauuucccgcagacuucugggaacauucaccuggacccucucugacagcgagggcaaugaaacacccggcggguacugccugacgcgguggaugcugaucgaggccgagcucaaguguuuuggaaacaccgcuguugccaaaugcaaugaaaagcaugaugaggaguucugcgacaugcugcgccuuuuugauuucaacaaacaggcuaucagacggcugaagacagaagcccaggcgaauauucagcucaucaacaaagccgugaaugcucugauuaacgaccaacuuaucaugaagaaucaucugcgcgauauuauguguaucccuuauugcaacuacuccaaguauugguaccucaaucacaccgucacaggcaaaaccagccugcccagauguuggcuggugucuaacggguccuaccucaaugaaacgcacuucagcgacgacaucgagcagcaggccgauaacaugauuacagagcugcuucaaaaggaauauauggaccggcagggaaaaaccccucugggccucguggaucuguuugucuucucuaccagcuuuuaccugaucuccauuuuccuucaccucguuaagaucccgacacaucgccacgugauugggaaacccugcccuaagccccauagacugaaccacaugggaaucuguucuugcggccuguauaaacacccuggcgugcccgucaaguggaagcggugaggacuaguuauaagacugacuagcccgaugggccucccaacgggcccuccuccccuccuugcaccgagauuaauaaaaaaaaaaaaaaaaaaaaaaaaaaaaaaaaaaaaaaaaaaaaaaaaaaaaaaaaaaaaaaaaaaaaaaaaaaaaaaaaaaaaaaaaaaaaaaaaaaaa

SEQ ID NO: 36506 - RNA, 1662 nt, Artificial Sequence
  mRNA product Design i-3 (A100) comprising derived and/or modified sequence from LASV(Nig08-A19;Clade III)__ADU56618__GPCmut9 (opt5)
aggagaaagcuuaccaugggccagaucgugaccuucuuucaagaggucccccacguuauugaagaggugaugaacaucgugcugauugcccucagcauccuggcuauucuuaaggggcuguacaauaucgccacaugcggacucaucggccuggucacguuccuucugcucuccgggagaucuuguagcaugaccuauaaaggaguguacgaacugcagacacuggagcucaacaugaauacccugaacaugacaaugccucuuuccugcaccaagaauaacucucaucacuauauuaugguuggcaaugaaacagggcuggagcucacccugacgaacaccagccuucugcaucacaaauuuuguaaucucuccgacgcgcauaagaaaaaccuguacgaucacacacugaugucuaucauuagcaccuuccaccucuccaucccgaauuuuaaccaguaugaggcuaugagcugcgacuucaauggaggcaagauuacagugcaguacaaccugucucauuccuaugccaucgaugccgcuaaucacuguggcaccgucgccaacggggugcuucaaacguuuaugcggauggcuuggggaggcagcuacauugcccuggacucugggugcggaaagugggauuguaucaugacauccuaccaguaucucaucauucagaacaccacaugggaagaccauugccaguucagccgccccucuccuaucggcuaccuggggcuucugucccaaagaacccgggauauuuauaucagccgcagacuccugggaaccuuuacauggacgcuguccgacucugagggcaaugaaacccccggcggguacugucucacacgguggaugcugauugaggcggagcuuaaaugcuucggaaacaccgccguugcuaaguguaaugaaaaacacgaugaggaauuuugcgacaugcugcgccucuucgauuuuaacaagcaggccaucagacggcugaaagcugaggcccagaugagcauccagcuuauuaauaaggcggugaacgcccugaucaaugaccaacucauuaugaagaaccaucugcgcgauaucaugugcauuccuuauuguaauuacuccaaauauugguaccugaaccacacaagcaccggcagaacgucucucccccggugcuggcuggucuccaaugggagcuaccuuaacgaaacacacuucucugacgacaucgagcagcaggcugauaauaugaucaccgagaugcugcaaaaggaauaucucgaccgccagggaaaaaccccucugggccugguggaucuuuucguguuuagcacauccuucuaccucauuucuaucuuucugcaucuggucaagauuccgacccacagacauaucguugggaaacccuguccuaagccccaccggcucaaccacaugggaauuugcagcuguggccuguauaaacagccuggcgugcccgugcgcuggaagagaugaggacuaguuauaagacugacuagcccgaugggccucccaacgggcccuccuccccuccuugcaccgagauuaauaaaaaaaaaaaaaaaaaaaaaaaaaaaaaaaaaaaaaaaaaaaaaaaaaaaaaaaaaaaaaaaaaaaaaaaaaaaaaaaaaaaaaaaaaaaaaaaaaaaa

SEQ ID NO: 36507 - RNA, 1665 nt, Artificial Sequence
  mRNA product Design i-3 (A100) comprising derived and/or modified sequence from LASV(G1180-SLE-2010;Clade IV)__AIT17168__GPCmut9 (opt5)
aggagaaagcuuaccaugggccagaucgugaccuucuuucaagaggucccccacguuauugaagaggugaugaacaucgugcugauugcccucagcauccuggcuguccuuaaggggcuguacaauuucgccacaugcggacucgugggccugcuuacguuucugcuccugugugggagauccugcaccgcgucucgguauaaaggaguuuacgaacugcagacacucgagcugaacauggaaacccuuaauaugacaaugccucugagcuguaccaagaacaauucccaucacuauauuauggugggcaacgagacagggcucgagcugacccuuacgaauaccucuaucaucaaccauaaauucugcaaucugagcgacgcucacaagaaaaaccucuacgaucaugcccugauguccauuaucucuacauuucaccugagcauuccgaauuucaaccaguaugaagccauguccugugacuuuaauggaggcaagaucagcguccaguacaaccucucucacuccuaugcuggcgaugccgcuaaucauugcgggaccguggccaacggaguucugcaaacauucaugcgcauggcguggggcgggagcuacauugcccuugacucuggauguggcuccugggauugcaucaugaccagcuaccaguaucugauuauccagaacacgacaugggaggaccacugucaguuuucuagacccuccccuaucggguaccucggacugcuuagccaacggacccgcgauauuuauaucuccagacggcugcucggcacauucaccuggacccugucugacagcgaaggcaaggauacacccgggggauacugccugacgcgcuggaugcucauugaggcugagcugaaauguuuuggcaauaccgccguggcuaagugcaacgaaaaacaugacgaggaguucugcgauaugcuuagacuguuugacuucaauaagcaggccauccagcggcucaaagcggaagcccagauguccauucaacugaucaacaaggcugucaaugcccuuaucaacgaucagcugauuaugaagaaucaccuccgcgacaucauguguauuccuuauugcaacuacagcaaauauugguaccugaaucacacaaccacagggaagaccucucugcccaaauguuggcucguguccaacggaagcuaccugaaugaaacgcauuucucugacgauaucgagcagcaagcugacaacaugauuacagagaugcuucagaaggaauauauggagagacagggcaaaaccccucuggggcucguggaucuguuugucuucagcaccuccuuuuaccugaucucuaucuuccuucaccucguuaagauuccgacacaucggcacaucgugggaaaaagcugccccaagccucaucgccugaaucacaugggcauuuguuccugcggccuguauaagcagcccggggugccugucaaauggaagagaugaggacuaguuauaagacugacuagcccgaugggccucccaacgggcccuccuccccuccuugcaccgagauuaauaaaaaaaaaaaaaaaaaaaaaaaaaaaaaaaaaaaaaaaaaaaaaaaaaaaaaaaaaaaaaaaaaaaaaaaaaaaaaaaaaaaaaaaaaaaaaaaaaaaa

SEQ ID NO: 36508 - RNA, 1665 nt, Artificial Sequence
  mRNA product Design i-3 (A100) comprising derived and/or modified sequence from LASV(G1442-SLE-2011;Clade IV)__AIT17180__GPCmut9 (opt5)
aggagaaagcuuaccaugggccagaucgugaccuucuuucaagaggucccccacguuauugaagaggugaugaacaucgugcugauugcccucagcauccuggcuguccuuaaggggcuguacaauguggccacaugcggacucauuggccugguuacguuccuucugcucugugggagauccugcaccacaacccuguauaaaggaguguacgaacugcagacacucgagcugaacauggaaacccuuaauaugacaaugccucugucuuguaccaagaacaauagccaucacuauauccgggucggcaacgagacggggcucgagcugacccuuacaaauaccuccaucauuaaccauaaauuuugcaaucugucugacgcgcacaagaaaaaccucuacgaucaugcucugaugagcaucauuuccacauuccaccugucuaucccgaauuuuaaccaguaugaagccaugagcugugacuucaauggaggcaagauuuccgugcaguacaaccucagccacucuuaugccggcgaugcugccaaucauugcgggaccguugcuaacggagugcugcaaacguuuaugcgcauggccuggggcggguccuacaucgcgcuugacagcggauguggcaacugggauugcauuaugacaucuuaccaguaucugaucauccagaauaccacaugggacgaucacugucaguucuccagacccagcccuauuggguaccucggacugcuuucucaacggacccgcgacgucuauaucuccagacggcugcucggcaccuuuacauggacgcugagcgauuccgagggcaaggacacccccgggggauacugccugacacgcuggaugcucauugaagccgagcugaaauguuucggcaacaccgcuguggccaagugcaaugagaaacaugaugaagaguuuugcgacaugcuuagacuguucgauuuuaacaagcaggcuauccagcggcucaaagccgaagcgcagaugucuauucaacugaucaauaaggccgugaacgcucuuaucaaugaccagcugauuaugaagaaccaccuccgcgacaucauguguauuccuuauugcaauuacagcaaauauugguaccugaacaauacagccaccgggaagacgucccugcccaaauguuggcucaucagcaacggaucuuaccugaaugagacacacuucuccgaugacauugaacaggaggcugauaacaugaucaccgagaugcuucaaaaggaauauauggagagacagggcaaaaccccucuggggcucgucgaccuguucguuuuuagcacaucuuucuaccugaucagcauuuuucuucaucucgugaagaucccgacccaccggcauauugugggaaaauccugccccaagccucaccgccugaaucauaugggcaucuguucuugcggccuguauaagcagcccggggucccugugagauggaaacggugaggacuaguuauaagacugacuagcccgaugggccucccaacgggcccuccuccccuccuugcaccgagauuaauaaaaaaaaaaaaaaaaaaaaaaaaaaaaaaaaaaaaaaaaaaaaaaaaaaaaaaaaaaaaaaaaaaaaaaaaaaaaaaaaaaaaaaaaaaaaaaaaaaaa

SEQ ID NO: 36509 - RNA, 1665 nt, Artificial Sequence
  mRNA product Design i-3 (A100) comprising derived and/or modified sequence from LASV(G3010-SLE-2013;Clade IV)__AIT17344__GPCmut9 (opt5)
aggagaaagcuuaccaugggccagaucgugaccuucuuucaagaggucccccacguuauugaagaggugaugaacaucgugcugauugcccucagcauccuggcuguccuuaaggggcuguacaauuucgccacaugcggacucgugggccugguuacguuucuucugcucugugggagauccugcaccacaucucuguauaaaggaguguacgaacugcagacccucgagcugaacauggaaacacuuaauaugaccaugccucugagcuguacaaagaacaauucccaucacuauauuauggucggcaacgagaccgggcucgagcugacgcuuaccaauacaucuaucaucaaccauaaauucugcaaucugagcgacgcgcacaagaaaaaccucuacaaucaugcucugauguccauuaucucuaccuuucaccugagcauuccgaacuucaaucaguaugaagccauguccugugauuuuaacggaggcaagaucagcgugcaguacaaucucucucacuccuaugccggcgacgcugccagccauugcgggacaguugcuaacggagugcugcaaaccuucaugcggauggccuggggcgggucuuacauugcgcuugauuccggauguggcaagugggacugcaucaugacgagcuaccaguaucugauuauccagaacacaaccugggaggaucacugucaguuuucucgccccuccccuaucggguaccucggacugcuuagccaaagaacacgggacauuuauaucucccgcagacugcucggcaccuucaccuggacacugucugauagcgaaggcaaagacacgcccgggggauacugccugacccgguggaugcucauugaggccgagcugaaguguuuuggcaauacagcugucgccaaaugcaacgaaaagcaugaugaggaguucugcgacaugcuucgccuguuugauuucaauaaacaggcuauccagagacucaagaccgaagcccagauguccauucaacugaucaacaaggcggugaaugcccuuaucaacgaccagcugauuaugaaaaaucaccuccgggauaucauguguauuccuuauugcaacuacagcaaguauugguaccugaaucacacaaccacggggaaaacaucucugcccaaguguuggcucguguccaacggaagcuaccugaaugaaacccauuucucugacgacaucgagcagcaagcugauaacaugauuaccgagaugcuucagaaagaauauauggagcgccagggcaagacaccucuggggcucgucgaccuguuuguuuucagcaccuccuuuuaccugaucucuaucuuccuucaccucgugaaaauuccgacacauagacacaucgugggaaagagcugccccaagccucaucggcugaaucacaugggcauuuguuccugcggccuguauaaacagcccggggucccugugcgcuggaagagaugaggacuaguuauaagacugacuagcccgaugggccucccaacgggcccuccuccccuccuugcaccgagauuaauaaaaaaaaaaaaaaaaaaaaaaaaaaaaaaaaaaaaaaaaaaaaaaaaaaaaaaaaaaaaaaaaaaaaaaaaaaaaaaaaaaaaaaaaaaaaaaaaaaaa

SEQ ID NO: 36510 - RNA, 1665 nt, Artificial Sequence
  mRNA product Design i-3 (A100) comprising derived and/or modified sequence from LASV(G502-SLE-2009;Clade IV)__AIT17126__GPCmut9 (opt5)
aggagaaagcuuaccaugggccagaucgugaccuucuuucaagaggucccccacguuauugaagaggugaugaacaucgugcugauugcccucagcauccuggcuguccuuaaggggcuguacaauuucgccacaugcggacucgugggccugcuuacguuucugcuccugugugggagauccugcaccacaggacuguauaaaggcguuuacgaacuccagacccuggagcuuaacauggaaacacugaauaugaccaugccucucucuuguacaaagaacaauagccaucacuauauuaugguggggaacgagaccggacuggagcuuacgcugaccaauacauccaucaucaaccauaaauucugcaaucucucugacgcgcacaagaaaaaccuguacgaucaugcucugaugagcauuaucuccaccuuucaccucucuauuccgaauuucaaccaguaugaagccaugagcugugacuuuaauggcggcaagaucuccguccaguacaaccugagccacucuuaugccggggaugcugccgaccauugcggaacaguggcuaauggcguucuucaaaccuucaugcggauggccuggggaggguccuacauugcgcuggauagcggcugugggcgcugggacugcaucaugacgucuuaccaguaucucauuauccagaacacaaccugggaggaucacugucaguuuuccagacccagcccuaucggauaccugggccuucugucucaacggacacgcgacauuuauaucuccagacggcuccugggcaccuucaccuggacacugagcgauuccgaagggaaggacacgcccggaggcuacugccucacccgcuggaugcugauugaggccgagcuuaaauguuuugggaacacagcuguggccaagugcaaugaaaaacaugaugaggaguucugcgacaugcugagacucuuugauuucaacaagcaggcuauccagcggcugaaagccgaagcgcagaugucuauucaacuuaucaauaaggccgucaacgcucugaucaaugaccagcucgugaugaagaaccaucugcgcgacauuauguguaucccuuauugcaauuacagcagauauugguaccugaaccacaccacaaccggacggacgucccuccccaaauguuggcuggugagcaauggcucuuaccuuaacgaaacacacuucuccgaugacauugagcagcaagccgauaauaugaucaccgagaugcugcagaaggaauauauggagcgccaggggaaaaccccucucggacuggucgaccuguuuguuuucagcacaucuuuuuaccuuauuagcaucuuccuccaccuggugaagaucccgacccauagacacauugugggcaaauccugccccaagccucaucggcugaaccacaugggcaucuguucuugcgggcucuauaaacagcccggagucccugugaaguggaagcgcugaggacuaguuauaagacugacuagcccgaugggccucccaacgggcccuccuccccuccuugcaccgagauuaauaaaaaaaaaaaaaaaaaaaaaaaaaaaaaaaaaaaaaaaaaaaaaaaaaaaaaaaaaaaaaaaaaaaaaaaaaaaaaaaaaaaaaaaaaaaaaaaaaaaa

SEQ ID NO: 36511 - RNA, 1665 nt, Artificial Sequence
  mRNA product Design i-3 (A100) comprising derived and/or modified sequence from LASV(G733-SLE-2010;Clade IV)__AIT17154__GPCmut9 (opt5)
aggagaaagcuuaccaugggccagaucgugaccuucuuucaagaggucccccacguuauugaagaggugaugaacaucgugcugauugcccucagcauccuggcuguccuuaaggggcuguacaauuucgccacaugcggaauugugggccucguuuccuuucugcuucugugugggagaucuugcacgaccagccucuauaaaggaguguacgaacugcagacacuggagcucaacauggaaacccugaauaugacaaugccucuuuccuguaccaagaacaauucucaucacuauaucauggucggcaacgagacagggcuggagcucacccugacgaauaccagcaucauuaaccauaaauucugcaaucuuuccgacgcgcacaagaaaaaccuguacgaucaugcucucaugucuaucauuagcacauuucaccuguccaucccgaauuucaaccaguaugaagccaugagcugugacuuuaauggaggcaagauuucugugcaguacaaccugucccacagcuaugccggcgaugcugccaaucauugcgggaccaucgcuaacggaguucuccaaacauucaugcggauggccuggggcgggucuuacauugcgcuggacuccggaugugaucgcugggacugcaucaugaccagcuaccaguaucuuaucauucagaacacgacaugggaggaucacugucaguuuucuagacccuccccuaucggcuaccuggggcuccugagccaacggacccgcgacauuuauaucuccagacggcuucugggaacauucaccuggacccucucugauagcgaaggcaaggacacacccggcggguacugccugacgcgcuggaugcugauugaggccgagcucaaauguuuuggaaauaccgcuguggccaagugcaacgaaaaacaugaugaggaguucugcgacaugcugagacuuuuugauuucaauaagcaggcuauccagcggcugaaagccgaagcgcagauguccauccaacucauuaacaaggccgucaaugcucugaucaacgaccagcuuauuaugaagaaucaucugcgcgacaucauguguauuccuuauugcaacuacagcaaauauugguaccucaaucacacaaccacaggcaagaccucucugcccaaauguuggcugguguccaacgggagcuaccucaaugaaacgcacuucucugaugacaucgagcagcaagccgauaacaugaucacagagaugcugcagaaggaauauauggagagacagggaaaaaccccucuuggccugguggaccucuuugucuucagcaccuccuuuuaccugauuucuaucuuccugcaccuuguuaagauuccgacacaucggcacgugguggggaaaagcugccccaagccucaucgccucaaucacaugggaaucuguuccugcggccuguauggccagcccggggucccugugaaguggaaaagaugaggacuaguuauaagacugacuagcccgaugggccucccaacgggcccuccuccccuccuugcaccgagauuaauaaaaaaaaaaaaaaaaaaaaaaaaaaaaaaaaaaaaaaaaaaaaaaaaaaaaaaaaaaaaaaaaaaaaaaaaaaaaaaaaaaaaaaaaaaaaaaaaaaaa

SEQ ID NO: 36512 - RNA, 1665 nt, Artificial Sequence
  mRNA product Design i-3 (A100) comprising derived and/or modified sequence from MOPV/LASV reassortant(IGS-1;Clade IV)__AFY05576__GPCmut9 (opt5)
aggagaaagcuuaccaugggccagaucgugaccuucuuucaagaggucccccacguuauugaagaggugaugaacaucgugcugauugcccucagcguccuggcugugcuuaaggggcuguacaauuucgccacaugcggacucguuggccuggugacguuucuucugcucugugggagauccugcaccacaucucuguauaaaggagucuacgaacugcagacccucgagcugaacauggaaacacuuaauaugaccaugccucugagcuguacaaagaacaauucccaucacuauaucauggugggcaacgagaccgggcucgagcugacgcuuaccaauacaucuauuaucaaccauaaauucugcaaucugagcgacgcgcacaagaaaaaccucuacgaucaugcucugauguccaucauuucuaccuuucaccugagcaucccgaauuucaaccaguaugaagccauguccugugacuuuaauggaggcaagauuagcguucaguacaaccucucucacuccuaugccggcgaugcugccaaucauugcgggacaguggcuaacggaguccugcaaaccuucaugcggauggccuggggcgggagcuacaucgcgcuugacucuggauguggcaacugggauugcauuaugacguccuaccaguaucugaucauucagaauacaaccugggaggaccacugucaguuuagccgccccucuccuaucggguaccucggacugcuuucccaaagaacacgggauaucuauauuagccgcagacugcucggcaccuucaccuggacacuguccgacucugaaggcgaggauacgcccgggggauacugccugacccgguggaugcucaucgaggccgaacugaaguguuuuggcaacacagcuguggccaaaugcaaugagaagcaugacgaagaguucugcgauaugcuucgccuguuugacuucaacaaacaggcuauucagagacucaaggccgaagcgcagaugagcauccaacugauuaauaaagccgugaacgcucuuaucaaugaucagcugaucaugaagaaccaccuccgggacauuauguguaucccuuauugcaauuacuccaaguauugguaccugaaccacaccacaaccgggcgcacgagccugcccaaauguuggcucgucucuaauggauccuaccugaacgagacacauuucagcgacgauauugagcagcaagccgacaauaugaucaccgaaaugcuucagaaggaguauauggaaagacagggcaaaaccccucuggggcucguugaucuguuuguguucucuaccagcuuuuaccugauuuccaucuuccuucaccucgugaagaucccgacacaucggcacauugucggaaaaucuugccccaagccucaucgccugaaccacaugggcaucuguagcugcggccuguauaaacagcccggggugccuguuaaguggaagagaugaggacuaguuauaagacugacuagcccgaugggccucccaacgggcccuccuccccuccuugcaccgagauuaauaaaaaaaaaaaaaaaaaaaaaaaaaaaaaaaaaaaaaaaaaaaaaaaaaaaaaaaaaaaaaaaaaaaaaaaaaaaaaaaaaaaaaaaaaaaaaaaaaaaa

SEQ ID NO: 36513 - RNA, 1665 nt, Artificial Sequence
  mRNA product Design i-3 (A100) comprising derived and/or modified sequence from LASV(LM765-SLE-2012;Clade IV)__AIT17814__GPCmut9 (opt5)
aggagaaagcuuaccaugggccagaucgugaccuucuuucaagaggucccccacguuauugaagaggugaugaacaucgugcugauugcccucagcauccuggcuguccuuaaggggcuguacaauuucgccacaugcggacucgugggccugguuacguuucuucugcucugugggagauccugcaccacaucucuguauaaaggaguguacgaacugcagacccucgagcugaacauggaaacacuuaauaugaccaugccucugagcuguacaaagaacaauucccaucacuauauuauggucggcaacgagaccgggcucgagcugacgcuuaccaauacaucuaucaucgaccauaaauucugcaaccugagcgaugcgcaccggaagaaucucuacgaccaugcucugauguccauuaucucuaccuuucaccugagcauuccgaacuucaaucaguaugaagccauguccugugauuuuaacggaggcaaaaucagcgugcaguacaaucucucucacuccuaugccaaggacgcugccgaucauugcggcacaguugcuaacggggugcugcaaaccuucaugcgcauggccuggggaggcagcuacauugcgcuugacucuggguguggaagaugggauugcaucaugacguccuaccaguaucugauuauccagaauacaaccugggaggaccacugucaguuuagccggcccucuccuaucggcuaccucgggcugcuuucccaacgcacaagagauauuuauaucagccggcgccugcucggaaccuucaccuggacacuguccgacucugaaggcaaggauacgcccggcggguacugccugaccagauggaugcucauugaggccgagcugaaauguuuuggaaacacagcugucgccaagugcaacgaaaaacaugacgaggaguucugcgauaugcuucggcuguuugacuucaauaagcaggcuauccagcgccucaaagccgaagcgcagaugagcauucaacugaucaacaaggccgugaaugcucuuaucaacgaccagcugauuaugaagaaucaccucagagauaucauguguauuccuuauugcaacuacuccaaauauugguaccugaaucacaccacaaccggcaagacgagccugcccaaauguuggcucgugucuaacggguccuaccugaaugaaacacauuucagcgacgauaucgagcagcaagccgacaacaugauuaccgagaugcuucagaaggaauauauggagcggcagggaaaaaccccucugggccucgucgaucuguuuguuuucucuaccagcuuuuaccugaucuccaucuuccuucaccucgugaagauuccgacacaucgccacaucguggggaaacccugcccuaagccccauagacugaaucacaugggaauuuguucuugcggccuguauaagcagccuggcguccccgugaaauggaagcggugaggacuaguuauaagacugacuagcccgaugggccucccaacgggcccuccuccccuccuugcaccgagauuaauaaaaaaaaaaaaaaaaaaaaaaaaaaaaaaaaaaaaaaaaaaaaaaaaaaaaaaaaaaaaaaaaaaaaaaaaaaaaaaaaaaaaaaaaaaaaaaaaaaaa

SEQ ID NO: 36514 - RNA, 1665 nt, Artificial Sequence
  mRNA product Design i-3 (A100) comprising derived and/or modified sequence from LASV(LM776-SLE-2012;Clade IV)__AIT17824__GPCmut9 (opt5)
aggagaaagcuuaccaugggccagaucgugaccuucuuucaagaggucccccacguuauugaagaggugaugaacaucgugcugauugcccucagcauccuggcuguccuuaaggggcuguacaauuucgccacaugcggacucgugggccugguuacguuucuucugcucugugggagauccugcaccacaucuguguauaaaggagucuacgaacugcagacccuggagcucaacauggaaacacugaauaugaccaugccucuuagcuguacaaagaacaauucccaucacuauauuauggugggcaacgagaccgggcuggagcucacgcugaccaauacaucuaucaucaaccauaaauucugcaaucuuagcgacgcgcacaagaaaaaccuguacgaucaugcucucauguccauuaucucuaccuuucaccugagcauuccgaauuucaaccaguaugaagccauguccugugacuuuaauggaggcaagaucagcguucaguacaaccugucucacuccuaugccggcgaugcugccaaucauugcgggacaguggcuaacggaguccuccaaaccuucaugcggauggccuggggcgggagcuacauugcgcuggacucuggauguggcaagugggauugcaucaugacguccuaccaguaucuuauuauccagaacacaaccugggaggaccacugucaguuuagccgccccucuccuaucggguaccugggacuccugucccaaagaacacgggauauuuauaucagccgcagacuucugggcaccuucaccuggacacucuccgacucugaaggcaaagauacgcccgggggauacugccugacccgguggaugcugauugaggccgagcucaaguguuuuggcaauacagcuguggccaaaugcaacgaaaagcaugacgaggaguucugcgauaugcugcgccuuuuugacuucaauaaacaggcuauccagagacugaaggccgaagcgcagaugagcauucaacucaucaacaaggccgugaaugcucugaucaacgaucagcuuauuaugaaaaaucaucugcgggacaucauguguauuccuuauugcaacuacuccaaguauugguaccucaaucacaccacaaccgggaaaacgagccugcccaaguguuggcuggucucuaacggauccuaccucaaugaaacacacuucagcgacgauaucgagcagcaagccgacaacaugauuaccgagaugcugcagaaagaauauauggagcgccagggcaagaccccucuugggcugguugaucucuuuguguucucuaccagcuuuuaccugaucuccaucuuccugcaccuugugaaaauuccgacacauagacacaucgucggaaagucuugccccaagccucaucggcucaaucacaugggcauuuguagcugcggccuguauaaacagcccggggugccuguucgcuggaagagaugaggacuaguuauaagacugacuagcccgaugggccucccaacgggcccuccuccccuccuugcaccgagauuaauaaaaaaaaaaaaaaaaaaaaaaaaaaaaaaaaaaaaaaaaaaaaaaaaaaaaaaaaaaaaaaaaaaaaaaaaaaaaaaaaaaaaaaaaaaaaaaaaaaaa

SEQ ID NO: 36515 - RNA, 1665 nt, Artificial Sequence
  mRNA product Design i-3 (A100) comprising derived and/or modified sequence from LASV(Mad39;Clade IV)__ANH09722__GPCmut9 (opt5)
aggagaaagcuuaccaugggccagaucgugaccuucuuucaagaggucccccacguuauugaagaggugaugaacaucgugcugauugcccucagcauccuggcuguccuuaaggggcuguacaauguggccacaugcggacucauuggccugguuacguuccuucugcucugugggagauccugcaccacaacccuguauaaaggaguguacgaacugcaggcgcucgagcugaacauggaaacacuuaauaugaccaugccucugucuuguacaaagaacaauagccaucacuauauccgggucggcaacgagaccgggcucgagcugacgcuuaccaauacaucccugaucaaccauaaauuuugcaaucucucugacgcucacaagaaaaaccuguacgaucaugcccugaugagcauuaucuccaccuuccaccucucuauuccgaauuuuaaccaguaugaagccaugagcugugacuucaaugauggaaagaucuccgugcaguacaaccugagccacacauaugcuggcgacaccgccaaucauugcggcacgguugcuaacggggugcuucaaacauuuaugcgcauggccuggggaggcucuuacauugcgcuggauuccggguguggaggcugggacugcaucaugaccagcuaccaguaucucauuauccagaacacaaccugggaggaucacugucaguucucuagacccuccccuaucggguaccugggacuucugagccaacggacccgcgacauuuauaucucuagacggcuccugggcacauuuacguggacccuguccgauagcgaaggcaaggacacacccgggggauacugccucacccgcuggaugcugauugaggccgagcuuaaauguuucggcaauacagcugucgccaagugcaacgaaaaacaugaugaggaauuuugcgacaugcugagacucuucgauuuuaauaagcaggcuauccagcggcugaaagccgaggcgcagauguccauucaacuuaucaacaaggccgugaaugcucugaucaacgaccagcucauuaugaagaaucaucugcgcgacaucauguguauuccuuauugcaacuacucuaaauauugguaccugaaucacaccgugacggggaagacaagccuccccaaauguuggcuggucuccaacggaagcuaccuuaaugaaacccacuucucugaugacaucgagcagcaagccgauaacaugauuaccgagaugcugcagaaggaauauauggagagacagggcaaaacaccucucgggcugguugaccuguucguguuuuccaccagcuucuaccuuaucucuaucuuucuccaccuggugaagauuccgacacaucggcacgucgugggaaaacccugcccuaagccccaucgccugaaucacaugggcaucuguagcugcggcuucuauaagcagccugggguucccgugagauggaaacggugaggacuaguuauaagacugacuagcccgaugggccucccaacgggcccuccuccccuccuugcaccgagauuaauaaaaaaaaaaaaaaaaaaaaaaaaaaaaaaaaaaaaaaaaaaaaaaaaaaaaaaaaaaaaaaaaaaaaaaaaaaaaaaaaaaaaaaaaaaaaaaaaaaaa

SEQ ID NO: 36516 - RNA, 1665 nt, Artificial Sequence
  mRNA product Design i-3 (A100) comprising derived and/or modified sequence from LASV(Z0947-SLE-2011;Clade IV)__AIT17840__GPCmut9 (opt5)
aggagaaagcuuaccaugggccagaucgugaccuucuuucaagaggucccccacguuauugaagaggugaugaacaucgugcugauugcccucagcauccuggcuguccuuaaggggcuguacaauuucgccacaugcggacucgugggccugguuacguuucuucugcucugugggagauccugcaccauuucucuguauaaaggaguguacgaacugcagacacucgagcugaacauggaaacccuuaauaugacaaugccucugagcuguaccaagaacaauucccaucacuauaucauggucggcaacgagacagggcucgagcugacccuuacgaauaccucuaucauuaaccauaaauucugcaaucugagcgacgcgcacaagaaaaaccucuacgaucaugcucugauguccaucauuucuacauuucaccugagcaucccgaauuucaaccaguaugaagccauguccugugacuuuaauggaggcaagauuagcgugcaguacaaccucucucacuccuaugccggcgaugcugccaaucauugcgggaccguugcuaacggagugcugcaaacauucaugcggauggccuggggcgggagcuacaucgcgcuugacucuggaugugaucgcugggacugcauuaugaccuccuaccaguaucugaucauccagaacacgacaugggaggaucacugucaguuuagcagacccucuccuauuggcuaccucgggcugcuuucccaacggacccgcgacaucuauauuagcagacggcugcucggaacauucaccuggacccuguccgauucugaaggcaaggacacacccggcggguacugccugacgcgcuggaugcucaucgaggccgagcugaaauguuuuggaaauaccgcugucgccaagugcaacgaaaaacaugaugaggaguucugcgacaugcuuagacuguuugauuucaauaagcaggcuauucagcggcucaaagccgaagcgcagaugagcauccaacugaucaacaaggccgugaaugcucuuauuaacgaccagcugaucaugaagaaucaccuccgcgacauuauguguaucccuuauugcaacuacuccaaauauugguaccugaaucacacaaccacaggcaagaccagccugcccaaauguuggcucgugucuaacggguccuaccugaaugaaacgcauuucagcgaugacauugagcagcaagccgauaacaugaucacagagaugcuucagaaggaauauauggagagacagggaaaaaccccucugggccucgucgaccuguuuguuuucucuaccagcuuuuaccugaucuccauuuuccuucaccucgugaagaucccgacacaucggcacauuguggggaaacccugcccuaagccccaucgccugaaucacaugggaaucuguucuugcggccuguauaagcagccuggcguccccgugaaauggaagagaugaggacuaguuauaagacugacuagcccgaugggccucccaacgggcccuccuccccuccuugcaccgagauuaauaaaaaaaaaaaaaaaaaaaaaaaaaaaaaaaaaaaaaaaaaaaaaaaaaaaaaaaaaaaaaaaaaaaaaaaaaaaaaaaaaaaaaaaaaaaaaaaaaaaa

SEQ ID NO: 36517 - protein, 491 aa, Artificial Sequence
  derived and/or modified protein sequence (artificial) from LASV(Josiah;Clade IV)__NP_694870__GPCmut10
MGQIVTFFQEVPHVIEEVMNIVLIALSVLAVLKGLYNFATCGLVGLVTFLLLCGRSCTTSLYKGVYELQTLELNMETLNMCMPLSCTKNNSHHYIMVGNETGLELTLTNTSIINHKFCNLSDAHKKNLYDHALMSIISTFHLSIPNFNQYEAMSCDFNGGKISVQYNLSHSYAGDAANHCGTVANGVLQTFMRMAWGGSYIALDSGRGNWDCIMTSYQYLIIQNTTWEDHCQFSRPSPIGYLGLLSQRTRDIYISRRLLGTFTWTLSDSEGKDTPGGYCLTRWMLIEAELKCFGNTAVAKCNEKHDEEFCDMLRLFDFCKQAIQRLKAEAQMSIQLINKAVNALINDQLIMKNHLRDIMGIPYCNYSKYWYLNHTTTGRTSLPKCWLVSNGSYLNETHFSDDIEQQADNMITEMLQKEYMERQGKTPLGLVDLFVFSTSFYLISIFLHLVKIPTHRHIVGKSCPKPHRLNHMGICSCGLYKQPGVPVKWKR

SEQ ID NO: 36518 - protein, 490 aa, Artificial Sequence
  derived and/or modified protein sequence (artificial) from LASV(LP;Clade I)__AAF86701__GPCmut10
MGQIITFFQEVPHVIEEVMNIVLIALSLLAILKGLYNIATCGIIGLVAFLFLCGKSCSLTLKGGYELQTLELNMETLNMCMPLSCTKNSSHHYIRVGNETGLELTLTNTSIINHKFCNLSDAHKKNLYDHALMSIISTFHLSIPNFNQYEAMSCDFNGGKISVQYNLSHSYAGDAAEHCGTVANGVLQTFMRMAWGGRYIALDSGKGNWDCIMTSYQYLIIQNTTWEDHCQFSRPSPIGYLGLLSQRTRDIYISRRLLGTFTWTLSDSEGNETPGGYCLTRWMLIEAELKCFGNTAVAKCNEKHDEEFCDMLRLFDFCKQAIRRLKAEAQMSIQLINKAVNALINDQLIMKNHLRDIMGIPYCNYSKYWYLNHTSSGRTSLPKCWLISNGSYLNETQFSDDIEQQADNMITEMLQKEYIERQGKTPLGLVDIFIFSTSFYLISIFLHLIKIPTHRHIVGKPCPKPHRLNHMGVCSCGLYKHPGVPTKWKR

SEQ ID NO: 36519 - protein, 490 aa, Artificial Sequence
  derived and/or modified protein sequence (artificial) from LASV(803213;Clade II)__AAF86703__GPCmut10
MGQIITFFQEVPHVIEEVMNIVLIALSLLAILKGIYNVATCGLFGLISFLLLCGRSCSVTYKGVYELQTLELNMANLNMCMPLSCTKNNSHHYIMVGNETGLELTLTNTSIINHKFCNLSDAHKKNLYDHALMSIISTFHLSIPNFNQYEAMSCDFNGGKISVQYNLSHSFAVDAANHCGTIANGVLQTFMRMAWGGSYIALDSGKGNWDCIMTSYQYLIIQNTTWEDHCQFSRPSPIGYLGLLSQRTRDIYISRRLLGTFTWTLSDSEGNEAPGGYCLTRWMLIEAELKCFGNTAVAKCNEKHDEEFCDMLRLFDFCKQAIKRLKTEAQMSIQLINKAVNALINDQLIMKNHLRDIMGIPYCNYSRYWYLNHTVTGKTSLPRCWLVSNGSYLNETHFSDDIEQQADNMITEMLQKEYMDRQGKTPLGLVDLFVFSTSFYLISIFLHLVKIPTHRHIVGKPCPKPHRLNHMGICSCGLYKHPGVPVKWKR

SEQ ID NO: 36520 - protein, 490 aa, Artificial Sequence
  derived and/or modified protein sequence (artificial) from LASV(GA391;Clade III)__CAA36645__GPCmut10
MGQIVTFFQEVPHVIEEVMNIVLIALSILAILKGLYNVATCGLIGLVTFLLLSGRSCSLIYKGTYELQTLELNMETLNMCMPLSCTKNNSHHYIRVGNETGLELTLTNTSILNHKFCNLSDAHKRNLYDHSLMSIISTFHLSIPNFNQYEAMSCDFNGGKITVQYNLSHSFAVDAAGHCGTLANGVLQTFMRMAWGGSYIALDSGRGNWDCIMTSYQYLIIQNTTWDDHCQFSRPSPIGYLGLLSQRTRDIYISRRLLGTFTWTLSDSEGNETPGGYCLTRWMLIEAELKCFGNTAVAKCNEKHDEEFCDMLRLFDFCKQAIRRLKTEAQMSIQLINKAVNALINDQLIMKNHLRDIMGIPYCNYSRYWYLNHTSTGKTSLPRCWLISNGSYLNETKFSDDIEQQADNMITEMLQKEYIDRQGKTPLGLVDLFVFSTSFYLISIFLHLVKIPTHRHIVGKPCPKPHRLNHMGICSCGLYKQPGVPVRWKR

SEQ ID NO: 36521 - protein, 491 aa, Artificial Sequence
  derived and/or modified protein sequence (artificial) from LASV(AV;Clade V)__CCA30314__GPCmut10
MGQIVTFFQEVPHVIEEVMNIVLIALSILAVLKGLYNIATCGLIGLITFLLLCGRSCSSNLYKGVYELQSLDLNMETLNMCMPLSCTKNNSHHYIRVGNDTGLELTLTNTSILNHKFCNLSDAHKKDLYDHALMSIISTFHLSIPNFNQYEAMSCDFNGGKISVQYNLSHSYAIDAANHCGTVANGILQTFMRMAWGGSYIALDSGRGNWDCIMTSYQYLIIQNTTWENHCQFSRPSPIGYLGLLSQRTRDIYISRRLLGTFTWTLSDSEGNATPGGYCLTRWMLIEAELKCFGNTAVAKCNEKHDEEFCDMLRLFDFCKQAISRLKSEAQMSIQLINKAVNALINDQLIMKNHLRDIMGIPYCNYSKYWYLNHTITGKTSLPKCWLVSNGSYLNETHFSDDIEQQADNMITEMLQKEYMERQGKTPLGLVDLFVFSTSFYLISIFLRLVKIPTHRHIVGKPCPKPHRLNHMGICSCGLYKQPGVPVRWKR

SEQ ID NO: 36522 - protein, 490 aa, Artificial Sequence
  derived and/or modified protein sequence (artificial) from LASV(Togo/2016/7082;Clade VI)__AMR44577__GPCmut10
MGQIITFFQEVPHVIEEVMNIVLIALSLLAILKGVYNVATCGIIGLVTFLFLCGRSCSLIYKGSYELQTLELNMETLNMCMPLSCTKNSSHHYIRVGNETGLELTLTNTSIINHKFCNLSDAHKRNLYDHALMSILSTFHLSIPNFNQYEAMSCDFNGGKISVQYNLSHAYAVDAAEHCGTVANGVLQTFMRMAWGGSYIALDSGRGNWDCIMTSYQYLIIQNTTWEDHCQFSRPSPIGYLGLLSQRTRDIYISRRLLGTFTWTLSDSEGNETPGGYCLTRWMLIEAELKCFGNTAVAKCNEKHDEEFCDMLRLFDFCKQAIQRLKSEAQMSIQLINKAVNALINDQLIMKNHLRDMMGIPYCNYSKYWYLNHTSSGRTSLPKCWLVSNGSYLNETHFSDDIEQQADNMITEMLQKEYIDRQGKTPLGLVDLFVFSTSFYLISIFLHLIKIPTHRHIVGKPCPKPHRLNHMGICSCGLYKQPGVPTRWKR

SEQ ID NO: 36523 - protein, 490 aa, Artificial Sequence
  derived and/or modified protein sequence (artificial) from LASV(KAK-428;Clade n.d. (VII))__ANH09740__GPCmut10
MGQIVTFFQEVPHVIEEVMNIVLIALSLLAILKGLYNFATCGVIGLITFLLLCGRSCSATYKGQYELQTLELNMESLNMCMPLSCTKNNSHHYIRAGNNTGLELTLTNTSIISHKFCNLSDAHKKNLYDHTLMSIITTFHLSIPNFNQYEAMSCDFNGGKISIQYNLSHSYAGDAAQHCGTVANGVLQTFMRMAWGGSYLALDSGRRGWDCIISSYQYLIIQNTTWDDHCQFSRPSPIGYLGFVSQKTRDIYISRRLLGTFTWTLSDSEGHDMPGGYCLTRWMLIEADLKCFGNTAVAKCNEKHDEEFCDMWRLFDFCKQAIQRLKAEAQMNIQLINKAVNALINDQLMMKNHLRDIMGIPYCNYSKFWYLNNTTTGRTSLPRCWLISNGSYLNETHFSDDIEQQADNMITEMLQKEYMDRQGKTPLGLVDLFVFSTSFYLITIFLHLVKIPTHRHIVGKPCPKPHRLNHMGICSCGLYKQPGVPVRWKR

SEQ ID NO: 36524 - protein, 490 aa, Artificial Sequence; identical to SEQ ID NO: 36518
  derived and/or modified protein sequence (artificial) from LASV(Pinneo-NIG-1969;Clade I)__AIT17836__GPCmut10

SEQ ID NO: 36525 - protein, 490 aa, Artificial Sequence
  derived and/or modified protein sequence (artificial) from LASV(ISTH0009-NIG-2011;Clade II)__AIT17404__GPCmut10
MGQIITFFQEVPHVIEEVMNIVLIALSLLAILKGIYNVATCGLFGLVSFLLLCGRSCSTTYKGVYELQTLELDMASLNMCMPLSCTKNNSHHYIMVGNETGLELTLTNTSIINHKFCNLSDAHKKNLYDHALMSIISTFHLSIPNFNQYEAMSCDFNGGKISVQYNLSHAYAVDAANHCGTIANGVLQTFMRMAWGGSYIALDSGKGSWDCIMTSYQYLIIQNTTWEDHCQFSRPSPIGYLGLLSQRTRDIYISRRLLGTFTWTLSDSEGNETPGGYCLTRWMLIEAELKCFGNTAVAKCNEKHDEEFCDMLRLFDFCKQAIRRLKTEAQMSIQLINKAVNALINDQLIMKNHLRDIMGIPYCNYSKYWYLNHTVTGKTSLPRCWLVSNGSYLNETHFSDDIEQQADNMITELLQKEYMDRQGKTPLGLVDLFVFSTSFYLISIFLHLIKIPTHRHITGKPCPKPHRLNHMGICSCGLYKHPGVPVKWKR

SEQ ID NO: 36526 - protein, 490 aa, Artificial Sequence
  derived and/or modified protein sequence (artificial) from LASV(ISTH2010-NIG-2012;Clade II)__AIT17482__GPCmut10
MGQIITFFQEVPHVIEEVMNIVLIALSLLAILKGIYNVATCGLFGLVSFLLLCGRSCSTTYKGVYELQTLELDMASLNMCMPLSCTKNNSHHYIMVGNETGLELTLTNTSIINHKFCNLSDAHKKNLYDHALMSIISTFHLSIPNFNQYEAMSCDFNGGKISVQYNLSHAYAVDAANHCGTIANGVLQTFMRMAWGGSYIALDSGKGSWDCIMTSYQYLIIQNITWEDHCQFSRPSPIGYLGLLSQRTRDIYISRRLLGTFTWTLSDSEGNETPGGYCLTRWMLIEAELKCFGNTAVAKCNEKHDEEFCDMLRLFDFCKQAIRRLKTEAQMSIQLINKAVNALINDQLIMKNHLRDIMGIPYCNYSKYWYLNHTVTGKTSLPRCWLVSNGSYLNETHFSDDIEQQADNMITELLQKEYIDRQGKTPLGLVDLFVFSTSFYLISIFLHLVKIPTHRHVVGKPCPKPHRLNHMGICSCGLYKHPGVPVKWKR

SEQ ID NO: 36527 - protein, 490 aa, Artificial Sequence
  derived and/or modified protein sequence (artificial) from LASV(Lassa virus/H.sapiens-wt/NGA/2015/ISTH_0543;Clade II)__AVO03639__GPCmut10
MGQIITFFQEVPHVIEEVMNIVLIALSLLAILKGIYNVATCGLFGLVSFLLLCGRSCSTTYKGVYELQTLELDMANLNMCMPLSCTKNNSHHYIMVGNETGLELTLTNTSIINHKFCNLSDAHKKNLYDHALMSIISTFHLSIPNFNQYEAMSCDFNGGKISVQYNLSHTYAVDAANHCGTIANGVLQTFMRMAWGGSYIALDSGKGSWDCIMTSYQYLVIQNTTWEDHCQFSRPSPIGYLGLLSQRTRDIYISRRLLGTFTWTLSDSEGNETPGGYCLTRWMLIEAELKCFGNTAVAKCNEKHDEEFCDMLRLFDFCKQAIRRLKTEAQMSIQLINKAVNALINDQLIMKNHLRDIMGIPYCNYSKYWYLNHTVTGKTSLPRCWLVSNGSYLNETHFSDDIEQQADNMITELLQKEYIDRQGKTPLGLVDLFVFSTSFYLISIFLHLVKIPTHRHITGKPCPKPHRLNHMGICSCGLYKHPGVPVKWKR

SEQ ID NO: 36528 - protein, 490 aa, Artificial Sequence
  derived and/or modified protein sequence (artificial) from LASV(Lassa virus/H.sapiens-wt/NGA/2016/ISTH_0009;Clade II)__AVO03571__GPCmut10
MGQIITFFQEVPHVIEEVMNIVLIALSLLAILKGIYNVATCGLLGLVSFLLLCGRSCSTTYKGVYELQTLELDMASLNMCMPLSCTKNNSHHYIMVGNETGLELTLTNTSIINHKFCNLSDAHKKNLYDHALMSIISTFHLSIPNFNQYEAMSCDFNGGRISVQYNLSHSYAVDAANHCGTIANGVLQTFMRMAWGGSYIALDSGKGSWDCIMTSYQYLIIQNTTWEDHCQFSRPSPIGYLGLLSQRTRDIYISRRLLGTFTWTLSDSEGNETPGGYCLTRWMLIEAELKCFGNTAVAKCNEKHDEEFCDMLRLFDFCKQAIRRLKTEAQMSIQLINKAVNALINDQLIMKNHLRDIMGIPYCNYSKYWYLNHTVTGKTSLPRCWLVSNGSYLNETHFSDDIEQQADNMITELLQKEYIDRQGKTPLGLVDLFVFSTSFYLISIFLHLVKIPTHRHITGKPCPKPHRLNHMGICSCGLYNHPGVPVKWKR

SEQ ID NO: 36529 - protein, 490 aa, Artificial Sequence
  derived and/or modified protein sequence (artificial) from LASV(Lassa virus/H.sapiens-wt/NGA/2016/ISTH_0017;Clade II)__AVO03567__GPCmut10
MGQIITFFQEVPHVIEEVMNIVLIALSLLAILKGIYNVATCGLFGLVSFLLLCGRSCSTTYKGVYELQTLELDMASLNMCMPLSCTKNNSHHYIMVGNETGLELTLTNTSIINHKFCNLSDAHKKNLYDHALMSIISTFHLSIPNFNQYEAMSCDFNGGKISVQYNLSHTYAIDAANHCGTIANGVLQTFMRMAWGGSYIALDSGKGSWDCIMTSYQYLIIQNTTWEDHCQFSRPSPIGYLGLLSQRTRDIYISRRLLGTFTWTLSDSEGNETPGGYCLTRWMLIEAELKCFGNTAVAKCNEKHDEEFCDMLRLFDFCKQAIRRLKTEAQMSIQLINKAVNALINDQLIMKNHLRDIMGIPYCNYSKYWYLNHTVTGKTSLPRCWLVSNGSYLNETHFSDDIEQQADNMITELLQKEYMDRQGKTPLGLVDLFVFSTSFYLISIFLHLVRIPTHRHVIGKPCPKPHRLNHMGICSCGLYKHPGVPVKWKR

SEQ ID NO: 36530 - protein, 490 aa, Artificial Sequence
  derived and/or modified protein sequence (artificial) from LASV(Lassa virus/H.sapiens-wt/NGA/2018/ISTH_0959;Clade II)__AVV65099__GPCmut10
MGQIITFFQEVPHVIEEVMNIVLIALSLLAILKGIYNVVTCGLFGLVSFLLLCGRSCSTTYKGVYELQTLELDMASLNMCMPLSCTKNNSHHYIMVGNETGLELTLTNTSIINHKFCNLSDAHKKNLYDHALMSIISTFHLSIPNFNQYEAMSCDFNGGKISVQYNLSHAYAIDAANHCGTIANGVLQTFMRMAWGGSYIALDSGKGSWDCIMTSYQYLIIQNTTWEDHCQFSRPSPIGYLGLLSQRTRDIYISRRLLGTFTWTLSDSEGNETPGGYCLTRWMLIEAELKCFGNTAVAKCNEKHDEEFCDMLRLFDFCKQAIRRLKTEAQMSIQLINKAVNALINDQLIMKNHLRDIMGIPYCNYSKYWYLNHTVTGKTSLPRCWLVSNGSYLNETHFSDDIEQQADNMITELLQKEYIDRQGKTPLGLVDLFVFSTSFYLISIFLHLVKIPTHRHVIGKPCPKPHRLNHMGICSCGLYKHPGVPVKWKR

SEQ ID NO: 36531 - protein, 490 aa, Artificial Sequence
  derived and/or modified protein sequence (artificial) from LASV(LASV003-NIG-2008;Clade II)__AIT17580__GPCmut10
MGQIITFFQEVPHVIEEVMNIVLIALSLLAILKGIYNVATCGLFGLVSFLLLCGRSCSTTYKGVYELQTLELDMASLNMCMPLSCTKNNSHHYIMVGNETGLELTLTNTSIINHKFCNLSDAHKKNLYDHALMSIISTFHLSIPNFNQYEAMSCDFNGGKISVQYNLSHTYAVDAANHCGTIANGVLQTFMRMAWGGSYIALDSGKGSWDCIMTSYQYLIIQNTTWEDHCQFSRPSPIGYLGLLSQRTRDIYISRRLLGTFTWTLSDSESNETPGGYCLTRWMLIEAELKCFGNTAVAKCNEKHDEEFCDMLRLFDFCKQAIRRLKAEAQMSIQLINKAVNALINDQLIMKNHLRDIMGIPYCNYSKYWYLNHTVTGRTSLPRCWLVSNGSYLNETHFSDDIEQQADNMITELLQKEYMDRQGKTPLGLVDLFVFSTSFYLISIFLHLVKIPTHRHVIGKPCPKPHRLNHMGICSCGLYKHPGVPVKWKR

SEQ ID NO: 36532 - protein, 490 aa, Artificial Sequence
  derived and/or modified protein sequence (artificial) from LASV(LASV035-NIG-2009;Clade II)__AIT17588__GPCmut10
MGQIITFFQEVPHVIEEVMNIVLIALSLLAILKGIYNVATCGLFGLVSFLLLCGRSCSTTYKGVYELQTLELDMASLNMCMPLSCTKNNSHHYIMVGNETGLELTLTNTSIINHKFCNLSDAHKKNLYDHALMSIISTFHLSIPNFNQYEAMSCDFNGGKISVQYNLSHAYAVDAANHCGTIANGVLQTFMRMAWGGSYIALDSGKGSWDCIMTSYQYLIIQNTTWEDHCQFSRPSPIGYLGLLSQRTRDIYISRRLLGTFTWTLSDSEGNETPGGYCLTRWMLIEAELKCFGNTAVAKCNEKHDEEFCDMLRLFDFCKQAIRRLKAEAQMSIQLINKAVNALINDQLIMKNHLRDIMGIPYCNYSKYWYLNHTVTGKTSLPRCWLVSNGSYLNETHFSDDIEQQADNMITELLQKEYIDRQGKTPLGLVDLFVFSTSFYLISIFLHLVKIPTHRHVIGKPCPKPHRLNHMGICSCGLYKHPGVPVKWKR

SEQ ID NO: 36533 - protein, 490 aa, Artificial Sequence
  derived and/or modified protein sequence (artificial) from LASV(LASV1000-NIG-2009;Clade II)__AIT17782__GPCmut10
MGQIITFFQEVPHVIEEVMNIVLIALSLLAILKGIYNVATCGLFGLVSFLLLCGRSCSTTYKGVYELQTLELDMASLNMCMPLSCTKNNSHHYIMVGNETGLELTLTNTSIINHKFCNLSDAHKKNLYDHALMSIISTFHLSIPNFNQYEAMSCDFNGGKISVQYNLSHTYAVDAANHCGTIANGVLQTFMRMAWGGSYIALDSGKGSWDCIMTSYQYLIIQNTTWEDHCQFSRPSPIGYLGLLSQRTRDIYISRRLLGTFTWTLSDSEGNETPGGYCLTRWMLIEAELKCFGNTAVAKCNEKHDEEFCDMLRLFDFCKQAIKRLKTEAQMSIQLINKAVNALINDQLIMKNHLRDIMGIPYCNYSKYWYLNHTVTGKTSLPRCWLVSNGSYLNETHFSDDIEQQADNMITELLQKEYIDRQGKTPLGLVDLFVFSTSFYLISIFLHLVKIPTHRHVVGKPCPKPHRLNHMGICSCGLYKHPGVPVKWKR

SEQ ID NO: 36534 - protein, 490 aa, Artificial Sequence
  derived and/or modified protein sequence (artificial) from LASV(LASV221-NIG-2010;Clade II)__AIT17624__GPCmut10
MGQIITFFQEVPHVIEEVMNIVLIALSLLAILKGIYNVATCGLFGLVSFLLLCGRSCSTTYKGVYELQTLELDMASLNMCMPLSCTKNNSHHYIMVGNETGLELTLTNTSIINHKFCNLSDAHKKNLYDHALMSIISTFHLSIPNFNQYEAMSCDFNGGKISVQYNLSHTYAIDAANHCGTIANGVLQTFMRMAWGGSYIALDSGKGSWDCIMTSYQYLIIQNTTWEDHCQFSRPSPIGYLGLLSQRTRDIYISRRLLGTFTWTLSDSEGNETPGGYCLTRWMLIEAELKCFGNTAVAKCNEKHDEEFCDMLRLFDFCKQAIRRLKTEAQMSIQLINKAVNALINDQLIMKNHLRDIMGIPYCNYSKYWYLNHTVTGKTSLPRCWLVSNGSYLNETHFSDDIEQQADNMITEMLQKEYMDRQGKTPLGLVDLFVFSTSFYLISIFLHLVKIPTHRHVIGKPCPKPHRLNHMGICSCGLYKHPGVPVKWKR

SEQ ID NO: 36535 - protein, 490 aa, Artificial Sequence
  derived and/or modified protein sequence (artificial) from LASV(LASV237-NIG-2010;Clade II)__AIT17638__GPCmut10
MGQIITFFQEVPHVIEEVMNIVLIALSLLAILKGIYNVATCGLFGLVSFLLLCGRSCSTTYKGVYELQTLELDMASLNMCMPLSCTKNNSHHYIMVGNETGLELTLTNTSIINHKFCNLSDAHKKDLYDHALMSIISTFHLSIPNFNQYEAMSCDFNGGKISVQYNLSHTYAVDAANHCGTIANGVLQTFMRMAWGGSYIALDSGKGSWDCIMTSYQYLIIQNTTWEDHCQFSRPSPIGYLGLLSQRTRDIYISRRLLGTFTWTLSDSEGNETPGGYCLTRWMLIEAELKCFGNTAVAKCNEKHDEEFCDMLRLFDFCKQAIRRLKTEAQMSIQLINKAVNALINDQLIMKNHLRDIMGIPYCNYSKYWYLNHTVTGKTSLPRCWLVSNGSYLNETHFSDDIEQQADNMITELLQKEYMDRQGKTPLGLVDLFVFSTSFYLISIFLHLIKIPTHRHITGKPCPKPHRLNHMGICSCGLYKHPGVPVKWKR

SEQ ID NO: 36536 - protein, 490 aa, Artificial Sequence
  derived and/or modified protein sequence (artificial) from LASV(LASV253-NIG-2011;Clade II)__AIT17670__GPCmut10
MGQIITFFQEVPHVIEEVMNIVLIALSLLAILKGIYNVATCGLFGLVSFLLLCGRSCSTTYKGVYELQTLELDMASLNMCMPLSCTKNNSHHYIMVGNETGLELTLTNTSIINHKFCNLSDAHKKNLYDHALMSIISTFHLSIPNFNQYEAMSCDFNGGKISVQYNLSHTYAVDAANHCGTIANGVLQTFMRMAWGGSYIALDSGKGSWDCIMTSYQYLIIQNTTWEDHCQFSRPSPIGYLGLLSQRTRDIYISRRLLGTFTWTLSDSEGNETPGGYCLTRWMLIEAELKCFGNTAVAKCNEKHDEEFCDMLRLFDFCKQAIRRLKAEAQMSIQLINKAVNALINDQLIMKNHLRDIMGIPYCNYSKYWYLNHTVTGRTSLPRCWLVSNGSYLNETHFSDDIEQQADNMITELLQKEYIDRQGKTPLGLVDLFVFSTSFYLISIFLHLVKIPTHRHIIGKPCPKPHRLNHMGICSCGLYKHPGVPVKWKR

SEQ ID NO: 36537 - protein, 490 aa, Artificial Sequence
  derived and/or modified protein sequence (artificial) from LASV(LASV254-NIG-2011;Clade II)__AIT17674__GPCmut10
MGQIITFFQEVPHVIEEVMNIVLIALSLLAILKGIYNVATCGLFGLVSFLLLCGRSCSTTYKGVYELQTLELDMTNLNMCMPLSCTKNNSHHYIMVGNETGLELTLTNTSIINHKFCNLSDAHKKNLYNHALMSIISTFHLSIPNFNQYEAMSCDFNGGKISVQYNLSHSYAVDAANHCGTIANGVLQTFMRMAWGGSYIALDSGKGNWDCIMTSYQYLIIQNTTWEDHCQFSRPSPIGYLGLLSQRTRDIYISRRLLGTFTWTLSDSEGNETPGGYCLTRWMLIEAELKCFGNTAVAKCNEKHDEEFCDMLRLFDFCKQAIRRLKTEAQANIQLINKAVNALINDQLIMKNHLRDIMGIPYCNYSKYWYLNHTVTGKTSLPRCWLVSNGSYLNETHFSDDIEQQADNMITELLQKEYMDRQGKTPLGLVDLFVFSTSFYLISIFLHLVKIPTHRHVIGKPCPKPHRLNHMGICSCGLYKHPGVPVKWKR

SEQ ID NO: 36538 - protein, 490 aa, Artificial Sequence
  derived and/or modified protein sequence (artificial) from LASV(Nig08-A19;Clade III)__ADU56618__GPCmut10
MGQIVTFFQEVPHVIEEVMNIVLIALSILAILKGLYNIATCGLIGLVTFLLLSGRSCSMTYKGVYELQTLELNMNTLNMCMPLSCTKNNSHHYIMVGNETGLELTLTNTSLLHHKFCNLSDAHKKNLYDHTLMSIISTFHLSIPNFNQYEAMSCDFNGGKITVQYNLSHSYAIDAANHCGTVANGVLQTFMRMAWGGSYIALDSGRGKWDCIMTSYQYLIIQNTTWEDHCQFSRPSPIGYLGLLSQRTRDIYISRRLLGTFTWTLSDSEGNETPGGYCLTRWMLIEAELKCFGNTAVAKCNEKHDEEFCDMLRLFDFCKQAIRRLKAEAQMSIQLINKAVNALINDQLIMKNHLRDIMGIPYCNYSKYWYLNHTSTGRTSLPRCWLVSNGSYLNETHFSDDIEQQADNMITEMLQKEYLDRQGKTPLGLVDLFVFSTSFYLISIFLHLVKIPTHRHIVGKPCPKPHRLNHMGICSCGLYKQPGVPVRWKR

SEQ ID NO: 36539 - protein, 491 aa, Artificial Sequence
  derived and/or modified protein sequence (artificial) from LASV(G1180-SLE-2010;Clade IV)__AIT17168__GPCmut10
MGQIVTFFQEVPHVIEEVMNIVLIALSILAVLKGLYNFATCGLVGLLTFLLLCGRSCTASRYKGVYELQTLELNMETLNMCMPLSCTKNNSHHYIMVGNETGLELTLTNTSIINHKFCNLSDAHKKNLYDHALMSIISTFHLSIPNFNQYEAMSCDFNGGKISVQYNLSHSYAGDAANHCGTVANGVLQTFMRMAWGGSYIALDSGHGSWDCIMTSYQYLIIQNTTWEDHCQFSRPSPIGYLGLLSQRTRDIYISRRLLGTFTWTLSDSEGKDTPGGYCLTRWMLIEAELKCFGNTAVAKCNEKHDEEFCDMLRLFDFCKQAIQRLKAEAQMSIQLINKAVNALINDQLIMKNHLRDIMGIPYCNYSKYWYLNHTTTGKTSLPKCWLVSNGSYLNETHFSDDIEQQADNMITEMLQKEYMERQGKTPLGLVDLFVFSTSFYLISIFLHLVKIPTHRHIVGKSCPKPHRLNHMGICSCGLYKQPGVPVKWKR

SEQ ID NO: 36540 - protein, 491 aa, Artificial Sequence
  derived and/or modified protein sequence (artificial) from LASV(G1442-SLE-2011;Clade IV)__AIT17180__GPCmut10
MGQIVTFFQEVPHVIEEVMNIVLIALSILAVLKGLYNVATCGLIGLVTFLLLCGRSCTTTLYKGVYELQTLELNMETLNMCMPLSCTKNNSHHYIRVGNETGLELTLTNTSIINHKFCNLSDAHKKNLYDHALMSIISTFHLSIPNFNQYEAMSCDFNGGKISVQYNLSHSYAGDAANHCGTVANGVLQTFMRMAWGGSYIALDSGRGNWDCIMTSYQYLIIQNTTWDDHCQFSRPSPIGYLGLLSQRTRDVYISRRLLGTFTWTLSDSEGKDTPGGYCLTRWMLIEAELKCFGNTAVAKCNEKHDEEFCDMLRLFDFCKQAIQRLKAEAQMSIQLINKAVNALINDQLIMKNHLRDIMGIPYCNYSKYWYLNNTATGKTSLPKCWLISNGSYLNETHFSDDIEQEADNMITEMLQKEYMERQGKTPLGLVDLFVFSTSFYLISIFLHLVKIPTHRHIVGKSCPKPHRLNHMGICSCGLYKQPGVPVRWKR

SEQ ID NO: 36541 - protein, 491 aa, Artificial Sequence
  derived and/or modified protein sequence (artificial) from LASV(G3010-SLE-2013;Clade IV)__AIT17344__GPCmut10
MGQIVTFFQEVPHVIEEVMNIVLIALSILAVLKGLYNFATCGLVGLVTFLLLCGRSCTTSLYKGVYELQTLELNMETLNMCMPLSCTKNNSHHYIMVGNETGLELTLTNTSIINHKFCNLSDAHKKNLYNHALMSIISTFHLSIPNFNQYEAMSCDFNGGKISVQYNLSHSYAGDAASHCGTVANGVLQTFMRMAWGGSYIALDSGYGKWDCIMTSYQYLIIQNTTWEDHCQFSRPSPIGYLGLLSQRTRDIYISRRLLGTFTWTLSDSEGKDTPGGYCLTRWMLIEAELKCFGNTAVAKCNEKHDEEFCDMLRLFDFCKQAIQRLKTEAQMSIQLINKAVNALINDQLIMKNHLRDIMGIPYCNYSKYWYLNHTTTGKTSLPKCWLVSNGSYLNETHFSDDIEQQADNMITEMLQKEYMERQGKTPLGLVDLFVFSTSFYLISIFLHLVKIPTHRHIVGKSCPKPHRLNHMGICSCGLYKQPGVPVRWKR

SEQ ID NO: 36542 - protein, 491 aa, Artificial Sequence
  derived and/or modified protein sequence (artificial) from LASV(G502-SLE-2009;Clade IV)__AIT17126__GPCmut10
MGQIVTFFQEVPHVIEEVMNIVLIALSILAVLKGLYNFATCGLVGLLTFLLLCGRSCTTGLYKGVYELQTLELNMETLNMCMPLSCTKNNSHHYIMVGNETGLELTLTNTSIINHKFCNLSDAHKKNLYDHALMSIISTFHLSIPNFNQYEAMSCDFNGGKISVQYNLSHSYAGDAADHCGTVANGVLQTFMRMAWGGSYIALDSGRGRWDCIMTSYQYLIIQNTTWEDHCQFSRPSPIGYLGLLSQRTRDIYISRRLLGTFTWTLSDSEGKDTPGGYCLTRWMLIEAELKCFGNTAVAKCNEKHDEEFCDMLRLFDFCKQAIQRLKAEAQMSIQLINKAVNALINDQLVMKNHLRDIMGIPYCNYSRYWYLNHTTTGRTSLPKCWLVSNGSYLNETHFSDDIEQQADNMITEMLQKEYMERQGKTPLGLVDLFVFSTSFYLISIFLHLVKIPTHRHIVGKSCPKPHRLNHMGICSCGLYKQPGVPVKWKR

SEQ ID NO: 36543 - protein, 491 aa, Artificial Sequence
  derived and/or modified protein sequence (artificial) from LASV(G733-SLE-2010;Clade IV)__AIT17154__GPCmut10
MGQIVTFFQEVPHVIEEVMNIVLIALSILAVLKGLYNFATCGIVGLVSFLLLCGRSCTTSLYKGVYELQTLELNMETLNMCMPLSCTKNNSHHYIMVGNETGLELTLTNTSIINHKFCNLSDAHKKNLYDHALMSIISTFHLSIPNFNQYEAMSCDFNGGKISVQYNLSHSYAGDAANHCGTIANGVLQTFMRMAWGGSYIALDSGRDRWDCIMTSYQYLIIQNTTWEDHCQFSRPSPIGYLGLLSQRTRDIYISRRLLGTFTWTLSDSEGKDTPGGYCLTRWMLIEAELKCFGNTAVAKCNEKHDEEFCDMLRLFDFCKQAIQRLKAEAQMSIQLINKAVNALINDQLIMKNHLRDIMGIPYCNYSKYWYLNHTTTGKTSLPKCWLVSNGSYLNETHFSDDIEQQADNMITEMLQKEYMERQGKTPLGLVDLFVFSTSFYLISIFLHLVKIPTHRHVVGKSCPKPHRLNHMGICSCGLYGQPGVPVKWKR

SEQ ID NO: 36544 - protein, 491 aa, Artificial Sequence
  derived and/or modified protein sequence (artificial) from MOPV/LASV reassortant(IGS-1;Clade IV)__AFY05576__GPCmut10
MGQIVTFFQEVPHVIEEVMNIVLIALSVLAVLKGLYNFATCGLVGLVTFLLLCGRSCTTSLYKGVYELQTLELNMETLNMCMPLSCTKNNSHHYIMVGNETGLELTLTNTSIINHKFCNLSDAHKKNLYDHALMSIISTFHLSIPNFNQYEAMSCDFNGGKISVQYNLSHSYAGDAANHCGTVANGVLQTFMRMAWGGSYIALDSGRGNWDCIMTSYQYLIIQNTTWEDHCQFSRPSPIGYLGLLSQRTRDIYISRRLLGTFTWTLSDSEGEDTPGGYCLTRWMLIEAELKCFGNTAVAKCNEKHDEEFCDMLRLFDFCKQAIQRLKAEAQMSIQLINKAVNALINDQLIMKNHLRDIMGIPYCNYSKYWYLNHTTTGRTSLPKCWLVSNGSYLNETHFSDDIEQQADNMITEMLQKEYMERQGKTPLGLVDLFVFSTSFYLISIFLHLVKIPTHRHIVGKSCPKPHRLNHMGICSCGLYKQPGVPVKWKR

SEQ ID NO: 36545 - protein, 491 aa, Artificial Sequence
  derived and/or modified protein sequence (artificial) from LASV(LM765-SLE-2012;Clade IV)__AIT17814__GPCmut10
MGQIVTFFQEVPHVIEEVMNIVLIALSILAVLKGLYNFATCGLVGLVTFLLLCGRSCTTSLYKGVYELQTLELNMETLNMCMPLSCTKNNSHHYIMVGNETGLELTLTNTSIIDHKFCNLSDAHRKNLYDHALMSIISTFHLSIPNFNQYEAMSCDFNGGKISVQYNLSHSYAKDAADHCGTVANGVLQTFMRMAWGGSYIALDSGRGRWDCIMTSYQYLIIQNTTWEDHCQFSRPSPIGYLGLLSQRTRDIYISRRLLGTFTWTLSDSEGKDTPGGYCLTRWMLIEAELKCFGNTAVAKCNEKHDEEFCDMLRLFDFCKQAIQRLKAEAQMSIQLINKAVNALINDQLIMKNHLRDIMGIPYCNYSKYWYLNHTTTGKTSLPKCWLVSNGSYLNETHFSDDIEQQADNMITEMLQKEYMERQGKTPLGLVDLFVFSTSFYLISIFLHLVKIPTHRHIVGKPCPKPHRLNHMGICSCGLYKQPGVPVKWKR

SEQ ID NO: 36546 - protein, 491 aa, Artificial Sequence
  derived and/or modified protein sequence (artificial) from LASV(LM776-SLE-2012;Clade IV)__AIT17824__GPCmut10
MGQIVTFFQEVPHVIEEVMNIVLIALSILAVLKGLYNFATCGLVGLVTFLLLCGRSCTTSVYKGVYELQTLELNMETLNMCMPLSCTKNNSHHYIMVGNETGLELTLTNTSIINHKFCNLSDAHKKNLYDHALMSIISTFHLSIPNFNQYEAMSCDFNGGKISVQYNLSHSYAGDAANHCGTVANGVLQTFMRMAWGGSYIALDSGHGKWDCIMTSYQYLIIQNTTWEDHCQFSRPSPIGYLGLLSQRTRDIYISRRLLGTFTWTLSDSEGKDTPGGYCLTRWMLIEAELKCFGNTAVAKCNEKHDEEFCDMLRLFDFCKQAIQRLKAEAQMSIQLINKAVNALINDQLIMKNHLRDIMGIPYCNYSKYWYLNHTTTGKTSLPKCWLVSNGSYLNETHFSDDIEQQADNMITEMLQKEYMERQGKTPLGLVDLFVFSTSFYLISIFLHLVKIPTHRHIVGKSCPKPHRLNHMGICSCGLYKQPGVPVRWKR

SEQ ID NO: 36547 - protein, 491 aa, Artificial Sequence
  derived and/or modified protein sequence (artificial) from LASV(Mad39;Clade IV)__ANH09722__GPCmut10
MGQIVTFFQEVPHVIEEVMNIVLIALSILAVLKGLYNVATCGLIGLVTFLLLCGRSCTTTLYKGVYELQALELNMETLNMCMPLSCTKNNSHHYIRVGNETGLELTLTNTSLINHKFCNLSDAHKKNLYDHALMSIISTFHLSIPNFNQYEAMSCDFNDGKISVQYNLSHTYAGDTANHCGTVANGVLQTFMRMAWGGSYIALDSGRGGWDCIMTSYQYLIIQNTTWEDHCQFSRPSPIGYLGLLSQRTRDIYISRRLLGTFTWTLSDSEGKDTPGGYCLTRWMLIEAELKCFGNTAVAKCNEKHDEEFCDMLRLFDFCKQAIQRLKAEAQMSIQLINKAVNALINDQLIMKNHLRDIMGIPYCNYSKYWYLNHTVTGKTSLPKCWLVSNGSYLNETHFSDDIEQQADNMITEMLQKEYMERQGKTPLGLVDLFVFSTSFYLISIFLHLVKIPTHRHVVGKPCPKPHRLNHMGICSCGFYKQPGVPVRWKR

SEQ ID NO: 36548 - protein, 491 aa, Artificial Sequence
  derived and/or modified protein sequence (artificial) from LASV(Z0947-SLE-2011;Clade IV)__AIT17840__GPCmut10
MGQIVTFFQEVPHVIEEVMNIVLIALSILAVLKGLYNFATCGLVGLVTFLLLCGRSCTISLYKGVYELQTLELNMETLNMCMPLSCTKNNSHHYIMVGNETGLELTLTNTSIINHKFCNLSDAHKKNLYDHALMSIISTFHLSIPNFNQYEAMSCDFNGGKISVQYNLSHSYAGDAANHCGTVANGVLQTFMRMAWGGSYIALDSGRDRWDCIMTSYQYLIIQNTTWEDHCQFSRPSPIGYLGLLSQRTRDIYISRRLLGTFTWTLSDSEGKDTPGGYCLTRWMLIEAELKCFGNTAVAKCNEKHDEEFCDMLRLFDFCKQAIQRLKAEAQMSIQLINKAVNALINDQLIMKNHLRDIMGIPYCNYSKYWYLNHTTTGKTSLPKCWLVSNGSYLNETHFSDDIEQQADNMITEMLQKEYMERQGKTPLGLVDLFVFSTSFYLISIFLHLVKIPTHRHIVGKPCPKPHRLNHMGICSCGLYKQPGVPVKWKR

SEQ ID NO: 36549 - RNA, 1476 nt, Artificial Sequence
  derived and/or modified CDS sequence (opt1) from LASV(Josiah;Clade IV)__NP_694870__GPCmut10
augggccagaucgugaccuucuuccaggaggucccccacgugaucgaggaggugaugaacaucguccugaucgcccucagcgugcuggccgugcugaaggggcucuacaacuucgcgaccugcggccuggucgggcuggugacguuccuccugcugugcggccgcuccugcaccaccagccucuacaaggggguguacgagcugcagacccuggagcucaacauggagacgcugaacaugugcaugccgcuguccugcaccaagaacaacagccaccacuacaucauggucggcaacgagaccggccucgagcugacgcugaccaacaccuccaucaucaaccacaaguucugcaaccucagcgacgcccacaagaagaaccuguacgaccacgcccugauguccaucaucagcaccuuccaccucuccauccccaacuucaaccaguacgaggccaugagcugcgacuucaacgggggcaagaucuccgugcaguacaaccugagccacuccuacgccggggacgcggccaaccacugcggcacgguggccaacgggguccugcagaccuucaugcggauggccuggggcggcagcuacaucgcgcucgacuccgggcgcggcaacugggacugcaucaugaccagcuaccaguaccugaucauccagaacaccacgugggaggaccacugccaguucucccggcccagccccaucggguaccugggccuccugucccagcgcacccgggacaucuacaucagccgccggcugcucggcaccuucaccuggacgcugagcgacuccgaggggaaggacaccccgggcggguacugccugacccgcuggaugcucaucgaggccgagcugaagugcuucggcaacaccgccguggccaagugcaacgagaagcacgacgaggaguucugcgacaugcugcggcuguucgacuucugcaagcaggccauccagcgccugaaggcggaggcccagaugagcauccagcugaucaacaaggccgugaacgcccucaucaacgaccagcugaucaugaagaaccaccuccgggacaucauggggauccccuacugcaacuacuccaaguacugguaccucaaccacacgaccaccggccgcaccagccugcccaagugcuggcuggucuccaacggcagcuaccucaacgagacgcacuucuccgacgacaucgagcagcaggccgacaacaugaucaccgagaugcugcagaaggaguacauggagcggcaggggaagacgccccugggccucguggaccuguucguguucagcaccuccuucuaccugaucagcaucuuccugcaccucgucaagaucccgacccaccgccacaucguggggaaguccugccccaagccccaccggcugaaccacaugggcaucugcagcugcgggcuguacaagcagcccggcgugccggucaaguggaagcgcuga

SEQ ID NO: 36550 - RNA, 1473 nt, Artificial Sequence
  derived and/or modified CDS sequence (opt1) from LASV(LP;Clade I)__AAF86701__GPCmut10
augggccagaucaucaccuucuuccaggaggugccccacgucaucgaggaggugaugaacaucgugcugaucgcccucagccugcuggccauccucaaggggcuguacaacaucgcgaccugcggcaucaucgggcuggucgccuuccucuuccugugcggcaaguccugcagccugacgcucaagggcggguacgagcugcagacccuggagcucaacauggagacccugaacaugugcaugccgcuguccugcacgaagaacagcucccaccacuacauccgcgugggcaacgagaccgggcucgagcugacccugaccaacacgagcaucaucaaccacaaguucugcaaccucuccgacgcccacaagaagaaccuguacgaccacgcccugaugagcaucaucuccaccuuccaccucagcauccccaacuucaaccaguacgaggccauguccugcgacuucaacggcgggaagaucagcgugcaguacaaccugucccacagcuacgcgggcgacgccgccgagcacugcgggaccgucgccaacggcgugcugcagaccuucaugcggauggcguggggcgggcgcuacaucgcccucgacuccggcaaggggaacugggacugcaucaugacgagcuaccaguaccugaucauccagaacaccaccugggaggaccacugccaguucucccggcccagccccaucggcuaccugggccuccugucccagcgcacccgggacaucuacaucagccgccggcugcucgggacguucaccuggacccugagcgacuccgagggcaacgagacccccgggggcuacugccugacgcgcuggaugcucaucgaggccgagcugaagugcuucgggaacaccgccguggccaagugcaacgagaagcacgacgaggaguucugcgacaugcugcggcuguucgacuucugcaagcaggcgauccgccggcugaaggccgaggcccagaugagcauccagcugaucaacaaggccgucaacgcccucaucaacgaccagcugaucaugaagaaccaccuccgcgacaucaugggcauccccuacugcaacuacuccaaguacugguaccucaaccacaccagcuccggccggaccagccugcccaagugcuggcugaucuccaacgggagcuaccucaacgagacgcaguucuccgacgacaucgagcagcaggcggacaacaugaucaccgagaugcugcagaaggaguacaucgagcgccagggcaagaccccgcuggggcucguggacaucuucaucuucagcaccuccuucuaccugaucagcaucuuccugcaccugaucaagaucccgacgcaccggcacaucgugggcaagcccugccccaagccccaccgccucaaccacaugggggucugcuccugcggccuguacaagcacccgggcgugcccaccaaguggaagcgguga

SEQ ID NO: 36551 - RNA, 1473 nt, Artificial Sequence
  derived and/or modified CDS sequence (opt1) from LASV(803213;Clade II)__AAF86703__GPCmut10
augggccagaucaucaccuucuuccaggaggugccccacgucaucgaggaggugaugaacaucgugcugaucgcccucagccugcuggccauccucaaggggaucuacaacgucgcgaccugcggccuguucgggcugaucuccuuccuccugcugugcggccgcagcugcuccgugacguacaaggggguguacgagcuccagacccuggagcugaacauggccaaccucaacaugugcaugccgcugagcugcaccaagaacaacucccaccacuacaucauggucggcaacgagacgggccuggagcucacccugaccaacaccagcaucaucaaccacaaguucugcaaccuguccgacgcccacaagaagaaccucuacgaccacgcccugaugagcaucaucuccacguuccaccugagcauccccaacuucaaccaguacgaggccauguccugcgacuucaacgggggcaagaucagcgugcaguacaaccucucccacagcuucgcgguggacgccgccaaccacugcgggaccaucgccaacggcguccugcagaccuucaugcggauggcguggggcggguccuacaucgcccuggacagcggcaaggggaacugggacugcaucaugaccuccuaccaguaccucaucauccagaacacgaccugggaggaccacugccaguucagccgccccucccccaucggcuaccuggggcugcucagccagcggacccgcgacaucuacaucagccggcgccugcugggcaccuucacguggacccucuccgacagcgagggcaacgaggcccccgggggcuacugccugacccgguggaugcugaucgaggccgagcucaagugcuucgggaacaccgccguggcgaagugcaacgagaagcacgacgaggaguucugcgacaugcugcgccuguucgacuucugcaagcaggccaucaagcggcucaagacggaggcccagauguccauccagcugaucaacaaggccgugaacgcccugaucaacgaccagcucaucaugaagaaccaccuccgcgacaucaugggcauccccuacugcaacuacagccgguacugguaccugaaccacaccgucaccgggaagaccucccugccccgcugcuggcuggugagcaacggcuccuaccugaacgagacgcacuucagcgacgacaucgagcagcaggcggacaacaugaucaccgagaugcuccagaaggaguacauggaccggcagggcaagaccccgcuggggcugguggaccucuucgucuucuccaccagcuucuaccugaucuccaucuuccugcaccuggugaagaucccgacgcaccgccacaucgugggcaagcccugccccaagccccaccggcucaaccacauggggaucugcagcugcggccuguacaagcacccggggguccccgugaaguggaagcgcuga

SEQ ID NO: 36552 - RNA, 1473 nt, Artificial Sequence
  derived and/or modified CDS sequence (opt1) from LASV(GA391;Clade III)__CAA36645__GPCmut10
augggccagaucgugaccuucuuccaggaggucccccacgugaucgaggaggugaugaacaucguccugaucgcccucagcauccuggccauccugaaggggcucuacaacguggcgaccugcggccugaucgggcuggugacguuccuccugcuguccggccgcagcugcucccucaucuacaaggggaccuacgagcugcagacccuggagcucaacauggagacccugaacaugugcaugccgcugagcugcaccaagaacaacucccaccacuacauccgggucggcaacgagaccggccucgagcugacccugacgaacaccagcauccucaaccacaaguucugcaaccuguccgacgcccacaagcgcaaccuguacgaccacagccucauguccaucaucagcaccuuccaccuguccauccccaacuucaaccaguacgaggccaugagcugcgacuucaacgggggcaagaucaccgugcaguacaaccugucccacagcuucgccguggacgccgcggggcacugcggcacgcucgccaacgggguccugcagaccuucaugcggauggccuggggcggcuccuacaucgcccuggacagcgggcgcggcaacugggacugcaucaugaccuccuaccaguaccucaucauccagaacaccacgugggacgaccacugccaguucagccggcccucccccaucggguaccugggccugcucagccagcgcacccgggacaucuacaucagccgccggcugcugggcaccuucaccuggacgcucuccgacagcgaggggaacgagaccccgggcggguacugccugacccgcuggaugcugaucgaggcggagcucaagugcuucggcaacaccgccguggccaagugcaacgagaagcacgacgaggaguucugcgacaugcugcggcuguucgacuucugcaagcaggccauccgccggcucaagacggaggcccagauguccauccagcugaucaacaaggcggugaacgcccugaucaacgaccagcucaucaugaagaaccaccuccgcgacaucauggggauccccuacugcaacuacagccgguacugguaccugaaccacaccuccaccggcaagaccagccugccccgcugcuggcugaucuccaacggcagcuaccugaacgagacgaaguucuccgacgacaucgagcagcaggccgacaacaugaucaccgagaugcuccagaaggaguacaucgaccggcaggggaagacgccccugggccuggucgaccuguucguguucagcaccuccuucuaccucaucagcaucuuccugcaccuggugaagaucccgacccaccgccacaucgucgggaagcccugccccaagccccaccggcucaaccacaugggcaucugcuccugcgggcuguacaagcagccgggcgugcccgugcgcuggaagcgguga

SEQ ID NO: 36553 - RNA, 1476 nt, Artificial Sequence
  derived and/or modified CDS sequence (opt1) from LASV(AV;Clade V)__CCA30314__GPCmut10
augggccagaucgugaccuucuuccaggaggucccccacgugaucgaggaggugaugaacaucguccugaucgcccucagcauccuggccgugcugaaggggcucuacaacaucgcgaccugcggccugaucgggcugaucacguuccuccugcugugcggccgcuccugcagcuccaaccucuacaaggggguguacgagcugcagagccuggaccucaacauggagacccugaacaugugcaugccgcuguccugcaccaagaacaacagccaccacuacauccgggucggcaacgacacgggccucgagcugacccugaccaacaccuccauccucaaccacaaguucugcaaccugagcgacgcccacaagaaggaccuguacgaccacgcccucauguccaucaucagcacguuccaccuguccauccccaacuucaaccaguacgaggccaugagcugcgacuucaacgggggcaagaucuccgugcaguacaaccugagccacuccuacgccaucgacgcggccaaccacugcgggaccguggccaacggcauccuccagaccuucaugcgcauggccuggggcgggagcuacaucgcgcuggacuccggccgggggaacugggacugcaucaugaccagcuaccaguaccugaucauccagaacacgaccugggagaaccacugccaguucucccgccccagccccaucggcuaccucgggcugcugagccagcggacccgcgacaucuacaucucccggcgccuccugggcaccuucacguggacccugagcgacuccgagggcaacgccacccccgggggcuacugccucacccgguggaugcugaucgaggccgagcugaagugcuucgggaacacggccgucgccaagugcaacgagaagcacgacgaggaguucugcgacaugcuccgccuguucgacuucugcaagcaggcgaucagccggcugaaguccgaggcccagaugagcauccagcucaucaacaaggccgugaacgcccugaucaacgaccagcugaucaugaagaaccaccuccgcgacaucaugggcauccccuacugcaacuacuccaaguacugguaccugaaccacaccaucaccgggaagaccagccugcccaagugcuggcucguguccaacggcagcuaccugaacgagacgcacuucuccgacgacaucgagcagcaggccgacaacaugaucaccgagaugcugcagaaggaguacauggagcggcagggcaagaccccgcucgggcuggucgaccuguucguguucagcaccuccuucuaccugaucagcaucuuccuccgccuggugaagaucccgacgcaccggcacaucgucggcaagcccugccccaagccccaccgccugaaccacauggggaucugcuccugcggccucuacaagcagccgggggugcccgugcgguggaagcgcuga

SEQ ID NO: 36554 - RNA, 1473 nt, Artificial Sequence
  derived and/or modified CDS sequence (opt1) from LASV(Togo/2016/7082;Clade VI)__AMR44577__GPCmut10
augggccagaucaucaccuucuuccaggaggugccccacgucaucgaggaggugaugaacaucgugcugaucgcccucagccugcuggccauccucaagggggucuacaacguggcgaccugcggcaucaucgggcuggugacguuccuguuccucugcggccgcuccugcagccugaucuacaagggguccuacgagcugcagacccucgagcugaacauggagacccugaacaugugcaugccgcucagcugcacgaagaacuccagccaccacuacauccgggucggcaacgagaccggccuggagcugacccucaccaacacguccaucaucaaccacaaguucugcaaccugagcgacgcccacaagcgcaaccuguacgaccacgcccucauguccauccugagcaccuuccaccuguccauccccaacuucaaccaguacgaggccaugagcugcgacuucaacgggggcaagaucuccgugcaguacaaccucagccacgccuacgcgguggacgccgccgagcacugcgggaccgucgccaacggcgugcugcagaccuucaugcggauggcguggggcggguccuacaucgcccuggacagcggccgcgggaacugggacugcaucaugacguccuaccaguaccucaucauccagaacaccaccugggaggaccacugccaguucagccggcccucccccaucggcuaccuggggcugcucagccagcgcacccgggacaucuacaucagccgccggcugcugggcacguucaccuggacccucuccgacagcgagggcaacgagacccccgggggcuacugccugacgcgcuggaugcugaucgaggccgagcucaagugcuucgggaacaccgccguggccaagugcaacgagaagcacgacgaggaguucugcgacaugcugcggcuguucgacuucugcaagcaggcgauccagcgccucaaguccgaggcccagaugagcauccagcugaucaacaaggccgucaacgcccugaucaacgaccagcucaucaugaagaaccaccuccgggacaugaugggcauccccuacugcaacuacuccaaguacugguaccugaaccacaccagcuccgggcgcaccagccugcccaagugcuggcugguguccaacggcagcuaccugaacgagacgcacuucuccgacgacaucgagcagcaggccgacaacaugaucaccgagaugcuccagaaggaguacaucgaccggcagggcaagaccccgcuggggcugguggaccucuucgucuucagcaccuccuucuaccugaucagcaucuuccugcaccugaucaagaucccgacgcaccgccacaucgugggcaagcccugccccaagccccaccggcucaaccacauggggaucugcuccugcggccuguacaagcagccgggggugcccacccgcuggaagcgguga

SEQ ID NO: 36555 - RNA, 1473 nt, Artificial Sequence
  derived and/or modified CDS sequence (opt1) from LASV(KAK-428;Clade n.d. (VII))__ANH09740__GPCmut10
augggccagaucgugaccuucuuccaggaggucccccacgugaucgaggaggugaugaacaucguccugaucgcccucagccugcuggccauccucaaggggcuguacaacuucgcgaccugcggcgugaucgggcugaucacguuccuccugcugugcggccgcuccugcagcgccaccuacaaggggcaguacgagcuccagacccuggagcugaacauggagucccucaacaugugcaugccgcugagcugcacgaagaacaacucccaccacuacauccgggccggcaacaacaccggccuggagcucacccugaccaacacgagcaucaucucccacaaguucugcaaccugagcgacgcccacaagaagaaccucuacgaccacacccugauguccaucaucaccaccuuccaccugagcauccccaacuucaaccaguacgaggccauguccugcgacuucaacgggggcaagaucagcauccaguacaaccucucccacagcuacgcgggggacgccgcccagcacugcggcacgguggccaacgggguccugcagaccuucaugcgcauggcguggggcggcuccuaccuggcccucgacagcgggcggcgcggcugggacugcaucaucuccagcuaccaguaccugaucauccagaacaccaccugggacgaccacugccaguucucccggcccagccccaucggguaccugggcuucgugagccagaagacgcgcgacaucuacaucucccggcgccuccugggcaccuucaccuggacccugagcgacuccgaggggcacgacaugccgggcggguacugccucacgcgguggaugcugaucgaggccgaccugaagugcuucggcaacaccgccguggccaagugcaacgagaagcacgacgaggaguucugcgacauguggcgccucuucgacuucugcaagcaggcgauccagcggcugaaggccgaggcccagaugaacauccagcugaucaacaaggccgucaacgcccucaucaacgaccagcugaugaugaagaaccaccuccgcgacaucauggggauccccuacugcaacuacagcaaguucugguaccugaacaacaccaccacgggccggaccucccugccccgcugcuggcugaucagcaacggcuccuaccucaacgagacccacuucagcgacgacaucgagcagcaggcggacaacaugaucaccgagaugcugcagaaggaguacauggaccggcaggggaagacgccccugggccucguggaccuguucguguucuccaccagcuucuaccugaucaccaucuuccuccaccuggucaagaucccgacccaccgccacaucguggggaagcccugccccaagccccaccggcugaaccacaugggcaucugcuccugcgggcuguacaagcagccgggcgugcccguccgcuggaagcgguga

SEQ ID NO: 36556 - RNA, 1473 nt, Artificial Sequence; identical to SEQ ID NO: 36550
  derived and/or modified CDS sequence (opt1) from LASV(Pinneo-NIG-1969;Clade I)__AIT17836__GPCmut10

SEQ ID NO: 36557 - RNA, 1473 nt, Artificial Sequence
  derived and/or modified CDS sequence (opt1) from LASV(ISTH0009-NIG-2011;Clade II)__AIT17404__GPCmut10
augggccagaucaucaccuucuuccaggaggugccccacgucaucgaggaggugaugaacaucgugcugaucgcccucagccugcuggccauccucaaggggaucuacaacgucgcgaccugcggccuguucgggcugguguccuuccuccugcugugcggccgcagcugcuccacgaccuacaaggggguguacgagcuccagacccuggagcuggacauggccagccucaacaugugcaugccgcuguccugcacgaagaacaacagccaccacuacaucauggucggcaacgagaccggccuggagcucacccugaccaacacguccaucaucaaccacaaguucugcaaccugagcgacgcccacaagaagaaccucuacgaccacgcccugauguccaucaucagcaccuuccaccuguccauccccaacuucaaccaguacgaggccaugagcugcgacuucaacgggggcaagaucuccgugcaguacaaccucagccacgcguacgccguggacgccgccaaccacugcgggaccaucgcgaacggcguccugcagaccuucaugcggauggccuggggcggguccuacaucgcccuggacagcggcaagggguccugggacugcaucaugacgagcuaccaguaccucaucauccagaacaccaccugggaggaccacugccaguucucccgccccagccccaucggcuaccuggggcugcucagccagcggacccgcgacaucuacaucucccggcgccugcugggcacguucaccuggacccucagcgacuccgagggcaacgagacccccgggggcuacugccugacgcgguggaugcugaucgaggccgagcucaagugcuucgggaacaccgccguggcgaagugcaacgagaagcacgacgaggaguucugcgacaugcugcgccuguucgacuucugcaagcaggccauccggcgccucaagaccgaggcccagaugagcauccagcugaucaacaaggccgugaacgcccugaucaacgaccagcucaucaugaagaaccaccuccgggacaucaugggcaucccguacugcaacuacuccaaguacugguaccugaaccacaccgucacggggaagaccagccugccccgcugcuggcugguguccaacggcagcuaccugaacgagacccacuucuccgacgacaucgagcagcaggcggacaacaugaucaccgagcuccugcagaaggaguacauggaccggcagggcaagacgccccuggggcucguggaccuguucgucuucagcaccuccuucuaccugaucagcaucuuccugcaccucaucaagaucccgacccaccgccacaucaccggcaagcccugccccaagccccaccggcugaaccacauggggaucugcuccugcggccuguacaagcacccgggggugcccgugaaguggaagcgcuga

SEQ ID NO: 36558 - RNA, 1473 nt, Artificial Sequence
  derived and/or modified CDS sequence (opt1) from LASV(ISTH2010-NIG-2012;Clade II)__AIT17482__GPCmut10
augggccagaucaucaccuucuuccaggaggugccccacgucaucgaggaggugaugaacaucgugcugaucgcccucagccugcuggccauccucaaggggaucuacaacgucgcgaccugcggccuguucgggcugguguccuuccuccugcugugcggccgcagcugcuccacgaccuacaaggggguguacgagcuccagacccuggagcuggacauggccagccucaacaugugcaugccgcuguccugcacgaagaacaacagccaccacuacaucauggucggcaacgagaccggccuggagcucacccugaccaacacguccaucaucaaccacaaguucugcaaccugagcgacgcccacaagaagaaccucuacgaccacgcccugauguccaucaucagcaccuuccaccuguccauccccaacuucaaccaguacgaggccaugagcugcgacuucaacgggggcaagaucuccgugcaguacaaccucagccacgcguacgccguggacgccgccaaccacugcgggaccaucgcgaacggcguccugcagaccuucaugcggauggccuggggcggguccuacaucgcccuggacagcggcaagggguccugggacugcaucaugacgagcuaccaguaccucaucauccagaacaucaccugggaggaccacugccaguucucccgccccagccccaucggcuaccuggggcugcucagccagcggacccgcgacaucuacaucucccggcgccugcugggcaccuucacguggacccucagcgacuccgagggcaacgagacccccgggggcuacugccugacccgguggaugcugaucgaggccgagcucaagugcuucgggaacacggccguggcgaagugcaacgagaagcacgacgaggaguucugcgacaugcugcgccuguucgacuucugcaagcaggccauccggcgccucaagaccgaggcccagaugagcauccagcugaucaacaaggccgugaacgcccugaucaacgaccagcucaucaugaagaaccaccuccgggacaucaugggcauccccuacugcaacuacuccaaguacugguaccugaaccacaccgucaccgggaagacgagccugccccgcugcuggcugguguccaacggcagcuaccugaacgagacccacuucuccgacgacaucgagcagcaggcggacaacaugaucaccgagcuccugcagaaggaguacaucgaccggcagggcaagaccccgcuggggcucguggaccuguucgucuucagcacguccuucuaccugaucagcaucuuccugcaccucgugaagaucccgacccaccgccacguggucggcaagcccugccccaagccccaccggcugaaccacauggggaucugcuccugcggccuguacaagcacccgggggugcccgugaaguggaagcgcuga

SEQ ID NO: 36559 - RNA, 1473 nt, Artificial Sequence
  derived and/or modified CDS sequence (opt1) from LASV(Lassa virus/H.sapiens-wt/NGA/2015/ISTH_0543;Clade II)__AVO03639__GPCmut10
augggccagaucaucaccuucuuccaggaggugccccacgucaucgaggaggugaugaacaucgugcugaucgcccucagccugcuggccauccucaaggggaucuacaacgucgcgaccugcggccuguucgggcugguguccuuccuccugcugugcggccgcagcugcuccacgaccuacaaggggguguacgagcuccagacccuggagcuggacauggccaaccucaacaugugcaugccgcugagcugcacgaagaacaacucccaccacuacaucauggucggcaacgagaccggccuggagcucacccugaccaacacgagcaucaucaaccacaaguucugcaaccuguccgacgcccacaagaagaaccucuacgaccacgcccugaugagcaucaucuccaccuuccaccugagcauccccaacuucaaccaguacgaggccauguccugcgacuucaacgggggcaagaucagcgugcaguacaaccucucccacaccuacgcgguggacgccgccaaccacugcgggaccaucgccaacggcguccugcagacguucaugcggauggcguggggcgggagcuacaucgcccuggacuccggcaaggggagcugggacugcaucaugaccuccuaccaguaccucgugauccagaacaccaccugggaggaccacugccaguucagccgccccucccccaucggcuaccuggggcugcucagccagcggacgcgcgacaucuacaucagccggcgccugcugggcaccuucaccuggacccucuccgacagcgagggcaacgagacgcccgggggcuacugccugacccgguggaugcugaucgaggccgagcucaagugcuucgggaacaccgccguggccaagugcaacgagaagcacgacgaggaguucugcgacaugcugcgccuguucgacuucugcaagcaggcgauccggcgccucaagaccgaggcccagauguccauccagcugaucaacaaggccgucaacgcccugaucaacgaccagcucaucaugaagaaccaccuccgggacaucaugggcauccccuacugcaacuacagcaaguacugguaccugaaccacacggugaccgggaagaccucccugccccgcugcuggcuggugagcaacggcuccuaccugaacgagacccacuucagcgacgacaucgagcagcaggccgacaacaugaucacggagcuccugcagaaggaguacaucgaccggcagggcaagaccccgcuggggcucgucgaccuguucguguucuccaccagcuucuaccugaucuccaucuuccugcaccucgugaagaucccgacccaccgccacaucacgggcaagcccugccccaagccccaccggcugaaccacauggggaucugcagcugcggccuguacaagcacccggggguccccgugaaguggaagcgcuga

SEQ ID NO: 36560 - RNA, 1473 nt, Artificial Sequence
  derived and/or modified CDS sequence (opt1) from LASV(Lassa virus/H.sapiens-wt/NGA/2016/ISTH_0009;Clade II)__AVO03571__GPCmut10
augggccagaucaucaccuucuuccaggaggugccccacgucaucgaggaggugaugaacaucgugcugaucgcccucagccugcuggccauccucaaggggaucuacaacgucgcgaccugcggccugcuggggcucguguccuuccugcugcucugcggccgcagcugcuccacgaccuacaaggggguguacgagcugcagacccuggagcucgacauggccagccugaacaugugcaugccgcuguccugcacgaagaacaacagccaccacuacaucauggucggcaacgagaccggccucgagcugacccugaccaacacguccaucaucaaccacaaguucugcaaccucagcgacgcccacaagaagaaccuguacgaccacgcccugauguccaucaucagcaccuuccaccucuccauccccaacuucaaccaguacgaggccaugagcugcgacuucaacgggggccggaucuccgugcaguacaaccugagccacuccuacgcgguggacgccgccaaccacugcgggaccaucgccaacggcguccugcagaccuucaugcgcauggcguggggcgggagcuacaucgcccucgacuccggcaaggggagcugggacugcaucaugacguccuaccaguaccugaucauccagaacaccaccugggaggaccacugccaguucagccggcccagccccaucggcuaccuggggcuccugucccagcgcacccgggacaucuacaucagccgccggcugcucggcacguucaccuggacccuguccgacagcgagggcaacgagacccccgggggcuacugccugacgcgcuggaugcucaucgaggccgagcugaagugcuucgggaacaccgccguggccaagugcaacgagaagcacgacgaggaguucugcgacaugcugcggcuguucgacuucugcaagcaggcgauccgccggcugaagaccgaggcccagauguccauccagcugaucaacaaggccgugaacgcccucaucaacgaccagcugaucaugaagaaccaccuccgcgacaucaugggcaucccguacugcaacuacagcaaguacugguaccucaaccacaccgucacggggaagaccucccugccccggugcuggcuggugagcaacggcuccuaccucaacgagacccacuucagcgacgacaucgagcagcaggccgacaacaugaucaccgagcugcugcagaaggaguacaucgaccgccagggcaagacgccccucgggcugguggaccuguucgucuucuccaccagcuucuaccugaucuccaucuuccuccaccuggugaagaucccgacccaccggcacaucaccggcaagcccugccccaagccccaccgccugaaccacauggggaucugcagcugcggccucuacaaccacccgggggugcccgucaaguggaagcgguga

SEQ ID NO: 36561 - RNA, 1473 nt, Artificial Sequence
  derived and/or modified CDS sequence (opt1) from LASV(Lassa virus/H.sapiens-wt/NGA/2016/ISTH_0017;Clade II)__AVO03567__GPCmut10
augggccagaucaucaccuucuuccaggaggugccccacgucaucgaggaggugaugaacaucgugcugaucgcccucagccugcuggccauccucaaggggaucuacaacgucgcgaccugcggccuguucgggcugguguccuuccuccugcugugcggccgcagcugcuccacgaccuacaaggggguguacgagcuccagacccuggagcuggacauggccagccucaacaugugcaugccgcuguccugcacgaagaacaacagccaccacuacaucauggucggcaacgagaccggccuggagcucacccugaccaacacguccaucaucaaccacaaguucugcaaccugagcgacgcccacaagaagaaccucuacgaccacgcccugauguccaucaucagcaccuuccaccuguccauccccaacuucaaccaguacgaggccaugagcugcgacuucaacgggggcaagaucuccgugcaguacaaccucagccacaccuacgcgaucgacgccgccaaccacugcgggaccaucgccaacggcgugcugcagacguucaugcggauggcguggggcggguccuacaucgcccuggacagcggcaagggguccugggacugcaucaugaccagcuaccaguaccucaucauccagaacaccaccugggaggaccacugccaguucucccgccccagccccaucggcuaccuggggcugcucagccagcggacgcgcgacaucuacaucucccggcgccugcugggcaccuucaccuggacccucagcgacuccgagggcaacgagacgcccgggggcuacugccugacccgguggaugcugaucgaggccgagcucaagugcuucgggaacaccgccgucgccaagugcaacgagaagcacgacgaggaguucugcgacaugcugcgccuguucgacuucugcaagcaggcgauccggcgccucaagaccgaggcccagaugagcauccagcugaucaacaaggccgugaacgcccugaucaacgaccagcucaucaugaagaaccaccuccgggacaucaugggcauccccuacugcaacuacuccaaguacugguaccugaaccacacggugaccgggaagaccagccugccccgcugcuggcuggucuccaacggcagcuaccugaacgagacccacuucuccgacgacaucgagcagcaggccgacaacaugaucacggagcuccugcagaaggaguacauggaccggcagggcaagaccccgcuggggcucguggaccuguucguguucagcaccuccuucuaccugaucagcaucuuccugcaccucguccgcaucccgacccaccggcacgugaucggcaagcccugccccaagccccaccgccugaaccacauggggaucugcuccugcggccuguacaagcacccgggggugcccgucaaguggaagcgguga

SEQ ID NO: 36562 - RNA, 1473 nt, Artificial Sequence
  derived and/or modified CDS sequence (opt1) from LASV(Lassa virus/H.sapiens-wt/NGA/2018/ISTH_0959;Clade II)__AVV65099__GPCmut10
augggccagaucaucaccuucuuccaggaggugccccacgucaucgaggaggugaugaacaucgugcugaucgcccucagccugcuggccauccucaaggggaucuacaacgucgugaccugcggccuguucgggcugguguccuuccuccugcugugcggccgcagcugcuccacgaccuacaagggggucuacgagcuccagacccuggagcuggacauggcgagccucaacaugugcaugccgcuguccugcacgaagaacaacagccaccacuacaucauggugggcaacgagaccggccuggagcucacccugaccaacacguccaucaucaaccacaaguucugcaaccugagcgacgcccacaagaagaaccucuacgaccacgcccugauguccaucaucagcaccuuccaccuguccauccccaacuucaaccaguacgaggccaugagcugcgacuucaacgggggcaagaucuccgugcaguacaaccucagccacgccuacgcgaucgacgccgccaaccacugcgggaccaucgccaacggcguccugcagaccuucaugcggauggcguggggcggguccuacaucgcccuggacagcggcaagggguccugggacugcaucaugacgagcuaccaguaccucaucauccagaacaccaccugggaggaccacugccaguucucccgccccagccccaucggcuaccuggggcugcucagccagcggacccgcgacaucuacaucucccggcgccugcugggcacguucaccuggacccucagcgacuccgagggcaacgagacccccgggggcuacugccugacgcgguggaugcugaucgaggccgagcucaagugcuucgggaacaccgccguggccaagugcaacgagaagcacgacgaggaguucugcgacaugcugcgccuguucgacuucugcaagcaggcgauccggcgccucaagaccgaggcccagaugagcauccagcugaucaacaaggccgugaacgcccugaucaacgaccagcucaucaugaagaaccaccuccgggacaucaugggcaucccguacugcaacuacuccaaguacugguaccugaaccacaccgucacggggaagaccagccugccccgcugcuggcugguguccaacggcagcuaccugaacgagacccacuucuccgacgacaucgagcagcaggccgacaacaugaucaccgagcuccugcagaaggaguacaucgaccggcagggcaagacgccccuggggcucguggaccuguucgucuucagcaccuccuucuaccugaucagcaucuuccugcaccucgugaagaucccgacccaccgccacgugaucggcaagcccugccccaagccccaccggcugaaccacauggggaucugcuccugcggccuguacaagcacccggggguccccgugaaguggaagcgcuga

SEQ ID NO: 36563 - RNA, 1473 nt, Artificial Sequence
  derived and/or modified CDS sequence (opt1) from LASV(LASV003-NIG-2008;Clade II)__AIT17580__GPCmut10
augggccagaucaucaccuucuuccaggaggugccccacgucaucgaggaggugaugaacaucgugcugaucgcccucagccugcuggccauccucaaggggaucuacaacgucgcgaccugcggccuguucgggcugguguccuuccuccugcugugcggccgcagcugcuccacgaccuacaaggggguguacgagcuccagacccuggagcuggacauggccagccucaacaugugcaugccgcuguccugcacgaagaacaacagccaccacuacaucauggucggcaacgagaccggccuggagcucacccugaccaacacguccaucaucaaccacaaguucugcaaccugagcgacgcccacaagaagaaccucuacgaccacgcccugauguccaucaucagcaccuuccaccuguccauccccaacuucaaccaguacgaggccaugagcugcgacuucaacgggggcaagaucuccgugcaguacaaccucagccacaccuacgcgguggacgccgccaaccacugcgggaccaucgccaacggcguccugcagacguucaugcggauggcguggggcggguccuacaucgcccuggacagcggcaagggguccugggacugcaucaugaccagcuaccaguaccucaucauccagaacaccaccugggaggaccacugccaguucucccgccccagccccaucggcuaccuggggcugcucagccagcggacgcgcgacaucuacaucucccggcgccugcugggcaccuucaccuggacccucagcgacuccgagagcaacgagacgccgggcggguacugccugacccgguggaugcugaucgaggccgagcucaagugcuucggcaacaccgccguggccaagugcaacgagaagcacgacgaggaguucugcgacaugcugcgccuguucgacuucugcaagcaggcgauccggcgccucaaggccgaggcccagauguccauccagcugaucaacaaggccgugaacgcccugaucaacgaccagcucaucaugaagaaccaccuccgggacaucauggggauccccuacugcaacuacagcaaguacugguaccugaaccacaccgucacgggccgcaccucccugccccggugcuggcuggugagcaacggguccuaccugaacgagacccacuucagcgacgacaucgagcagcaggcggacaacaugaucaccgagcuccugcagaaggaguacauggaccgccagggcaagacgccccugggccucguggaccuguucgucuucuccaccagcuucuaccugaucuccaucuuccugcaccucgugaagaucccgacccaccggcacgugaucgggaagcccugccccaagccccaccgccugaaccacaugggcaucugcagcugcgggcuguacaagcacccgggcguccccgugaaguggaagcgguga

SEQ ID NO: 36564 - RNA, 1473 nt, Artificial Sequence
  derived and/or modified CDS sequence (opt1) from LASV(LASV035-NIG-2009;Clade II)__AIT17588__GPCmut10
augggccagaucaucaccuucuuccaggaggugccccacgucaucgaggaggugaugaacaucgugcugaucgcccucagccugcuggccauccucaaggggaucuacaacgucgcgaccugcggccuguucgggcugguguccuuccuccugcugugcggccgcagcugcuccacgaccuacaaggggguguacgagcuccagacccuggagcuggacauggccagccucaacaugugcaugccgcuguccugcacgaagaacaacagccaccacuacaucauggucggcaacgagaccggccuggagcucacccugaccaacacguccaucaucaaccacaaguucugcaaccugagcgacgcccacaagaagaaccucuacgaccacgcccugauguccaucaucagcaccuuccaccuguccauccccaacuucaaccaguacgaggccaugagcugcgacuucaacgggggcaagaucuccgugcaguacaaccucagccacgcguacgccguggacgccgccaaccacugcgggaccaucgcgaacggcguccugcagaccuucaugcggauggccuggggcggguccuacaucgcccuggacagcggcaagggguccugggacugcaucaugacgagcuaccaguaccucaucauccagaacaccaccugggaggaccacugccaguucucccgccccagccccaucggcuaccuggggcugcucagccagcggacccgcgacaucuacaucucccggcgccugcugggcacguucaccuggacccucagcgacuccgagggcaacgagacccccgggggcuacugccugacgcgguggaugcugaucgaggccgagcucaagugcuucgggaacaccgccguggcgaagugcaacgagaagcacgacgaggaguucugcgacaugcugcgccuguucgacuucugcaagcaggccauccggcgccucaaggccgaggcccagaugagcauccagcugaucaacaaggccgugaacgcgcugaucaacgaccagcucaucaugaagaaccaccuccgggacaucaugggcauccccuacugcaacuacuccaaguacugguaccugaaccacaccgucaccgggaagacgagccugccccgcugcuggcugguguccaacggcagcuaccugaacgagacccacuucuccgacgacaucgagcagcaggccgacaacaugaucaccgagcuccugcagaaggaguacaucgaccggcagggcaagaccccgcuggggcucguggaccuguucgucuucagcacguccuucuaccugaucagcaucuuccugcaccucgugaagaucccgacccaccgccacgugaucggcaagcccugccccaagccccaccggcugaaccacauggggaucugcuccugcggccuguacaagcacccggggguccccgugaaguggaagcgcuga

SEQ ID NO: 36565 - RNA, 1473 nt, Artificial Sequence
  derived and/or modified CDS sequence (opt1) from LASV(LASV1000-NIG-2009;Clade II)__AIT17782__GPCmut10
augggccagaucaucaccuucuuccaggaggugccccacgucaucgaggaggugaugaacaucgugcugaucgcccucagccugcuggccauccucaaggggaucuacaacgucgcgaccugcggccuguucgggcugguguccuuccuccugcugugcggccgcagcugcuccacgaccuacaaggggguguacgagcuccagacccuggagcuggacauggccagccucaacaugugcaugccgcuguccugcacgaagaacaacagccaccacuacaucauggucggcaacgagaccggccuggagcucacccugaccaacacguccaucaucaaccacaaguucugcaaccugagcgacgcccacaagaagaaccucuacgaccacgcccugauguccaucaucagcaccuuccaccuguccauccccaacuucaaccaguacgaggccaugagcugcgacuucaacgggggcaagaucuccgugcaguacaaccucagccacaccuacgcgguggacgccgccaaccacugcgggaccaucgccaacggcguccugcagacguucaugcggauggcguggggcggguccuacaucgcccuggacagcggcaagggguccugggacugcaucaugaccagcuaccaguaccucaucauccagaacaccaccugggaggaccacugccaguucucccgccccagccccaucggcuaccuggggcugcucagccagcggacgcgcgacaucuacaucucccggcgccugcugggcaccuucaccuggacccucagcgacuccgagggcaacgagacgcccgggggcuacugccugacccgguggaugcugaucgaggccgagcucaagugcuucgggaacaccgccguggccaagugcaacgagaagcacgacgaggaguucugcgacaugcugcgccuguucgacuucugcaagcaggcgaucaagcggcucaagaccgaggcccagaugagcauccagcugaucaacaaggccgugaacgcccugaucaacgaccagcucaucaugaagaaccaccuccgcgacaucaugggcauccccuacugcaacuacuccaaguacugguaccugaaccacacggucaccgggaagaccagccugccccggugcuggcugguguccaacggcagcuaccugaacgagacccacuucuccgacgacaucgagcagcaggccgacaacaugaucacggagcuccugcagaaggaguacaucgaccgccagggcaagaccccgcuggggcucguggaccuguucgucuucagcaccuccuucuaccugaucagcaucuuccugcaccucgugaagaucccgacccaccggcacguggucggcaagcccugccccaagccccaccgccugaaccacauggggaucugcuccugcggccuguacaagcacccgggggugcccgugaaguggaagcgguga

SEQ ID NO: 36566 - RNA, 1473 nt, Artificial Sequence
  derived and/or modified CDS sequence (opt1) from LASV(LASV221-NIG-2010;Clade II)__AIT17624__GPCmut10
augggccagaucaucaccuucuuccaggaggugccccacgucaucgaggaggugaugaacaucgugcugaucgcccucagccugcuggccauccucaaggggaucuacaacgucgcgaccugcggccuguucgggcugguguccuuccuccugcugugcggccgcagcugcuccacgaccuacaaggggguguacgagcuccagacccuggagcuggacauggccagccucaacaugugcaugccgcuguccugcacgaagaacaacagccaccacuacaucauggucggcaacgagaccggccuggagcucacccugaccaacacguccaucaucaaccacaaguucugcaaccugagcgacgcccacaagaagaaccucuacgaccacgcccugauguccaucaucagcaccuuccaccuguccauccccaacuucaaccaguacgaggccaugagcugcgacuucaacgggggcaagaucuccgugcaguacaaccucagccacaccuacgcgaucgacgccgccaaccacugcgggaccaucgccaacggcgugcugcagacguucaugcggauggcguggggcggguccuacaucgcccuggacagcggcaagggguccugggacugcaucaugaccagcuaccaguaccucaucauccagaacaccaccugggaggaccacugccaguucucccgccccagccccaucggcuaccuggggcugcucagccagcggacgcgcgacaucuacaucucccggcgccugcugggcaccuucaccuggacccucagcgacuccgagggcaacgagacgcccgggggcuacugccugacccgguggaugcugaucgaggccgagcucaagugcuucgggaacaccgccgucgccaagugcaacgagaagcacgacgaggaguucugcgacaugcugcgccuguucgacuucugcaagcaggcgauccggcgccucaagaccgaggcccagaugagcauccagcugaucaacaaggccgugaacgcccugaucaacgaccagcucaucaugaagaaccaccuccgggacaucaugggcauccccuacugcaacuacuccaaguacugguaccugaaccacacggugaccgggaagaccagccugccccgcugcuggcuggucuccaacggcagcuaccugaacgagacccacuucuccgacgacaucgagcagcaggccgacaacaugaucacggagaugcuccagaaggaguacauggaccggcagggcaagaccccgcuggggcugguggaccucuucguguucagcaccuccuucuaccugaucagcaucuuccugcaccuggucaagaucccgacccaccgccacgugaucggcaagcccugccccaagccccaccggcucaaccacauggggaucugcuccugcggccuguacaagcacccgggggugcccgucaaguggaagcgcuga

SEQ ID NO: 36567 - RNA, 1473 nt, Artificial Sequence
  derived and/or modified CDS sequence (opt1) from LASV(LASV237-NIG-2010;Clade II)__AIT17638__GPCmut10
augggccagaucaucaccuucuuccaggaggugccccacgucaucgaggaggugaugaacaucgugcugaucgcccucagccugcuggccauccucaaggggaucuacaacgucgcgaccugcggccuguucgggcugguguccuuccuccugcugugcggccgcagcugcuccacgaccuacaaggggguguacgagcuccagacccuggagcuggacauggccagccucaacaugugcaugccgcuguccugcacgaagaacaacagccaccacuacaucauggucggcaacgagaccggccuggagcucacccugaccaacacguccaucaucaaccacaaguucugcaaccugagcgacgcccacaagaaggaccucuacgaccacgcccugauguccaucaucagcaccuuccaccuguccauccccaacuucaaccaguacgaggccaugagcugcgacuucaacgggggcaagaucuccgugcaguacaaccucagccacaccuacgcgguggacgccgccaaccacugcgggaccaucgccaacggcguccugcagacguucaugcggauggcguggggcggguccuacaucgcccuggacagcggcaagggguccugggacugcaucaugaccagcuaccaguaccucaucauccagaacaccaccugggaggaccacugccaguucucccgccccagccccaucggcuaccuggggcugcucagccagcggacgcgcgacaucuacaucucccggcgccugcugggcaccuucaccuggacccucagcgacuccgagggcaacgagacgcccgggggcuacugccugacccgguggaugcugaucgaggccgagcucaagugcuucgggaacaccgccguggccaagugcaacgagaagcacgacgaggaguucugcgacaugcugcgccuguucgacuucugcaagcaggcgauccggcgccucaagaccgaggcccagaugagcauccagcugaucaacaaggccgugaacgcccugaucaacgaccagcucaucaugaagaaccaccuccgggacaucaugggcauccccuacugcaacuacuccaaguacugguaccugaaccacacggucaccgggaagaccagccugccccgcugcuggcugguguccaacggcagcuaccugaacgagacccacuucuccgacgacaucgagcagcaggccgacaacaugaucacggagcuccugcagaaggaguacauggaccggcagggcaagaccccgcuggggcucguggaccuguucgucuucagcaccuccuucuaccugaucagcaucuuccugcaccucaucaagaucccgacccaccgccacaucacgggcaagcccugccccaagccccaccggcugaaccacauggggaucugcuccugcggccuguacaagcacccgggggugcccgugaaguggaagcgcuga

SEQ ID NO: 36568 - RNA, 1473 nt, Artificial Sequence
  derived and/or modified CDS sequence (opt1) from LASV(LASV253-NIG-2011;Clade II)__AIT17670__GPCmut10
augggccagaucaucaccuucuuccaggaggugccccacgucaucgaggaggugaugaacaucgugcugaucgcccucagccugcuggccauccucaaggggaucuacaacgucgcgaccugcggccuguucgggcugguguccuuccuccugcugugcggccgcagcugcuccacgaccuacaaggggguguacgagcuccagacccuggagcuggacauggccagccucaacaugugcaugccgcuguccugcacgaagaacaacagccaccacuacaucauggucggcaacgagaccggccuggagcucacccugaccaacacguccaucaucaaccacaaguucugcaaccugagcgacgcccacaagaagaaccucuacgaccacgcccugauguccaucaucagcaccuuccaccuguccauccccaacuucaaccaguacgaggccaugagcugcgacuucaacgggggcaagaucuccgugcaguacaaccucagccacaccuacgcgguggacgccgccaaccacugcgggaccaucgccaacggcguccugcagacguucaugcggauggcguggggcggguccuacaucgcccuggacagcggcaagggguccugggacugcaucaugaccagcuaccaguaccucaucauccagaacaccaccugggaggaccacugccaguucucccgccccagccccaucggcuaccuggggcugcucagccagcggacgcgcgacaucuacaucucccggcgccugcugggcaccuucaccuggacccucagcgacuccgagggcaacgagacgcccgggggcuacugccugacccgguggaugcugaucgaggccgagcucaagugcuucgggaacaccgccguggccaagugcaacgagaagcacgacgaggaguucugcgacaugcugcgccuguucgacuucugcaagcaggcgauccggcgccucaaggccgaggcccagaugagcauccagcugaucaacaaggccgugaacgcccugaucaacgaccagcucaucaugaagaaccaccuccgggacaucaugggcaucccguacugcaacuacuccaaguacugguaccugaaccacaccgucacggggcgcaccagccugccccggugcuggcugguguccaacggcagcuaccugaacgagacccacuucuccgacgacaucgagcagcaggcggacaacaugaucaccgagcuccugcagaaggaguacaucgaccgccagggcaagacgccccuggggcucguggaccuguucgucuucagcaccuccuucuaccugaucagcaucuuccugcaccucgugaagaucccgacccaccggcacaucaucggcaagcccugccccaagccccaccgccugaaccacauggggaucugcuccugcggccuguacaagcacccgggggugcccgucaaguggaagcgguga

SEQ ID NO: 36569 - RNA, 1473 nt, Artificial Sequence
  derived and/or modified CDS sequence (opt1) from LASV(LASV254-NIG-2011;Clade II)__AIT17674__GPCmut10
augggccagaucaucaccuucuuccaggaggugccccacgucaucgaggaggugaugaacaucgugcugaucgcccucagccugcuggccauccucaaggggaucuacaacgucgcgaccugcggccuguucgggcugguguccuuccuccugcugugcggccgcagcugcuccacgaccuacaaggggguguacgagcuccagacccuggagcuggacaugaccaaccucaacaugugcaugccgcugagcugcaccaagaacaacucccaccacuacaucauggucggcaacgagaccggccuggagcucacccugacgaacaccagcaucaucaaccacaaguucugcaaccuguccgacgcccacaagaagaaccucuacaaccacgcccugaugagcaucaucuccaccuuccaccugagcauccccaacuucaaccaguacgaggccauguccugcgacuucaacgggggcaagaucagcgugcaguacaaccucucccacagcuacgccguggacgcggccaaccacugcgggaccaucgccaacggcguccugcagacguucaugcggauggccuggggcggguccuacaucgcgcuggacagcggcaaggggaacugggacugcaucaugaccuccuaccaguaccucaucauccagaacaccaccugggaggaccacugccaguucagccgccccucccccaucggcuaccuggggcugcucagccagcggacgcgcgacaucuacaucagccggcgccugcugggcaccuucaccuggacccucuccgacagcgagggcaacgagacgcccgggggcuacugccugacccgguggaugcugaucgaggccgagcucaagugcuucgggaacaccgccguggccaagugcaacgagaagcacgacgaggaguucugcgacaugcugcgccuguucgacuucugcaagcaggccauccggcgccucaagaccgaggcgcaggccaacauccagcugaucaacaaggccgugaacgcccugaucaacgaccagcucaucaugaagaaccaccuccgggacaucaugggcauccccuacugcaacuacuccaaguacugguaccugaaccacacggucaccgggaagaccagccugccccgcugcuggcugguguccaacggcagcuaccugaacgagacccacuucuccgacgacaucgagcagcaggccgacaacaugaucacggagcuccugcagaaggaguacauggaccggcagggcaagaccccgcuggggcucguggaccuguucgucuucagcaccuccuucuaccugaucagcaucuuccugcaccucgugaagaucccgacccaccgccacgugaucggcaagcccugccccaagccccaccggcugaaccacauggggaucugcuccugcggccuguacaagcacccggggguccccgugaaguggaagcgcuga

SEQ ID NO: 36570 - RNA, 1473 nt, Artificial Sequence
  derived and/or modified CDS sequence (opt1) from LASV(Nig08-A19;Clade III)__ADU56618__GPCmut10
augggccagaucgugaccuucuuccaggaggucccccacgugaucgaggaggugaugaacaucguccugaucgcccucagcauccuggccauccugaaggggcucuacaacaucgcgaccugcggccugaucgggcuggugacguuccuccugcuguccggccgcagcugcuccaugaccuacaaggggguguacgagcuccagacccuggagcugaacaugaacacccucaacaugugcaugccgcugagcugcaccaagaacaacucccaccacuacaucauggucggcaacgagaccggccuggagcucacccugacgaacaccagccugcuccaccacaaguucugcaaccuguccgacgcccacaagaagaaccuguacgaccacacccucaugagcaucaucuccaccuuccaccugagcauccccaacuucaaccaguacgaggccauguccugcgacuucaacgggggcaagaucacggugcaguacaaccugagccacuccuacgccaucgacgccgcgaaccacugcgggaccguggccaacggcguccuccagaccuucaugcggauggccuggggcgggagcuacaucgcccuggacuccggccgcgggaagugggacugcaucaugaccagcuaccaguaccugaucauccagaacacgaccugggaggaccacugccaguucucccggcccagccccaucggcuaccucgggcugcugucccagcgcacccgggacaucuacaucagccgccggcuccugggcaccuucacguggacccugagcgacuccgagggcaacgagacccccgggggcuacugccucacccgcuggaugcugaucgaggcggagcugaagugcuucgggaacacggccguggccaagugcaacgagaagcacgacgaggaguucugcgacaugcuccggcuguucgacuucugcaagcaggccauccgccggcugaaggccgaggcgcagaugagcauccagcucaucaacaaggccgugaacgcccugaucaacgaccagcugaucaugaagaaccaccuccgcgacaucaugggcauccccuacugcaacuacuccaaguacugguaccugaaccacaccagcaccgggcggaccucccugccccgcugcuggcucgucagcaacggcuccuaccugaacgagacgcacuucagcgacgacaucgagcagcaggccgacaacaugaucaccgagaugcugcagaaggaguaccucgaccggcagggcaagaccccgcuggggcugguggaccuguucguguucuccaccagcuucuaccucaucuccaucuuccugcaccuggucaagaucccgacgcaccgccacaucgugggcaagcccugccccaagccccaccggcucaaccacauggggaucugcagcugcggccuguacaagcagccgggggugcccguccgcuggaagcgguga

SEQ ID NO: 36571 - RNA, 1476 nt, Artificial Sequence
  derived and/or modified CDS sequence (opt1) from LASV(G1180-SLE-2010;Clade IV)__AIT17168__GPCmut10
augggccagaucgugaccuucuuccaggaggucccccacgugaucgaggaggugaugaacaucguccugaucgcccucagcauccuggccgugcugaaggggcucuacaacuucgcgaccugcggccugguggggcugcucaccuuccugcugcucugcggccgcuccugcaccgccagccgguacaagggggucuacgagcugcagacccuggagcucaacauggagacccugaacaugugcaugccgcuguccugcaccaagaacaacagccaccacuacaucauggugggcaacgagaccggccucgagcugacccugacgaacaccuccaucaucaaccacaaguucugcaaccucagcgacgcccacaagaagaaccuguacgaccacgcccugauguccaucaucagcaccuuccaccucuccauccccaacuucaaccaguacgaggccaugagcugcgacuucaacgggggcaagaucuccgugcaguacaaccugagccacuccuacgcgggggacgccgccaaccacugcggcaccgucgccaacggggugcugcagacguucaugcgcauggcguggggcggcagcuacaucgcccucgacuccgggcacggcagcugggacugcaucaugaccuccuaccaguaccugaucauccagaacaccaccugggaggaccacugccaguucagccggcccucccccaucggguaccugggccuccugagccagcgcacgcgggacaucuacaucagccgccggcugcucggcaccuucaccuggacccuguccgacagcgaggggaaggacacgccgggcggguacugccugacccgcuggaugcucaucgaggccgagcugaagugcuucggcaacaccgccguggccaagugcaacgagaagcacgacgaggaguucugcgacaugcugcggcuguucgacuucugcaagcaggcgauccagcgccugaaggccgaggcccagauguccauccagcugaucaacaaggccgucaacgcccucaucaacgaccagcugaucaugaagaaccaccuccgggacaucauggggauccccuacugcaacuacagcaaguacugguaccucaaccacaccacgaccggcaagaccucccugcccaagugcuggcuggugagcaacggcuccuaccucaacgagacccacuucagcgacgacaucgagcagcaggcggacaacaugaucacggagaugcugcagaaggaguacauggagcgccaggggaagacgccccugggccucguggaccuguucgucuucuccaccagcuucuaccugaucuccaucuuccugcaccucgugaagaucccgacccaccggcacaucgugggcaagagcugccccaagccccaccgccugaaccacauggggaucugcuccugcgggcuguacaagcagcccggcgucccggugaaguggaagcgguga

SEQ ID NO: 36572 - RNA, 1476 nt, Artificial Sequence
  derived and/or modified CDS sequence (opt1) from LASV(G1442-SLE-2011;Clade IV)__AIT17180__GPCmut10
augggccagaucgugaccuucuuccaggaggucccccacgugaucgaggaggugaugaacaucguccugaucgcccucagcauccuggccgugcugaaggggcucuacaacguggcgaccugcggccugaucgggcuggucacguuccuccugcugugcggccgcuccugcaccaccacccucuacaaggggguguacgagcugcagacgcuggagcucaacauggagacccugaacaugugcaugccgcugagcugcaccaagaacaacucccaccacuacauccgggugggcaacgagacgggccucgagcugacccugaccaacaccagcaucaucaaccacaaguucugcaaccucuccgacgcccacaagaagaaccuguacgaccacgcccugaugagcaucaucuccacguuccaccucagcauccccaacuucaaccaguacgaggccauguccugcgacuucaacgggggcaagaucagcguccaguacaaccugucccacagcuacgccggggacgcggccaaccacugcggcaccguggccaacggggugcugcagaccuucaugcgcauggccuggggcggcuccuacaucgcgcucgacagcgggcggggcaacugggacugcaucaugaccuccuaccaguaccugaucauccagaacacgaccugggacgaccacugccaguucagccgccccucccccaucggguaccugggccuccugagccagcggacccgcgacgucuacaucucccggcgccugcucggcaccuucacguggacccugagcgacagcgaggggaaggacaccccgggcggguacugccugacccgguggaugcucaucgaggccgagcugaagugcuucggcaacacggccguggccaagugcaacgagaagcacgacgaggaguucugcgacaugcugcgccucuucgacuucugcaagcaggccauccagcggcugaaggcggaggcccagauguccauccagcugaucaacaaggccgugaacgcccucaucaacgaccagcugaucaugaagaaccaccuccgcgacaucauggggauccccuacugcaacuacagcaaguacugguaccugaacaacaccgccaccggcaagaccucccugcccaagugcuggcugaucagcaacggcuccuaccucaacgagacgcacuucagcgacgacaucgagcaggaggcggacaacaugaucaccgagaugcugcagaaggaguacauggagcggcaggggaagacgccccugggccucgucgaccuguucguguucuccaccagcuucuaccugaucuccaucuuccugcaccucgugaagaucccgacccaccgccacaucgucggcaagagcugccccaagccccaccggcugaaccacauggggaucugcuccugcgggcuguacaagcagcccggcgugccggugcgcuggaagcgguga

SEQ ID NO: 36573 - RNA, 1476 nt, Artificial Sequence
  derived and/or modified CDS sequence (opt1) from LASV(G3010-SLE-2013;Clade IV)__AIT17344__GPCmut10
augggccagaucgugaccuucuuccaggaggucccccacgugaucgaggaggugaugaacaucguccugaucgcccucagcauccuggccgugcugaaggggcucuacaacuucgcgaccugcggccugguggggcuggucacguuccuccugcugugcggccgcuccugcaccaccagccucuacaaggggguguacgagcugcagacccuggagcucaacauggagacgcugaacaugugcaugccgcuguccugcaccaagaacaacagccaccacuacaucauggugggcaacgagaccggccucgagcugacgcugaccaacaccuccaucaucaaccacaaguucugcaaccucagcgacgcccacaagaagaaccuguacaaccacgcccugauguccaucaucagcaccuuccaccucuccauccccaacuucaaccaguacgaggccaugagcugcgacuucaacgggggcaagaucuccguccaguacaaccugagccacuccuacgccggggacgcggccagccacugcggcacgguggccaacggggugcugcagaccuucaugcggauggccuggggcggcuccuacaucgcgcucgacagcggguacggcaagugggacugcaucaugaccuccuaccaguaccugaucauccagaacaccacgugggaggaccacugccaguucagccgccccucccccaucggguaccugggccuccugagccagcggacccgcgacaucuacaucagccggcgccugcucggcaccuucaccuggacgcuguccgacagcgaggggaaggacaccccgggcggguacugccugacccgguggaugcucaucgaggccgagcugaagugcuucggcaacaccgccgucgccaagugcaacgagaagcacgacgaggaguucugcgacaugcugcgccucuucgacuucugcaagcaggccauccagcggcugaagacggaggcgcagauguccauccagcugaucaacaaggccgugaacgcccucaucaacgaccagcugaucaugaagaaccaccuccgcgacaucauggggauccccuacugcaacuacagcaaguacugguaccugaaccacaccaccaccggcaagacgucccugcccaagugcuggcuggugagcaacggcuccuaccucaacgagacccacuucagcgacgacaucgagcagcaggccgacaacaugaucaccgagaugcugcagaaggaguacauggagcggcaggggaagacgccccugggccucgucgaccuguucguguucuccaccagcuucuaccugaucuccaucuuccugcaccucgugaagaucccgacccaccgccacaucgucggcaagagcugccccaagccccaccggcugaaccacauggggaucugcuccugcgggcuguacaagcagcccggcgugccggugcgcuggaagcgguga

SEQ ID NO: 36574 - RNA, 1476 nt, Artificial Sequence
  derived and/or modified CDS sequence (opt1) from LASV(G502-SLE-2009;Clade IV)__AIT17126__GPCmut10
augggccagaucgugaccuucuuccaggaggucccccacgugaucgaggaggugaugaacaucguccugaucgcccucagcauccuggccgugcugaaggggcucuacaacuucgcgaccugcggccugguggggcugcucacguuccugcugcucugcggccgcuccugcaccaccgggcuguacaagggcgucuacgagcugcagacccucgagcugaacauggagacgcugaacaugugcaugccgcucagcugcaccaagaacaacucccaccacuacaucauggugggcaacgagaccgggcuggagcugacgcucaccaacaccagcaucaucaaccacaaguucugcaaccuguccgacgcccacaagaagaaccuguacgaccacgcccucaugagcaucaucuccaccuuccaccugagcauccccaacuucaaccaguacgaggccauguccugcgacuucaacggcgggaagaucagcgugcaguacaaccugucccacagcuacgccggcgacgcggccgaccacugcgggacggucgccaacggcgugcuccagaccuucaugcggauggccuggggcggguccuacaucgcgcuggacagcggccgcgggcggugggacugcaucaugaccuccuaccaguaccugaucauccagaacaccacgugggaggaccacugccaguucagccgccccucccccaucggcuaccucggccugcugagccagcggacccgcgacaucuacaucucccggcgccuccuggggaccuucaccuggacgcugagcgacagcgagggcaaggacacccccgggggcuacugccucacccgguggaugcugaucgaggccgagcugaagugcuucgggaacaccgccguggccaagugcaacgagaagcacgacgaggaguucugcgacaugcuccgccuguucgacuucugcaagcaggccauccagcggcugaaggcggaggcccagauguccauccagcucaucaacaaggccgucaacgcccugaucaacgaccagcuggugaugaagaaccaccuccgcgacaucaugggcauccccuacugcaacuacagccgguacugguaccugaaccacacgaccaccggccgcaccucccugcccaagugcuggcucgugagcaacggguccuaccugaacgagacgcacuucagcgacgacaucgagcagcaggccgacaacaugaucaccgagaugcugcagaaggaguacauggagcggcagggcaagaccccgcucgggcuggucgaccuguucguguucuccaccagcuucuaccugaucuccaucuuccuccaccuggugaagaucccgacgcaccgccacaucgucggcaagagcugccccaagccccaccggcugaaccacauggggaucugcuccugcggccucuacaagcagcccggcgugccggugaaguggaagcgcuga

SEQ ID NO: 36575 - RNA, 1476 nt, Artificial Sequence
  derived and/or modified CDS sequence (opt1) from LASV(G733-SLE-2010;Clade IV)__AIT17154__GPCmut10
augggccagaucgugaccuucuuccaggaggucccccacgugaucgaggaggugaugaacaucguccugaucgcccucagcauccuggccgugcugaaggggcucuacaacuucgcgaccugcggcaucguggggcuggucuccuuccugcuccugugcggccgcagcugcacgaccucccuguacaaggggguguacgagcuccagacccuggagcugaacauggagacccucaacaugugcaugccgcugagcugcaccaagaacaacucccaccacuacaucauggugggcaacgagaccggccuggagcucacccugacgaacaccagcaucaucaaccacaaguucugcaaccuguccgacgcccacaagaagaaccucuacgaccacgcccugaugagcaucaucuccaccuuccaccugagcauccccaacuucaaccaguacgaggccauguccugcgacuucaacgggggcaagaucagcguccaguacaaccucucccacagcuacgccggggacgcggccaaccacugcggcaccaucgccaacggggugcugcagacguucaugcggauggccuggggcggcuccuacaucgcgcuggacagcgggcgcgaccggugggacugcaucaugaccuccuaccaguaccucaucauccagaacaccaccugggaggaccacugccaguucagccgccccucccccaucggcuaccuggggcugcucagccagcggacgcgcgacaucuacaucagccggcgccugcugggcaccuucaccuggacccucuccgacagcgagggcaaggacacgcccgggggcuacugccugacccgguggaugcugaucgaggccgagcucaagugcuucgggaacaccgccguggccaagugcaacgagaagcacgacgaggaguucugcgacaugcugcgccuguucgacuucugcaagcaggccauccagcggcucaaggcggaggcccagauguccauccagcugaucaacaaggccgucaacgcccugaucaacgaccagcucaucaugaagaaccaccuccgcgacaucaugggcauccccuacugcaacuacagcaaguacugguaccugaaccacaccacgaccgggaagaccucccugcccaagugcuggcuggugagcaacggcuccuaccugaacgagacccacuucagcgacgacaucgagcagcaggccgacaacaugaucacggagaugcuccagaaggaguacauggagcggcagggcaagaccccgcuggggcugguggaccucuucgucuucuccaccagcuucuaccugaucuccaucuuccugcaccuggugaagaucccgacccaccgccacguggucggcaagagcugccccaagccccaccggcucaaccacauggggaucugcuccugcggccuguacgggcagcccggcgugccggugaaguggaagcgcuga

SEQ ID NO: 36576 - RNA, 1476 nt, Artificial Sequence
  derived and/or modified CDS sequence (opt1) from MOPV/LASV reassortant(IGS-1;Clade IV)__AFY05576__GPCmut10
augggccagaucgugaccuucuuccaggaggucccccacgugaucgaggaggugaugaacaucguccugaucgcccucagcgugcuggccgugcugaaggggcucuacaacuucgcgaccugcggccuggucgggcuggugacguuccuccugcugugcggccgcuccugcaccaccagccucuacaaggggguguacgagcugcagacccuggagcucaacauggagacgcugaacaugugcaugccgcuguccugcaccaagaacaacagccaccacuacaucauggucggcaacgagaccggccucgagcugacgcugaccaacaccuccaucaucaaccacaaguucugcaaccucagcgacgcccacaagaagaaccuguacgaccacgcccugauguccaucaucagcaccuuccaccucuccauccccaacuucaaccaguacgaggccaugagcugcgacuucaacgggggcaagaucuccgugcaguacaaccugagccacuccuacgccggggacgcggccaaccacugcggcacgguggccaacgggguccugcagaccuucaugcggauggccuggggcggcagcuacaucgcgcucgacuccgggcgcggcaacugggacugcaucaugaccagcuaccaguaccugaucauccagaacaccacgugggaggaccacugccaguucucccggcccagccccaucggguaccugggccuccugucccagcgcacccgggacaucuacaucagccgccggcugcucggcaccuucaccuggacgcugagcgacuccgagggggaggacaccccgggcggguacugccugacccgcuggaugcucaucgaggccgagcugaagugcuucggcaacaccgccguggccaagugcaacgagaagcacgacgaggaguucugcgacaugcugcggcuguucgacuucugcaagcaggccauccagcgccugaaggcggaggcccagaugagcauccagcugaucaacaaggccgugaacgcccucaucaacgaccagcugaucaugaagaaccaccuccgggacaucauggggauccccuacugcaacuacuccaaguacugguaccucaaccacacgaccaccggccgcaccagccugcccaagugcuggcuggucuccaacggcagcuaccucaacgagacgcacuucuccgacgacaucgagcagcaggccgacaacaugaucaccgagaugcugcagaaggaguacauggagcggcaggggaagacgccccugggccucguggaccuguucguguucagcaccuccuucuaccugaucagcaucuuccugcaccucgucaagaucccgacccaccgccacaucguggggaaguccugccccaagccccaccggcugaaccacaugggcaucugcagcugcgggcuguacaagcagcccggcgugccggucaaguggaagcgcuga

SEQ ID NO: 36577 - RNA, 1476 nt, Artificial Sequence
  derived and/or modified CDS sequence (opt1) from LASV(LM765-SLE-2012;Clade IV)__AIT17814__GPCmut10
augggccagaucgugaccuucuuccaggaggucccccacgugaucgaggaggugaugaacaucguccugaucgcccucagcauccuggccgugcugaaggggcucuacaacuucgcgaccugcggccugguggggcuggucacguuccuccugcugugcggccgcuccugcaccaccagccucuacaaggggguguacgagcugcagacccuggagcucaacauggagacgcugaacaugugcaugccgcuguccugcaccaagaacaacagccaccacuacaucauggugggcaacgagaccggccucgagcugacgcugaccaacaccuccaucaucgaccacaaguucugcaaccucagcgacgcccaccggaagaaccuguacgaccacgcccugauguccaucaucagcaccuuccaccucuccauccccaacuucaaccaguacgaggccaugagcugcgacuucaacgggggcaagaucuccguccaguacaaccugagccacuccuacgccaaggacgcggccgaccacugcgggacgguggccaacggcgugcugcagaccuucaugcgcauggccuggggcgggagcuacaucgcgcucgacuccggccgggggcgcugggacugcaucaugaccagcuaccaguaccugaucauccagaacaccacgugggaggaccacugccaguucucccggcccagccccaucggcuaccuggggcuccugucccagcgcacccgggacaucuacaucagccgccggcugcucggcaccuucaccuggacgcugagcgacuccgagggcaaggacacccccgggggcuacugccugacccgcuggaugcucaucgaggccgagcugaagugcuucgggaacaccgccgucgccaagugcaacgagaagcacgacgaggaguucugcgacaugcugcggcuguucgacuucugcaagcaggccauccagcgccugaaggcggaggcccagaugagcauccagcugaucaacaaggccgugaacgcccucaucaacgaccagcugaucaugaagaaccaccuccgggacaucaugggcauccccuacugcaacuacuccaaguacugguaccucaaccacacgaccaccgggaagaccagccugcccaagugcuggcugguguccaacggcagcuaccucaacgagacgcacuucuccgacgacaucgagcagcaggccgacaacaugaucaccgagaugcugcagaaggaguacauggagcgccagggcaagaccccgcuggggcucgucgaccuguucguguucagcaccuccuucuaccugaucagcaucuuccugcaccucgugaagaucccgacgcaccggcacaucgucggcaagcccugccccaagccccaccgccugaaccacauggggaucugcuccugcggccuguacaagcagccgggggugcccgugaaguggaagcgguga

SEQ ID NO: 36578 - RNA, 1476 nt, Artificial Sequence
  derived and/or modified CDS sequence (opt1) from LASV(LM776-SLE-2012;Clade IV)__AIT17824__GPCmut10
augggccagaucgugaccuucuuccaggaggucccccacgugaucgaggaggugaugaacaucguccugaucgcccucagcauccuggccgugcugaaggggcucuacaacuucgcgaccugcggccugguggggcuggucacguuccuccugcugugcggccgcuccugcaccaccagcguguacaaggggguguacgagcuccagacccuggagcugaacauggagacgcucaacaugugcaugccgcuguccugcaccaagaacaacagccaccacuacaucauggucggcaacgagaccggccuggagcucacgcugaccaacaccuccaucaucaaccacaaguucugcaaccugagcgacgcccacaagaagaaccucuacgaccacgcccugauguccaucaucagcaccuuccaccuguccauccccaacuucaaccaguacgaggccaugagcugcgacuucaacgggggcaagaucuccgugcaguacaaccucagccacuccuacgccggggacgcggccaaccacugcggcacgguggccaacgggguccugcagaccuucaugcggauggccuggggcggcagcuacaucgcgcuggacuccgggcacggcaagugggacugcaucaugaccagcuaccaguaccucaucauccagaacaccacgugggaggaccacugccaguucucccgccccagccccaucggguaccugggccugcucucccagcggacccgcgacaucuacaucagccggcgccugcugggcaccuucaccuggacgcucagcgacuccgaggggaaggacaccccgggcggguacugccugacccgguggaugcugaucgaggccgagcucaagugcuucggcaacaccgccguggccaagugcaacgagaagcacgacgaggaguucugcgacaugcugcgccuguucgacuucugcaagcaggccauccagcggcucaaggcggaggcccagaugagcauccagcugaucaacaaggccgugaacgcccugaucaacgaccagcucaucaugaagaaccaccuccgcgacaucauggggauccccuacugcaacuacuccaaguacugguaccugaaccacacgaccaccggcaagaccagccugcccaagugcuggcuggucuccaacggcagcuaccugaacgagacgcacuucuccgacgacaucgagcagcaggccgacaacaugaucaccgagaugcuccagaaggaguacauggagcggcaggggaagacgccccugggccugguggaccucuucguguucagcaccuccuucuaccugaucagcaucuuccugcaccuggucaagaucccgacccaccgccacaucguggggaaguccugccccaagccccaccggcucaaccacaugggcaucugcagcugcgggcuguacaagcagcccggcgugccgguccgcuggaagcgguga

SEQ ID NO: 36579 - RNA, 1476 nt, Artificial Sequence
  derived and/or modified CDS sequence (opt1) from LASV(Mad39;Clade IV)__ANH09722__GPCmut10
augggccagaucgugaccuucuuccaggaggucccccacgugaucgaggaggugaugaacaucguccugaucgcccucagcauccuggccgugcugaaggggcucuacaacguggcgaccugcggccugaucgggcuggucacguuccuccugcugugcggccgcuccugcaccaccacccucuacaaggggguguacgagcugcaggcccuggagcucaacauggagacgcugaacaugugcaugccgcugagcugcaccaagaacaacucccaccacuacauccgggugggcaacgagaccggccucgagcugacgcugaccaacaccagccucaucaaccacaaguucugcaaccuguccgacgcccacaagaagaaccuguacgaccacgcccucaugagcaucaucuccaccuuccaccugagcauccccaacuucaaccaguacgaggccauguccugcgacuucaacgacgggaagaucagcguccaguacaaccugucccacacguacgcgggcgacaccgccaaccacugcgggaccguggccaacggcgugcuccagaccuucaugcgcauggccuggggcgggagcuacaucgcgcuggacuccggccgcgggggcugggacugcaucaugacgagcuaccaguaccugaucauccagaacaccaccugggaggaccacugccaguucucccggcccagccccaucggguaccucggccugcugucccagcggacccgcgacaucuacaucagccggcgccuccugggcacguucaccuggacccuguccgacagcgaggggaaggacaccccgggcggguacugccucacgcgguggaugcugaucgaggccgagcugaagugcuucggcaacaccgccgucgccaagugcaacgagaagcacgacgaggaguucugcgacaugcuccgccuguucgacuucugcaagcaggccauccagcggcugaaggcggaggcccagaugagcauccagcucaucaacaaggccgugaacgcccugaucaacgaccagcugaucaugaagaaccaccuccgcgacaucauggggauccccuacugcaacuacuccaaguacugguaccugaaccacaccgugaccggcaagacgagccugcccaagugcuggcucgucuccaacggcagcuaccugaacgagacccacuucuccgacgacaucgagcagcaggccgacaacaugaucaccgagaugcugcagaaggaguacauggagcggcaggggaagacgccccucggccugguggaccuguucguguucagcaccuccuucuaccugaucagcaucuuccuccaccuggucaagaucccgacccaccgccacgugguggggaagcccugccccaagccccaccggcugaaccacaugggcaucugcuccugcggguucuacaagcagccgggcguccccgugcgcuggaagcgguga

SEQ ID NO: 36580 - RNA, 1476 nt, Artificial Sequence
  derived and/or modified CDS sequence (opt1) from LASV(Z0947-SLE-2011;Clade IV)__AIT17840__GPCmut10
augggccagaucgugaccuucuuccaggaggucccccacgugaucgaggaggugaugaacaucguccugaucgcccucagcauccuggccgugcugaaggggcucuacaacuucgcgaccugcggccugguggggcuggucacguuccuccugcugugcggccgcuccugcaccaucagccucuacaaggggguguacgagcugcagacccuggagcucaacauggagacccugaacaugugcaugccgcuguccugcaccaagaacaacagccaccacuacaucauggugggcaacgagaccggccucgagcugacccugacgaacaccuccaucaucaaccacaaguucugcaaccucagcgacgcccacaagaagaaccuguacgaccacgcccugauguccaucaucagcaccuuccaccucuccauccccaacuucaaccaguacgaggccaugagcugcgacuucaacgggggcaagaucuccguccaguacaaccugagccacuccuacgccggggacgcggccaaccacugcggcaccguggccaacggggugcugcagacguucaugcggauggccuggggcggcagcuacaucgcgcucgacuccgggcgcgaccggugggacugcaucaugaccagcuaccaguaccugaucauccagaacaccaccugggaggaccacugccaguucucccgccccagccccaucggcuaccuggggcuccugucccagcggacgcgcgacaucuacaucagccggcgccugcucggcaccuucaccuggacccugagcgacuccgagggcaaggacacgcccgggggcuacugccugacccgguggaugcucaucgaggccgagcugaagugcuucgggaacaccgccgucgccaagugcaacgagaagcacgacgaggaguucugcgacaugcugcgccucuucgacuucugcaagcaggccauccagcggcugaaggcggaggcccagaugagcauccagcugaucaacaaggccgugaacgcccucaucaacgaccagcugaucaugaagaaccaccuccgcgacaucaugggcauccccuacugcaacuacuccaaguacugguaccugaaccacaccacgaccgggaagaccagccugcccaagugcuggcugguguccaacggcagcuaccucaacgagacccacuucuccgacgacaucgagcagcaggccgacaacaugaucacggagaugcugcagaaggaguacauggagcggcagggcaagaccccgcuggggcucgucgaccuguucguguucagcaccuccuucuaccugaucagcaucuuccugcaccucgugaagaucccgacccaccgccacaucgucggcaagcccugccccaagccccaccggcugaaccacauggggaucugcuccugcggccuguacaagcagccgggggugcccgugaaguggaagcgcuga

SEQ ID NO: 36581 - RNA, 1476 nt, Artificial Sequence
  derived and/or modified CDS sequence (opt1) from LASV(Josiah;Clade IV)__NP_694870__GPCmut10
augggccagaucgugaccuucuuccaggaggucccccacgugaucgaggaggugaugaacaucguccugaucgcccucagcgugcuggccgugcugaaggggcucuacaacuucgcgaccugcggccuggucgggcuggugaccuuccuccugcugugcggccgcuccugcaccaccagccucuacaaggggguguacgagcugcagacccuggagcucaacauggagacgcugaacaugugcaugccgcuguccugcaccaagaacaacagccaccacuacaucauggucggcaacgagaccggccucgagcugacccugacgaacaccuccaucaucaaccacaaguucugcaaccucagcgacgcccacaagaagaaccuguacgaccacgcccugauguccaucaucagcaccuuccaccucuccauccccaacuucaaccaguacgaggccaugagcugcgacuucaacgggggcaagaucuccgugcaguacaaccugagccacuccuacgccggggacgcggccaaccacugcggcaccguggccaacgggguccugcagacguucaugcggauggccuggggcggcagcuacaucgcgcucgacuccgggcgcggcaacugggacugcaucaugaccagcuaccaguaccugaucauccagaacaccaccugggaggaccacugccaguucucccggcccagccccaucggguaccugggccuccugucccagcgcacgcgggacaucuacaucagccgccggcugcucggcaccuucaccuggacccugagcgacuccgaggggaaggacacgccgggcggguacugccugacccgcuggaugcucaucgaggccgagcugaagugcuucggcaacaccgccguggccaagugcaacgagaagcacgacgaggaguucugcgacaugcugcggcuguucgacuucugcaagcaggccauccagcgccugaaggcggaggcccagaugagcauccagcugaucaacaaggccgugaacgcccucaucaacgaccagcugaucaugaagaaccaccuccgggacaucauggggauccccuacugcaacuacuccaaguacugguaccucaaccacaccacgaccggccgcaccagccugcccaagugcuggcuggucuccaacggcagcuaccucaacgagacccacuucuccgacgacaucgagcagcaggccgacaacaugaucacggagaugcugcagaaggaguacauggagcggcaggggaagacgccccugggccugguggaccucuucguguucagcaccuccuucuaccugaucagcaucuuccugcaccucgucaagaucccgacccaccgccacaucguggggaaguccugccccaagccccaccggcugaaccacaugggcaucugcagcugcgggcuguacaagcagcccggcgugccggucaaguggaagcgcuga

SEQ ID NO: 36582 - RNA, 1473 nt, Artificial Sequence
  derived and/or modified CDS sequence (opt1) from LASV(LP;Clade I)__AAF86701__GPCmut10
augggccagaucaucaccuucuuccaggaggugccccacgucaucgaggaggugaugaacaucgugcugaucgcccucagccugcuggccauccucaaggggcuguacaacaucgcgaccugcggcaucaucgggcuggucgccuuccucuuccugugcggcaaguccugcagccugacgcucaagggcggguacgagcugcagacccuggagcucaacauggagacccugaacaugugcaugccgcuguccugcaccaagaacagcucccaccacuacauccgcgugggcaacgagacggggcucgagcugacccugaccaacaccagcaucaucaaccacaaguucugcaaccucuccgacgcccacaagaagaaccuguacgaccacgcccugaugagcaucaucuccacguuccaccucagcauccccaacuucaaccaguacgaggccauguccugcgacuucaacggcgggaagaucagcgugcaguacaaccugucccacagcuacgcgggcgacgccgccgagcacugcgggaccgucgccaacggcgugcugcagaccuucaugcggauggcguggggcgggcgcuacaucgcccucgacuccggcaaggggaacugggacugcaucaugaccagcuaccaguaccugaucauccagaacacgaccugggaggaccacugccaguucucccggcccagccccaucggcuaccugggccuccugucccagcgcacccgggacaucuacaucagccgccggcugcucgggaccuucacguggacccugagcgacuccgagggcaacgagacccccgggggcuacugccugacccgcuggaugcucaucgaggccgagcugaagugcuucgggaacacggccguggccaagugcaacgagaagcacgacgaggaguucugcgacaugcugcggcuguucgacuucugcaagcaggcgauccgccggcugaaggccgaggcccagaugagcauccagcugaucaacaaggccgucaacgcccucaucaacgaccagcugaucaugaagaaccaccuccgcgacaucaugggcauccccuacugcaacuacuccaaguacugguaccucaaccacaccagcuccggccggaccagccugcccaagugcuggcugaucuccaacgggagcuaccucaacgagacccaguucuccgacgacaucgagcagcaggcggacaacaugaucacggagaugcugcagaaggaguacaucgagcgccagggcaagaccccgcuggggcugguggacaucuucaucuucagcaccuccuucuaccucaucagcaucuuccugcaccugaucaagaucccgacccaccggcacaucgugggcaagcccugccccaagccccaccgccucaaccacaugggggucugcuccugcggccuguacaagcacccgggcgugcccacgaaguggaagcgguga

SEQ ID NO: 36583 - RNA, 1473 nt, Artificial Sequence
  derived and/or modified CDS sequence (opt1) from LASV(803213;Clade II)__AAF86703__GPCmut10
augggccagaucaucaccuucuuccaggaggugccccacgucaucgaggaggugaugaacaucgugcugaucgcccucagccugcuggccauccucaaggggaucuacaacgucgcgaccugcggccuguucgggcugaucuccuuccuccugcugugcggccgcagcugcuccgugacguacaaggggguguacgagcuccagacccuggagcugaacauggccaaccucaacaugugcaugccgcugagcugcaccaagaacaacucccaccacuacaucauggucggcaacgagaccggccuggagcucacgcugaccaacaccagcaucaucaaccacaaguucugcaaccuguccgacgcccacaagaagaaccucuacgaccacgcccugaugagcaucaucuccaccuuccaccugagcauccccaacuucaaccaguacgaggccauguccugcgacuucaacgggggcaagaucagcgugcaguacaaccucucccacagcuucgcgguggacgccgccaaccacugcgggacgaucgccaacggcguccugcagaccuucaugcggauggcguggggcggguccuacaucgcccuggacagcggcaaggggaacugggacugcaucaugaccuccuaccaguaccucaucauccagaacaccacgugggaggaccacugccaguucagccgccccucccccaucggcuaccuggggcugcucagccagcggacccgcgacaucuacaucagccggcgccugcugggcaccuucaccuggacgcucuccgacagcgagggcaacgaggcccccgggggcuacugccugacccgguggaugcugaucgaggccgagcucaagugcuucgggaacaccgccguggcgaagugcaacgagaagcacgacgaggaguucugcgacaugcugcgccuguucgacuucugcaagcaggccaucaagcggcucaagaccgaggcccagauguccauccagcugaucaacaaggccgugaacgcccugaucaacgaccagcucaucaugaagaaccaccuccgcgacaucaugggcauccccuacugcaacuacagccgguacugguaccugaaccacacggucaccgggaagaccucccugccccgcugcuggcuggugagcaacggcuccuaccugaacgagacccacuucagcgacgacaucgagcagcaggcggacaacaugaucacggagaugcuccagaaggaguacauggaccggcagggcaagaccccgcuggggcugguggaccuguucgucuucuccaccagcuucuaccucaucuccaucuuccugcaccuggugaagaucccgacccaccgccacaucgugggcaagcccugccccaagccccaccggcucaaccacauggggaucugcagcugcggccuguacaagcacccggggguccccgugaaguggaagcgcuga

SEQ ID NO: 36584 - RNA, 1473 nt, Artificial Sequence
  derived and/or modified CDS sequence (opt1) from LASV(GA391;Clade III)__CAA36645__GPCmut10
augggccagaucgugaccuucuuccaggaggucccccacgugaucgaggaggugaugaacaucguccugaucgcccucagcauccuggccauccugaaggggcucuacaacguggcgaccugcggccugaucgggcuggugaccuuccuccugcuguccggccgcagcugcucccucaucuacaaggggaccuacgagcugcagacccuggagcucaacauggagacccugaacaugugcaugccgcugagcugcacgaagaacaacucccaccacuacauccgggucggcaacgagaccggccucgagcugacccugaccaacacgagcauccucaaccacaaguucugcaaccuguccgacgcccacaagcgcaaccuguacgaccacagccucauguccaucaucagcaccuuccaccuguccauccccaacuucaaccaguacgaggccaugagcugcgacuucaacgggggcaagaucaccgugcaguacaaccugucccacagcuucgccguggacgccgcggggcacugcggcacccucgccaacgggguccugcagacguucaugcggauggccuggggcggcuccuacaucgcccuggacagcgggcgcggcaacugggacugcaucaugaccuccuaccaguaccucaucauccagaacaccaccugggacgaccacugccaguucagccggcccucccccaucggguaccugggccugcucagccagcgcacgcgggacaucuacaucagccgccggcugcugggcaccuucaccuggacccucuccgacagcgaggggaacgagacgccgggcggguacugccugacccgcuggaugcugaucgaggcggagcucaagugcuucggcaacaccgccguggccaagugcaacgagaagcacgacgaggaguucugcgacaugcugcggcuguucgacuucugcaagcaggccauccgccggcucaagaccgaggcccagauguccauccagcugaucaacaaggcggugaacgcccugaucaacgaccagcucaucaugaagaaccaccuccgcgacaucauggggauccccuacugcaacuacagccgguacugguaccugaaccacacguccaccggcaagaccagccugccccgcugcuggcugaucuccaacggcagcuaccugaacgagaccaaguucuccgacgacaucgagcagcaggccgacaacaugaucacggagaugcugcagaaggaguacaucgaccggcaggggaagacgccccucggccuggucgaccuguucguguucagcaccuccuucuaccucaucagcaucuuccugcaccuggugaagaucccgacccaccgccacaucgucgggaagcccugccccaagccccaccggcucaaccacaugggcaucugcuccugcgggcuguacaagcagccgggcgugcccgugcgcuggaagcgguga

SEQ ID NO: 36585 - RNA, 1476 nt, Artificial Sequence
  derived and/or modified CDS sequence (opt1) from LASV(AV;Clade V)__CCA30314__GPCmut10
augggccagaucgugaccuucuuccaggaggucccccacgugaucgaggaggugaugaacaucguccugaucgcccucagcauccuggccgugcugaaggggcucuacaacaucgcgaccugcggccugaucgggcugaucacguuccuccugcugugcggccgcuccugcagcuccaaccucuacaaggggguguacgagcugcagagccuggaccucaacauggagacccugaacaugugcaugccgcuguccugcaccaagaacaacagccaccacuacauccgggucggcaacgacaccggccucgagcugacgcugaccaacaccuccauccucaaccacaaguucugcaaccugagcgacgcccacaagaaggaccuguacgaccacgcccucauguccaucaucagcaccuuccaccuguccauccccaacuucaaccaguacgaggccaugagcugcgacuucaacgggggcaagaucuccgugcaguacaaccugagccacuccuacgccaucgacgcggccaaccacugcgggacgguggccaacggcauccuccagaccuucaugcgcauggccuggggcgggagcuacaucgcgcuggacuccggccgggggaacugggacugcaucaugaccagcuaccaguaccugaucauccagaacaccacgugggagaaccacugccaguucucccgccccagccccaucggcuaccucgggcugcugagccagcggacccgcgacaucuacaucucccggcgccuccugggcaccuucaccuggacgcugagcgacuccgagggcaacgccacccccgggggcuacugccucacccgguggaugcugaucgaggccgagcugaagugcuucgggaacaccgccgucgccaagugcaacgagaagcacgacgaggaguucugcgacaugcuccgccuguucgacuucugcaagcaggcgaucagccggcugaaguccgaggcccagaugagcauccagcucaucaacaaggccgugaacgcccugaucaacgaccagcugaucaugaagaaccaccuccgcgacaucaugggcauccccuacugcaacuacuccaaguacugguaccugaaccacacgaucaccgggaagaccagccugcccaagugcuggcucguguccaacggcagcuaccugaacgagacccacuucuccgacgacaucgagcagcaggccgacaacaugaucacggagaugcugcagaaggaguacauggagcggcagggcaagaccccgcuggggcucgucgaccuguucguguucagcaccuccuucuaccugaucagcaucuuccuccgccuggugaagaucccgacccaccggcacaucgucggcaagcccugccccaagccccaccgccugaaccacauggggaucugcuccugcggccucuacaagcagccgggggugcccgugcgguggaagcgcuga

SEQ ID NO: 36586 - RNA, 1473 nt, Artificial Sequence
  derived and/or modified CDS sequence (opt1) from LASV(Togo/2016/7082;Clade VI)__AMR44577__GPCmut10
augggccagaucaucaccuucuuccaggaggugccccacgucaucgaggaggugaugaacaucgugcugaucgcccucagccugcuggccauccucaagggggucuacaacguggcgaccugcggcaucaucgggcuggugacguuccuguuccucugcggccgcuccugcagccugaucuacaagggguccuacgagcugcagacccucgagcugaacauggagacccugaacaugugcaugccgcucagcugcaccaagaacuccagccaccacuacauccgggucggcaacgagacgggccuggagcugacccucaccaacaccuccaucaucaaccacaaguucugcaaccugagcgacgcccacaagcgcaaccuguacgaccacgcccucauguccauccugagcacguuccaccuguccauccccaacuucaaccaguacgaggccaugagcugcgacuucaacgggggcaagaucuccgugcaguacaaccucagccacgccuacgcgguggacgccgccgagcacugcgggaccgucgccaacggcgugcugcagaccuucaugcggauggcguggggcggguccuacaucgcccuggacagcggccgcgggaacugggacugcaucaugaccuccuaccaguaccucaucauccagaacacgaccugggaggaccacugccaguucagccggcccucccccaucggcuaccuggggcugcucagccagcgcacccgggacaucuacaucagccgccggcugcugggcaccuucacguggacccucuccgacagcgagggcaacgagacccccgggggcuacugccugacccgcuggaugcugaucgaggccgagcucaagugcuucgggaacacggccguggccaagugcaacgagaagcacgacgaggaguucugcgacaugcugcggcuguucgacuucugcaagcaggcgauccagcgccucaaguccgaggcccagaugagcauccagcugaucaacaaggccgucaacgcccugaucaacgaccagcucaucaugaagaaccaccuccgggacaugaugggcauccccuacugcaacuacuccaaguacugguaccugaaccacaccagcuccgggcgcaccagccugcccaagugcuggcugguguccaacggcagcuaccugaacgagacccacuucuccgacgacaucgagcagcaggccgacaacaugaucacggagaugcuccagaaggaguacaucgaccggcagggcaagaccccgcuggggcugguggaccuguucgucuucagcaccuccuucuaccucaucagcaucuuccugcaccugaucaagaucccgacccaccgccacaucgugggcaagcccugccccaagccccaccggcucaaccacauggggaucugcuccugcggccuguacaagcagccgggggugcccacgcgcuggaagcgguga

SEQ ID NO: 36587 - RNA, 1473 nt, Artificial Sequence
  derived and/or modified CDS sequence (opt1) from LASV(KAK-428;Clade n.d. (VII))__ANH09740__GPCmut10
augggccagaucgugaccuucuuccaggaggucccccacgugaucgaggaggugaugaacaucguccugaucgcccucagccugcuggccauccucaaggggcuguacaacuucgcgaccugcggcgugaucgggcugaucacguuccuccugcugugcggccgcuccugcagcgccaccuacaaggggcaguacgagcuccagacccuggagcugaacauggagucccucaacaugugcaugccgcugagcugcaccaagaacaacucccaccacuacauccgggccggcaacaacacgggccuggagcucacccugaccaacaccagcaucaucucccacaaguucugcaaccugagcgacgcccacaagaagaaccucuacgaccacacgcugauguccaucaucaccaccuuccaccugagcauccccaacuucaaccaguacgaggccauguccugcgacuucaacgggggcaagaucagcauccaguacaaccucucccacagcuacgcgggggacgccgcccagcacugcggcaccguggccaacgggguccugcagacguucaugcgcauggcguggggcggcuccuaccuggcccucgacagcgggcggcgcggcugggacugcaucaucuccagcuaccaguaccugaucauccagaacaccaccugggacgaccacugccaguucucccggcccagccccaucggguaccugggcuucgugagccagaagacccgcgacaucuacaucucccggcgccuccugggcacguucaccuggacccugagcgacuccgaggggcacgacaugccgggcggguacugccucacccgguggaugcugaucgaggccgaccugaagugcuucggcaacacggccguggccaagugcaacgagaagcacgacgaggaguucugcgacauguggcgccucuucgacuucugcaagcaggcgauccagcggcugaaggccgaggcccagaugaacauccagcugaucaacaaggccgucaacgcccucaucaacgaccagcugaugaugaagaaccaccuccgcgacaucauggggauccccuacugcaacuacagcaaguucugguaccugaacaacaccaccaccggccggacgucccugccccgcugcuggcugaucagcaacggcuccuaccucaacgagacccacuucagcgacgacaucgagcagcaggcggacaacaugaucaccgagaugcugcagaaggaguacauggaccggcaggggaagacgccccugggccucguggaccuguucguguucuccaccagcuucuaccugaucaccaucuuccugcaccucgucaagaucccgacccaccgccacaucguggggaagcccugccccaagccccaccggcugaaccacaugggcaucugcuccugcgggcuguacaagcagccgggcgugcccguccgcuggaagcgguga

SEQ ID NO: 36588 - RNA, 1473 nt, Artificial Sequence; identical to SEQ ID NO: 36582
  derived and/or modified CDS sequence (opt1) from LASV(Pinneo-NIG-1969;Clade I)__AIT17836__GPCmut10

SEQ ID NO: 36589 - RNA, 1473 nt, Artificial Sequence
  derived and/or modified CDS sequence (opt1) from LASV(ISTH0009-NIG-2011;Clade II)__AIT17404__GPCmut10
augggccagaucaucaccuucuuccaggaggugccccacgucaucgaggaggugaugaacaucgugcugaucgcccucagccugcuggccauccucaaggggaucuacaacgucgcgaccugcggccuguucgggcugguguccuuccuccugcugugcggccgcagcugcuccacgaccuacaaggggguguacgagcuccagacccuggagcuggacauggccagccucaacaugugcaugccgcuguccugcaccaagaacaacagccaccacuacaucauggucggcaacgagacgggccuggagcucacccugaccaacaccuccaucaucaaccacaaguucugcaaccugagcgacgcccacaagaagaaccucuacgaccacgcccugauguccaucaucagcacguuccaccuguccauccccaacuucaaccaguacgaggccaugagcugcgacuucaacgggggcaagaucuccgugcaguacaaccucagccacgcguacgccguggacgccgccaaccacugcgggaccaucgcgaacggcguccugcagaccuucaugcggauggccuggggcggguccuacaucgcccuggacagcggcaagggguccugggacugcaucaugaccagcuaccaguaccucaucauccagaacacgaccugggaggaccacugccaguucucccgccccagccccaucggcuaccuggggcugcucagccagcggacccgcgacaucuacaucucccggcgccugcugggcaccuucacguggacccucagcgacuccgagggcaacgagacccccgggggcuacugccugacccgguggaugcugaucgaggccgagcucaagugcuucgggaacacggccguggcgaagugcaacgagaagcacgacgaggaguucugcgacaugcugcgccuguucgacuucugcaagcaggccauccggcgccucaagaccgaggcccagaugagcauccagcugaucaacaaggccgugaacgcccugaucaacgaccagcucaucaugaagaaccaccuccgggacaucaugggcauccccuacugcaacuacuccaaguacugguaccugaaccacaccgucaccgggaagacgagccugccccgcugcuggcugguguccaacggcagcuaccugaacgagacccacuucuccgacgacaucgagcagcaggcggacaacaugaucaccgagcuccugcagaaggaguacauggaccggcagggcaagaccccgcuggggcugguggaccucuucgucuucagcacguccuucuaccugaucagcaucuuccugcaccucaucaagaucccgacccaccgccacaucaccggcaagcccugccccaagccccaccggcugaaccacauggggaucugcuccugcggccuguacaagcacccgggggugcccgugaaguggaagcgcuga

SEQ ID NO: 36590 - RNA, 1473 nt, Artificial Sequence
  derived and/or modified CDS sequence (opt1) from LASV(ISTH2010-NIG-2012;Clade II)__AIT17482__GPCmut10
augggccagaucaucaccuucuuccaggaggugccccacgucaucgaggaggugaugaacaucgugcugaucgcccucagccugcuggccauccucaaggggaucuacaacgucgcgaccugcggccuguucgggcugguguccuuccuccugcugugcggccgcagcugcuccacgaccuacaaggggguguacgagcuccagacccuggagcuggacauggccagccucaacaugugcaugccgcuguccugcaccaagaacaacagccaccacuacaucauggucggcaacgagacgggccuggagcucacccugaccaacaccuccaucaucaaccacaaguucugcaaccugagcgacgcccacaagaagaaccucuacgaccacgcccugauguccaucaucagcacguuccaccuguccauccccaacuucaaccaguacgaggccaugagcugcgacuucaacgggggcaagaucuccgugcaguacaaccucagccacgcguacgccguggacgccgccaaccacugcgggaccaucgcgaacggcguccugcagaccuucaugcggauggccuggggcggguccuacaucgcccuggacagcggcaagggguccugggacugcaucaugaccagcuaccaguaccucaucauccagaacaucacgugggaggaccacugccaguucucccgccccagccccaucggcuaccuggggcugcucagccagcggacccgcgacaucuacaucucccggcgccugcugggcaccuucaccuggacgcucagcgacuccgagggcaacgagacccccgggggcuacugccugacccgguggaugcugaucgaggccgagcucaagugcuucgggaacaccgccguggcgaagugcaacgagaagcacgacgaggaguucugcgacaugcugcgccuguucgacuucugcaagcaggccauccggcgccucaagacggaggcccagaugagcauccagcugaucaacaaggccgugaacgcccugaucaacgaccagcucaucaugaagaaccaccuccgggacaucaugggcauccccuacugcaacuacuccaaguacugguaccugaaccacaccgucaccgggaagaccagccugccccgcugcuggcugguguccaacggcagcuaccugaacgagacgcacuucuccgacgacaucgagcagcaggcggacaacaugaucaccgagcuccugcagaaggaguacaucgaccggcagggcaagaccccgcuggggcugguggaccucuucgucuucagcaccuccuucuaccugaucagcaucuuccugcaccucgugaagaucccgacgcaccgccacguggucggcaagcccugccccaagccccaccggcugaaccacauggggaucugcuccugcggccuguacaagcacccgggggugcccgugaaguggaagcgcuga

SEQ ID NO: 36591 - RNA, 1473 nt, Artificial Sequence
  derived and/or modified CDS sequence (opt1) from LASV(Lassa virus/H.sapiens-wt/NGA/2015/ISTH_0543;Clade II)__AVO03639__GPCmut10
augggccagaucaucaccuucuuccaggaggugccccacgucaucgaggaggugaugaacaucgugcugaucgcccucagccugcuggccauccucaaggggaucuacaacgucgcgaccugcggccuguucgggcugguguccuuccuccugcugugcggccgcagcugcuccacgaccuacaaggggguguacgagcuccagacccuggagcuggacauggccaaccucaacaugugcaugccgcugagcugcaccaagaacaacucccaccacuacaucauggucggcaacgagacgggccuggagcucacccugaccaacaccagcaucaucaaccacaaguucugcaaccuguccgacgcccacaagaagaaccucuacgaccacgcccugaugagcaucaucuccacguuccaccugagcauccccaacuucaaccaguacgaggccauguccugcgacuucaacgggggcaagaucagcgugcaguacaaccucucccacaccuacgcgguggacgccgccaaccacugcgggaccaucgccaacggcguccugcagaccuucaugcggauggcguggggcgggagcuacaucgcccuggacuccggcaaggggagcugggacugcaucaugacguccuaccaguaccucgugauccagaacaccaccugggaggaccacugccaguucagccgccccucccccaucggcuaccuggggcugcucagccagcggacccgcgacaucuacaucagccggcgccugcugggcacguucaccuggacccucuccgacagcgagggcaacgagacccccgggggcuacugccugacgcgguggaugcugaucgaggccgagcucaagugcuucgggaacaccgccguggccaagugcaacgagaagcacgacgaggaguucugcgacaugcugcgccuguucgacuucugcaagcaggcgauccggcgccucaagaccgaggcccagauguccauccagcugaucaacaaggccgucaacgcccugaucaacgaccagcucaucaugaagaaccaccuccgggacaucaugggcaucccguacugcaacuacagcaaguacugguaccugaaccacaccgugacggggaagaccucccugccccgcugcuggcuggugagcaacggcuccuaccugaacgagacccacuucagcgacgacaucgagcagcaggccgacaacaugaucaccgagcuccugcagaaggaguacaucgaccggcagggcaagacgccccuggggcuggucgaccucuucguguucuccaccagcuucuaccugaucuccaucuuccugcaccucgugaagaucccgacccaccgccacaucaccggcaagcccugccccaagccccaccggcugaaccacauggggaucugcagcugcggccuguacaagcacccggggguccccgugaaguggaagcgcuga

SEQ ID NO: 36592 - RNA, 1473 nt, Artificial Sequence
  derived and/or modified CDS sequence (opt1) from LASV(Lassa virus/H.sapiens-wt/NGA/2016/ISTH_0009;Clade II)__AVO03571__GPCmut10
augggccagaucaucaccuucuuccaggaggugccccacgucaucgaggaggugaugaacaucgugcugaucgcccucagccugcuggccauccucaaggggaucuacaacgucgcgaccugcggccugcuggggcucguguccuuccugcugcucugcggccgcagcugcuccacgaccuacaaggggguguacgagcugcagacccuggagcucgacauggccagccugaacaugugcaugccgcuguccugcaccaagaacaacagccaccacuacaucauggucggcaacgagacgggccucgagcugacccugaccaacaccuccaucaucaaccacaaguucugcaaccucagcgacgcccacaagaagaaccuguacgaccacgcccugauguccaucaucagcacguuccaccucuccauccccaacuucaaccaguacgaggccaugagcugcgacuucaacgggggccggaucuccgugcaguacaaccugagccacuccuacgcgguggacgccgccaaccacugcgggaccaucgccaacggcguccugcagaccuucaugcgcauggcguggggcgggagcuacaucgcccucgacuccggcaaggggagcugggacugcaucaugaccuccuaccaguaccugaucauccagaacacgaccugggaggaccacugccaguucagccggcccagccccaucggcuaccuggggcuccugucccagcgcacccgggacaucuacaucagccgccggcugcucggcaccuucacguggacccuguccgacagcgagggcaacgagacccccgggggcuacugccugacccgcuggaugcucaucgaggccgagcugaagugcuucgggaacacggccguggccaagugcaacgagaagcacgacgaggaguucugcgacaugcugcggcuguucgacuucugcaagcaggcgauccgccggcugaagaccgaggcccagauguccauccagcugaucaacaaggccgugaacgcccucaucaacgaccagcugaucaugaagaaccaccuccgcgacaucaugggcauccccuacugcaacuacagcaaguacugguaccucaaccacaccgucaccgggaagacgucccugccccggugcuggcuggugagcaacggcuccuaccucaacgagacccacuucagcgacgacaucgagcagcaggccgacaacaugaucaccgagcugcugcagaaggaguacaucgaccgccagggcaagaccccgcuggggcucguggaccuguucgucuucuccacgagcuucuaccugaucuccaucuuccuccaccuggugaagaucccgacccaccggcacaucaccggcaagcccugccccaagccccaccgccugaaccacauggggaucugcagcugcggccucuacaaccacccgggggugcccgucaaguggaagcgguga

SEQ ID NO: 36593 - RNA, 1473 nt, Artificial Sequence
  derived and/or modified CDS sequence (opt1) from LASV(Lassa virus/H.sapiens-wt/NGA/2016/ISTH_0017;Clade II)__AVO03567__GPCmut10
augggccagaucaucaccuucuuccaggaggugccccacgucaucgaggaggugaugaacaucgugcugaucgcccucagccugcuggccauccucaaggggaucuacaacgucgcgaccugcggccuguucgggcugguguccuuccuccugcugugcggccgcagcugcuccacgaccuacaaggggguguacgagcuccagacccuggagcuggacauggccagccucaacaugugcaugccgcuguccugcaccaagaacaacagccaccacuacaucauggucggcaacgagacgggccuggagcucacccugaccaacaccuccaucaucaaccacaaguucugcaaccugagcgacgcccacaagaagaaccucuacgaccacgcccugauguccaucaucagcacguuccaccuguccauccccaacuucaaccaguacgaggccaugagcugcgacuucaacgggggcaagaucuccgugcaguacaaccucagccacaccuacgcgaucgacgccgccaaccacugcgggaccaucgccaacggcgugcugcagaccuucaugcggauggcguggggcggguccuacaucgcccuggacagcggcaagggguccugggacugcaucaugacgagcuaccaguaccucaucauccagaacaccaccugggaggaccacugccaguucucccgccccagccccaucggcuaccuggggcugcucagccagcggacccgcgacaucuacaucucccggcgccugcugggcacguucaccuggacccucagcgacuccgagggcaacgagacccccgggggcuacugccugacgcgguggaugcugaucgaggccgagcucaagugcuucgggaacaccgccgucgccaagugcaacgagaagcacgacgaggaguucugcgacaugcugcgccuguucgacuucugcaagcaggcgauccggcgccucaagaccgaggcccagaugagcauccagcugaucaacaaggccgugaacgcccugaucaacgaccagcucaucaugaagaaccaccuccgggacaucaugggcaucccguacugcaacuacuccaaguacugguaccugaaccacaccgugacggggaagaccagccugccccgcugcuggcuggucuccaacggcagcuaccugaacgagacccacuucuccgacgacaucgagcagcaggccgacaacaugaucaccgagcuccugcagaaggaguacauggaccggcagggcaagacgccccuggggcugguggaccucuucguguucagcaccuccuucuaccugaucagcaucuuccugcaccucguccgcaucccgacccaccggcacgugaucggcaagcccugccccaagccccaccgccugaaccacauggggaucugcuccugcggccuguacaagcacccgggggugcccgucaaguggaagcgguga

SEQ ID NO: 36594 - RNA, 1473 nt, Artificial Sequence
  derived and/or modified CDS sequence (opt1) from LASV(Lassa virus/H.sapiens-wt/NGA/2018/ISTH_0959;Clade II)__AVV65099__GPCmut10
augggccagaucaucaccuucuuccaggaggugccccacgucaucgaggaggugaugaacaucgugcugaucgcccucagccugcuggccauccucaaggggaucuacaacgucgugaccugcggccuguucgggcugguguccuuccuccugcugugcggccgcagcugcuccacgaccuacaagggggucuacgagcuccagacccuggagcuggacauggcgagccucaacaugugcaugccgcuguccugcaccaagaacaacagccaccacuacaucauggugggcaacgagacgggccuggagcucacccugaccaacaccuccaucaucaaccacaaguucugcaaccugagcgacgcccacaagaagaaccucuacgaccacgcccugauguccaucaucagcacguuccaccuguccauccccaacuucaaccaguacgaggccaugagcugcgacuucaacgggggcaagaucuccgugcaguacaaccucagccacgccuacgcgaucgacgccgccaaccacugcgggaccaucgccaacggcguccugcagaccuucaugcggauggcguggggcggguccuacaucgcccuggacagcggcaagggguccugggacugcaucaugaccagcuaccaguaccucaucauccagaacacgaccugggaggaccacugccaguucucccgccccagccccaucggcuaccuggggcugcucagccagcggacccgcgacaucuacaucucccggcgccugcugggcaccuucacguggacccucagcgacuccgagggcaacgagacccccgggggcuacugccugacccgguggaugcugaucgaggccgagcucaagugcuucgggaacacggccguggccaagugcaacgagaagcacgacgaggaguucugcgacaugcugcgccuguucgacuucugcaagcaggcgauccggcgccucaagaccgaggcccagaugagcauccagcugaucaacaaggccgugaacgcccugaucaacgaccagcucaucaugaagaaccaccuccgggacaucaugggcauccccuacugcaacuacuccaaguacugguaccugaaccacaccgucaccgggaagacgagccugccccgcugcuggcugguguccaacggcagcuaccugaacgagacccacuucuccgacgacaucgagcagcaggccgacaacaugaucaccgagcuccugcagaaggaguacaucgaccggcagggcaagaccccgcuggggcugguggaccucuucgucuucagcacguccuucuaccugaucagcaucuuccugcaccucgugaagaucccgacccaccgccacgugaucggcaagcccugccccaagccccaccggcugaaccacauggggaucugcuccugcggccuguacaagcacccggggguccccgugaaguggaagcgcuga

SEQ ID NO: 36595 - RNA, 1473 nt, Artificial Sequence
  derived and/or modified CDS sequence (opt1) from LASV(LASV003-NIG-2008;Clade II)__AIT17580__GPCmut10
augggccagaucaucaccuucuuccaggaggugccccacgucaucgaggaggugaugaacaucgugcugaucgcccucagccugcuggccauccucaaggggaucuacaacgucgcgaccugcggccuguucgggcugguguccuuccuccugcugugcggccgcagcugcuccacgaccuacaaggggguguacgagcuccagacccuggagcuggacauggccagccucaacaugugcaugccgcuguccugcaccaagaacaacagccaccacuacaucauggucggcaacgagacgggccuggagcucacccugaccaacaccuccaucaucaaccacaaguucugcaaccugagcgacgcccacaagaagaaccucuacgaccacgcccugauguccaucaucagcacguuccaccuguccauccccaacuucaaccaguacgaggccaugagcugcgacuucaacgggggcaagaucuccgugcaguacaaccucagccacaccuacgcgguggacgccgccaaccacugcgggaccaucgccaacggcguccugcagaccuucaugcggauggcguggggcggguccuacaucgcccuggacagcggcaagggguccugggacugcaucaugacgagcuaccaguaccucaucauccagaacaccaccugggaggaccacugccaguucucccgccccagccccaucggcuaccuggggcugcucagccagcggacccgcgacaucuacaucucccggcgccugcugggcacguucaccuggacccucagcgacuccgagagcaacgagaccccgggcggguacugccugacgcgguggaugcugaucgaggccgagcucaagugcuucggcaacaccgccguggccaagugcaacgagaagcacgacgaggaguucugcgacaugcugcgccuguucgacuucugcaagcaggcgauccggcgccucaaggccgaggcccagauguccauccagcugaucaacaaggccgugaacgcccugaucaacgaccagcucaucaugaagaaccaccuccgggacaucauggggauccccuacugcaacuacagcaaguacugguaccugaaccacaccgucaccggccgcacgucccugccccggugcuggcuggugagcaacggguccuaccugaacgagacccacuucagcgacgacaucgagcagcaggcggacaacaugaucaccgagcuccugcagaaggaguacauggaccgccagggcaagacgccccugggccugguggaccucuucgucuucuccaccagcuucuaccugaucuccaucuuccugcaccucgugaagaucccgacccaccggcacgugaucgggaagcccugccccaagccccaccgccugaaccacaugggcaucugcagcugcgggcuguacaagcacccgggcguccccgugaaguggaagcgguga

SEQ ID NO: 36596 - RNA, 1473 nt, Artificial Sequence
  derived and/or modified CDS sequence (opt1) from LASV(LASV035-NIG-2009;Clade II)__AIT17588__GPCmut10
augggccagaucaucaccuucuuccaggaggugccccacgucaucgaggaggugaugaacaucgugcugaucgcccucagccugcuggccauccucaaggggaucuacaacgucgcgaccugcggccuguucgggcugguguccuuccuccugcugugcggccgcagcugcuccacgaccuacaaggggguguacgagcuccagacccuggagcuggacauggccagccucaacaugugcaugccgcuguccugcaccaagaacaacagccaccacuacaucauggucggcaacgagacgggccuggagcucacccugaccaacaccuccaucaucaaccacaaguucugcaaccugagcgacgcccacaagaagaaccucuacgaccacgcccugauguccaucaucagcacguuccaccuguccauccccaacuucaaccaguacgaggccaugagcugcgacuucaacgggggcaagaucuccgugcaguacaaccucagccacgcguacgccguggacgccgccaaccacugcgggaccaucgcgaacggcguccugcagaccuucaugcggauggccuggggcggguccuacaucgcccuggacagcggcaagggguccugggacugcaucaugaccagcuaccaguaccucaucauccagaacacgaccugggaggaccacugccaguucucccgccccagccccaucggcuaccuggggcugcucagccagcggacccgcgacaucuacaucucccggcgccugcugggcaccuucacguggacccucagcgacuccgagggcaacgagacccccgggggcuacugccugacccgguggaugcugaucgaggccgagcucaagugcuucgggaacacggccguggcgaagugcaacgagaagcacgacgaggaguucugcgacaugcugcgccuguucgacuucugcaagcaggccauccggcgccucaaggccgaggcccagaugagcauccagcugaucaacaaggccgugaacgcgcugaucaacgaccagcucaucaugaagaaccaccuccgggacaucaugggcauccccuacugcaacuacuccaaguacugguaccugaaccacaccgucaccgggaagaccagccugccccgcugcuggcugguguccaacggcagcuaccugaacgagacgcacuucuccgacgacaucgagcagcaggccgacaacaugaucaccgagcuccugcagaaggaguacaucgaccggcagggcaagaccccgcuggggcugguggaccucuucgucuucagcaccuccuucuaccugaucagcaucuuccugcaccucgugaagaucccgacgcaccgccacgugaucggcaagcccugccccaagccccaccggcugaaccacauggggaucugcuccugcggccuguacaagcacccggggguccccgugaaguggaagcgcuga

SEQ ID NO: 36597 - RNA, 1473 nt, Artificial Sequence
  derived and/or modified CDS sequence (opt1) from LASV(LASV1000-NIG-2009;Clade II)__AIT17782__GPCmut10
augggccagaucaucaccuucuuccaggaggugccccacgucaucgaggaggugaugaacaucgugcugaucgcccucagccugcuggccauccucaaggggaucuacaacgucgcgaccugcggccuguucgggcugguguccuuccuccugcugugcggccgcagcugcuccacgaccuacaaggggguguacgagcuccagacccuggagcuggacauggccagccucaacaugugcaugccgcuguccugcaccaagaacaacagccaccacuacaucauggucggcaacgagacgggccuggagcucacccugaccaacaccuccaucaucaaccacaaguucugcaaccugagcgacgcccacaagaagaaccucuacgaccacgcccugauguccaucaucagcacguuccaccuguccauccccaacuucaaccaguacgaggccaugagcugcgacuucaacgggggcaagaucuccgugcaguacaaccucagccacaccuacgcgguggacgccgccaaccacugcgggaccaucgccaacggcguccugcagaccuucaugcggauggcguggggcggguccuacaucgcccuggacagcggcaagggguccugggacugcaucaugacgagcuaccaguaccucaucauccagaacaccaccugggaggaccacugccaguucucccgccccagccccaucggcuaccuggggcugcucagccagcggacccgcgacaucuacaucucccggcgccugcugggcacguucaccuggacccucagcgacuccgagggcaacgagacccccgggggcuacugccugacgcgguggaugcugaucgaggccgagcucaagugcuucgggaacaccgccguggccaagugcaacgagaagcacgacgaggaguucugcgacaugcugcgccuguucgacuucugcaagcaggcgaucaagcggcucaagaccgaggcccagaugagcauccagcugaucaacaaggccgugaacgcccugaucaacgaccagcucaucaugaagaaccaccuccgcgacaucaugggcaucccguacugcaacuacuccaaguacugguaccugaaccacaccgucacggggaagaccagccugccccggugcuggcugguguccaacggcagcuaccugaacgagacccacuucuccgacgacaucgagcagcaggccgacaacaugaucaccgagcuccugcagaaggaguacaucgaccgccagggcaagacgccccuggggcugguggaccucuucgucuucagcaccuccuucuaccugaucagcaucuuccugcaccucgugaagaucccgacccaccggcacguggucggcaagcccugccccaagccccaccgccugaaccacauggggaucugcuccugcggccuguacaagcacccgggggugcccgugaaguggaagcgguga

SEQ ID NO: 36598 - RNA, 1473 nt, Artificial Sequence
  derived and/or modified CDS sequence (opt1) from LASV(LASV221-NIG-2010;Clade II)__AIT17624__GPCmut10
augggccagaucaucaccuucuuccaggaggugccccacgucaucgaggaggugaugaacaucgugcugaucgcccucagccugcuggccauccucaaggggaucuacaacgucgcgaccugcggccuguucgggcugguguccuuccuccugcugugcggccgcagcugcuccacgaccuacaaggggguguacgagcuccagacccuggagcuggacauggccagccucaacaugugcaugccgcuguccugcaccaagaacaacagccaccacuacaucauggucggcaacgagacgggccuggagcucacccugaccaacaccuccaucaucaaccacaaguucugcaaccugagcgacgcccacaagaagaaccucuacgaccacgcccugauguccaucaucagcacguuccaccuguccauccccaacuucaaccaguacgaggccaugagcugcgacuucaacgggggcaagaucuccgugcaguacaaccucagccacaccuacgcgaucgacgccgccaaccacugcgggaccaucgccaacggcgugcugcagaccuucaugcggauggcguggggcggguccuacaucgcccuggacagcggcaagggguccugggacugcaucaugacgagcuaccaguaccucaucauccagaacaccaccugggaggaccacugccaguucucccgccccagccccaucggcuaccuggggcugcucagccagcggacccgcgacaucuacaucucccggcgccugcugggcacguucaccuggacccucagcgacuccgagggcaacgagacccccgggggcuacugccugacgcgguggaugcugaucgaggccgagcucaagugcuucgggaacaccgccgucgccaagugcaacgagaagcacgacgaggaguucugcgacaugcugcgccuguucgacuucugcaagcaggcgauccggcgccucaagaccgaggcccagaugagcauccagcugaucaacaaggccgugaacgcccugaucaacgaccagcucaucaugaagaaccaccuccgggacaucaugggcaucccguacugcaacuacuccaaguacugguaccugaaccacaccgugacggggaagaccagccugccccgcugcuggcuggucuccaacggcagcuaccugaacgagacccacuucuccgacgacaucgagcagcaggccgacaacaugaucaccgagaugcuccagaaggaguacauggaccggcagggcaagacgccccuggggcugguggaccuguucguguucagcaccuccuucuaccucaucagcaucuuccugcaccuggucaagaucccgacccaccgccacgugaucggcaagcccugccccaagccccaccggcucaaccacauggggaucugcuccugcggccuguacaagcacccgggggugcccgucaaguggaagcgcuga

SEQ ID NO: 36599 - RNA, 1473 nt, Artificial Sequence
  derived and/or modified CDS sequence (opt1) from LASV(LASV237-NIG-2010;Clade II)__AIT17638__GPCmut10
augggccagaucaucaccuucuuccaggaggugccccacgucaucgaggaggugaugaacaucgugcugaucgcccucagccugcuggccauccucaaggggaucuacaacgucgcgaccugcggccuguucgggcugguguccuuccuccugcugugcggccgcagcugcuccacgaccuacaaggggguguacgagcuccagacccuggagcuggacauggccagccucaacaugugcaugccgcuguccugcaccaagaacaacagccaccacuacaucauggucggcaacgagacgggccuggagcucacccugaccaacaccuccaucaucaaccacaaguucugcaaccugagcgacgcccacaagaaggaccucuacgaccacgcccugauguccaucaucagcacguuccaccuguccauccccaacuucaaccaguacgaggccaugagcugcgacuucaacgggggcaagaucuccgugcaguacaaccucagccacaccuacgcgguggacgccgccaaccacugcgggaccaucgccaacggcguccugcagaccuucaugcggauggcguggggcggguccuacaucgcccuggacagcggcaagggguccugggacugcaucaugacgagcuaccaguaccucaucauccagaacaccaccugggaggaccacugccaguucucccgccccagccccaucggcuaccuggggcugcucagccagcggacccgcgacaucuacaucucccggcgccugcugggcacguucaccuggacccucagcgacuccgagggcaacgagacccccgggggcuacugccugacgcgguggaugcugaucgaggccgagcucaagugcuucgggaacaccgccguggccaagugcaacgagaagcacgacgaggaguucugcgacaugcugcgccuguucgacuucugcaagcaggcgauccggcgccucaagaccgaggcccagaugagcauccagcugaucaacaaggccgugaacgcccugaucaacgaccagcucaucaugaagaaccaccuccgggacaucaugggcaucccguacugcaacuacuccaaguacugguaccugaaccacaccgucacggggaagaccagccugccccgcugcuggcugguguccaacggcagcuaccugaacgagacccacuucuccgacgacaucgagcagcaggccgacaacaugaucaccgagcuccugcagaaggaguacauggaccggcagggcaagacgccccuggggcugguggaccucuucgucuucagcaccuccuucuaccugaucagcaucuuccugcaccucaucaagaucccgacccaccgccacaucaccggcaagcccugccccaagccccaccggcugaaccacauggggaucugcuccugcggccuguacaagcacccgggggugcccgugaaguggaagcgcuga

SEQ ID NO: 36600 - RNA, 1473 nt, Artificial Sequence
  derived and/or modified CDS sequence (opt1) from LASV(LASV253-NIG-2011;Clade II)__AIT17670__GPCmut10
augggccagaucaucaccuucuuccaggaggugccccacgucaucgaggaggugaugaacaucgugcugaucgcccucagccugcuggccauccucaaggggaucuacaacgucgcgaccugcggccuguucgggcugguguccuuccuccugcugugcggccgcagcugcuccacgaccuacaaggggguguacgagcuccagacccuggagcuggacauggccagccucaacaugugcaugccgcuguccugcaccaagaacaacagccaccacuacaucauggucggcaacgagacgggccuggagcucacccugaccaacaccuccaucaucaaccacaaguucugcaaccugagcgacgcccacaagaagaaccucuacgaccacgcccugauguccaucaucagcacguuccaccuguccauccccaacuucaaccaguacgaggccaugagcugcgacuucaacgggggcaagaucuccgugcaguacaaccucagccacaccuacgcgguggacgccgccaaccacugcgggaccaucgccaacggcguccugcagaccuucaugcggauggcguggggcggguccuacaucgcccuggacagcggcaagggguccugggacugcaucaugacgagcuaccaguaccucaucauccagaacaccaccugggaggaccacugccaguucucccgccccagccccaucggcuaccuggggcugcucagccagcggacccgcgacaucuacaucucccggcgccugcugggcacguucaccuggacccucagcgacuccgagggcaacgagacccccgggggcuacugccugacgcgguggaugcugaucgaggccgagcucaagugcuucgggaacaccgccguggccaagugcaacgagaagcacgacgaggaguucugcgacaugcugcgccuguucgacuucugcaagcaggcgauccggcgccucaaggccgaggcccagaugagcauccagcugaucaacaaggccgugaacgcccugaucaacgaccagcucaucaugaagaaccaccuccgggacaucaugggcauccccuacugcaacuacuccaaguacugguaccugaaccacaccgucaccgggcgcacgagccugccccggugcuggcugguguccaacggcagcuaccugaacgagacccacuucuccgacgacaucgagcagcaggcggacaacaugaucaccgagcuccugcagaaggaguacaucgaccgccagggcaagaccccgcuggggcugguggaccucuucgucuucagcacguccuucuaccugaucagcaucuuccugcaccucgugaagaucccgacccaccggcacaucaucggcaagcccugccccaagccccaccgccugaaccacauggggaucugcuccugcggccuguacaagcacccgggggugcccgucaaguggaagcgguga

SEQ ID NO: 36601 - RNA, 1473 nt, Artificial Sequence
  derived and/or modified CDS sequence (opt1) from LASV(LASV254-NIG-2011;Clade II)__AIT17674__GPCmut10
augggccagaucaucaccuucuuccaggaggugccccacgucaucgaggaggugaugaacaucgugcugaucgcccucagccugcuggccauccucaaggggaucuacaacgucgcgaccugcggccuguucgggcugguguccuuccuccugcugugcggccgcagcugcuccacgaccuacaaggggguguacgagcuccagacccuggagcuggacaugaccaaccucaacaugugcaugccgcugagcugcacgaagaacaacucccaccacuacaucauggucggcaacgagaccggccuggagcucacccugaccaacacgagcaucaucaaccacaaguucugcaaccuguccgacgcccacaagaagaaccucuacaaccacgcccugaugagcaucaucuccaccuuccaccugagcauccccaacuucaaccaguacgaggccauguccugcgacuucaacgggggcaagaucagcgugcaguacaaccucucccacagcuacgccguggacgcggccaaccacugcgggaccaucgccaacggcguccugcagaccuucaugcggauggccuggggcggguccuacaucgcgcuggacagcggcaaggggaacugggacugcaucaugacguccuaccaguaccucaucauccagaacaccaccugggaggaccacugccaguucagccgccccucccccaucggcuaccuggggcugcucagccagcggacccgcgacaucuacaucagccggcgccugcugggcacguucaccuggacccucuccgacagcgagggcaacgagacccccgggggcuacugccugacgcgguggaugcugaucgaggccgagcucaagugcuucgggaacaccgccguggccaagugcaacgagaagcacgacgaggaguucugcgacaugcugcgccuguucgacuucugcaagcaggccauccggcgccucaagaccgaggcgcaggccaacauccagcugaucaacaaggccgugaacgcccugaucaacgaccagcucaucaugaagaaccaccuccgggacaucaugggcaucccguacugcaacuacuccaaguacugguaccugaaccacaccgucacggggaagaccagccugccccgcugcuggcugguguccaacggcagcuaccugaacgagacccacuucuccgacgacaucgagcagcaggccgacaacaugaucaccgagcuccugcagaaggaguacauggaccggcagggcaagacgccccuggggcugguggaccucuucgucuucagcaccuccuucuaccugaucagcaucuuccugcaccucgugaagaucccgacccaccgccacgugaucggcaagcccugccccaagccccaccggcugaaccacauggggaucugcuccugcggccuguacaagcacccggggguccccgugaaguggaagcgcuga

SEQ ID NO: 36602 - RNA, 1473 nt, Artificial Sequence
  derived and/or modified CDS sequence (opt1) from LASV(Nig08-A19;Clade III)__ADU56618__GPCmut10
augggccagaucgugaccuucuuccaggaggucccccacgugaucgaggaggugaugaacaucguccugaucgcccucagcauccuggccauccugaaggggcucuacaacaucgcgaccugcggccugaucgggcuggugacguuccuccugcuguccggccgcagcugcuccaugaccuacaaggggguguacgagcuccagacccuggagcugaacaugaacacccucaacaugugcaugccgcugagcugcacgaagaacaacucccaccacuacaucauggucggcaacgagaccggccuggagcucacccugaccaacacgagccugcuccaccacaaguucugcaaccuguccgacgcccacaagaagaaccuguacgaccacacccucaugagcaucaucuccaccuuccaccugagcauccccaacuucaaccaguacgaggccauguccugcgacuucaacgggggcaagaucaccgugcaguacaaccugagccacuccuacgccaucgacgccgcgaaccacugcgggacgguggccaacggcguccuccagaccuucaugcggauggccuggggcgggagcuacaucgcccuggacuccggccgcgggaagugggacugcaucaugaccagcuaccaguaccugaucauccagaacaccacgugggaggaccacugccaguucucccggcccagccccaucggcuaccucgggcugcugucccagcgcacccgggacaucuacaucagccgccggcuccugggcaccuucaccuggacgcugagcgacuccgagggcaacgagacccccgggggcuacugccucacccgcuggaugcugaucgaggcggagcugaagugcuucgggaacaccgccguggccaagugcaacgagaagcacgacgaggaguucugcgacaugcuccggcuguucgacuucugcaagcaggccauccgccggcugaaggccgaggcgcagaugagcauccagcucaucaacaaggccgugaacgcccugaucaacgaccagcugaucaugaagaaccaccuccgcgacaucaugggcauccccuacugcaacuacuccaaguacugguaccugaaccacacgagcaccgggcggaccucccugccccgcugcuggcucgucagcaacggcuccuaccugaacgagacccacuucagcgacgacaucgagcagcaggccgacaacaugaucacggagaugcugcagaaggaguaccuggaccggcagggcaagaccccgcucgggcugguggaccuguucguguucuccaccagcuucuaccucaucuccaucuuccugcaccuggucaagaucccgacccaccgccacaucgugggcaagcccugccccaagccccaccggcucaaccacauggggaucugcagcugcggccuguacaagcagccgggggugcccguccgcuggaagcgguga

SEQ ID NO: 36603 - RNA, 1476 nt, Artificial Sequence
  derived and/or modified CDS sequence (opt1) from LASV(G1180-SLE-2010;Clade IV)__AIT17168__GPCmut10
augggccagaucgugaccuucuuccaggaggucccccacgugaucgaggaggugaugaacaucguccugaucgcccucagcauccuggccgugcugaaggggcucuacaacuucgcgaccugcggccugguggggcugcucacguuccugcugcucugcggccgcuccugcaccgccagccgguacaagggggucuacgagcugcagacccuggagcucaacauggagacccugaacaugugcaugccgcuguccugcacgaagaacaacagccaccacuacaucauggugggcaacgagaccggccucgagcugacccugaccaacacguccaucaucaaccacaaguucugcaaccucagcgacgcccacaagaagaaccuguacgaccacgcccugauguccaucaucagcaccuuccaccucuccauccccaacuucaaccaguacgaggccaugagcugcgacuucaacgggggcaagaucuccgugcaguacaaccugagccacuccuacgcgggggacgccgccaaccacugcggcaccgucgccaacggggugcugcagaccuucaugcgcauggcguggggcggcagcuacaucgcccucgacuccgggcacggcagcugggacugcaucaugacguccuaccaguaccugaucauccagaacaccaccugggaggaccacugccaguucagccggcccucccccaucggguaccugggccuccugagccagcgcacccgggacaucuacaucagccgccggcugcucggcacguucaccuggacccuguccgacagcgaggggaaggacaccccgggcggguacugccugacgcgcuggaugcucaucgaggccgagcugaagugcuucggcaacaccgccguggccaagugcaacgagaagcacgacgaggaguucugcgacaugcugcggcuguucgacuucugcaagcaggcgauccagcgccugaaggccgaggcccagauguccauccagcugaucaacaaggccgucaacgcccucaucaacgaccagcugaucaugaagaaccaccuccgggacaucauggggauccccuacugcaacuacagcaaguacugguaccucaaccacaccaccacgggcaagaccucccugcccaagugcuggcuggugagcaacggcuccuaccucaacgagacccacuucagcgacgacaucgagcagcaggcggacaacaugaucaccgagaugcugcagaaggaguacauggagcgccaggggaagacgccccugggccugguggaccucuucgucuucuccaccagcuucuaccugaucuccaucuuccugcaccucgugaagaucccgacccaccggcacaucgugggcaagagcugccccaagccccaccgccugaaccacauggggaucugcuccugcgggcuguacaagcagcccggcgucccggugaaguggaagcgguga

SEQ ID NO: 36604 - RNA, 1476 nt, Artificial Sequence
  derived and/or modified CDS sequence (opt1) from LASV(G1442-SLE-2011;Clade IV)__AIT17180__GPCmut10
augggccagaucgugaccuucuuccaggaggucccccacgugaucgaggaggugaugaacaucguccugaucgcccucagcauccuggccgugcugaaggggcucuacaacguggcgaccugcggccugaucgggcuggucaccuuccuccugcugugcggccgcuccugcaccaccacccucuacaaggggguguacgagcugcagacgcuggagcucaacauggagacccugaacaugugcaugccgcugagcugcaccaagaacaacucccaccacuacauccgggugggcaacgagaccggccucgagcugacgcugaccaacaccagcaucaucaaccacaaguucugcaaccucuccgacgcccacaagaagaaccuguacgaccacgcccugaugagcaucaucuccaccuuccaccucagcauccccaacuucaaccaguacgaggccauguccugcgacuucaacgggggcaagaucagcguccaguacaaccugucccacagcuacgccggggacgcggccaaccacugcggcacgguggccaacggggugcugcagaccuucaugcgcauggccuggggcggcuccuacaucgcgcucgacagcgggcggggcaacugggacugcaucaugaccuccuaccaguaccugaucauccagaacaccacgugggacgaccacugccaguucagccgccccucccccaucggguaccugggccuccugagccagcggacccgcgacgucuacaucucccggcgccugcucggcaccuucaccuggacgcugagcgacagcgaggggaaggacaccccgggcggguacugccugacccgguggaugcucaucgaggccgagcugaagugcuucggcaacaccgccguggccaagugcaacgagaagcacgacgaggaguucugcgacaugcugcgccucuucgacuucugcaagcaggccauccagcggcugaaggcggaggcccagauguccauccagcugaucaacaaggccgugaacgcccucaucaacgaccagcugaucaugaagaaccaccuccgcgacaucauggggauccccuacugcaacuacagcaaguacugguaccugaacaacacggccaccggcaagaccucccugcccaagugcuggcugaucagcaacggcuccuaccucaacgagacccacuucagcgacgacaucgagcaggaggcggacaacaugaucacggagaugcugcagaaggaguacauggagcggcaggggaagacgccccugggccuggucgaccucuucguguucuccaccagcuucuaccugaucuccaucuuccugcaccucgugaagaucccgacccaccgccacaucgucggcaagagcugccccaagccccaccggcugaaccacauggggaucugcuccugcgggcuguacaagcagcccggcgugccggugcgcuggaagcgguga

SEQ ID NO: 36605 - RNA, 1476 nt, Artificial Sequence
  derived and/or modified CDS sequence (opt1) from LASV(G3010-SLE-2013;Clade IV)__AIT17344__GPCmut10
augggccagaucgugaccuucuuccaggaggucccccacgugaucgaggaggugaugaacaucguccugaucgcccucagcauccuggccgugcugaaggggcucuacaacuucgcgaccugcggccugguggggcuggucacguuccuccugcugugcggccgcuccugcaccaccagccucuacaaggggguguacgagcugcagacccuggagcucaacauggagacgcugaacaugugcaugccgcuguccugcaccaagaacaacagccaccacuacaucauggugggcaacgagaccggccucgagcugacccugacgaacaccuccaucaucaaccacaaguucugcaaccucagcgacgcccacaagaagaaccuguacaaccacgcccugauguccaucaucagcaccuuccaccucuccauccccaacuucaaccaguacgaggccaugagcugcgacuucaacgggggcaagaucuccguccaguacaaccugagccacuccuacgccggggacgcggccagccacugcggcaccguggccaacggggugcugcagacguucaugcggauggccuggggcggcuccuacaucgcgcucgacagcggguacggcaagugggacugcaucaugaccuccuaccaguaccugaucauccagaacaccaccugggaggaccacugccaguucagccgccccucccccaucggguaccugggccuccugagccagcggacgcgcgacaucuacaucagccggcgccugcucggcaccuucaccuggacccuguccgacagcgaggggaaggacacgccgggcggguacugccugacccgguggaugcucaucgaggccgagcugaagugcuucggcaacaccgccgucgccaagugcaacgagaagcacgacgaggaguucugcgacaugcugcgccucuucgacuucugcaagcaggccauccagcggcugaagaccgaggcgcagauguccauccagcugaucaacaaggccgugaacgcccucaucaacgaccagcugaucaugaagaaccaccuccgcgacaucauggggauccccuacugcaacuacagcaaguacugguaccugaaccacacgaccaccggcaagaccucccugcccaagugcuggcuggugagcaacggcuccuaccucaacgagacgcacuucagcgacgacaucgagcagcaggccgacaacaugaucaccgagaugcugcagaaggaguacauggagcggcaggggaagacgccccugggccuggucgaccucuucguguucuccaccagcuucuaccugaucuccaucuuccugcaccucgugaagaucccgacccaccgccacaucgucggcaagagcugccccaagccccaccggcugaaccacauggggaucugcuccugcgggcuguacaagcagcccggcgugccggugcgcuggaagcgguga

SEQ ID NO: 36606 - RNA, 1476 nt, Artificial Sequence
  derived and/or modified CDS sequence (opt1) from LASV(G502-SLE-2009;Clade IV)__AIT17126__GPCmut10
augggccagaucgugaccuucuuccaggaggucccccacgugaucgaggaggugaugaacaucguccugaucgcccucagcauccuggccgugcugaaggggcucuacaacuucgcgaccugcggccugguggggcugcucacguuccugcugcucugcggccgcuccugcaccaccgggcuguacaagggcgucuacgagcugcagacccucgagcugaacauggagacgcugaacaugugcaugccgcucagcugcaccaagaacaacucccaccacuacaucauggugggcaacgagaccgggcuggagcugacccucacgaacaccagcaucaucaaccacaaguucugcaaccuguccgacgcccacaagaagaaccuguacgaccacgcccucaugagcaucaucuccaccuuccaccugagcauccccaacuucaaccaguacgaggccauguccugcgacuucaacggcgggaagaucagcgugcaguacaaccugucccacagcuacgccggcgacgcggccgaccacugcgggaccgucgccaacggcgugcuccagacguucaugcggauggccuggggcggguccuacaucgcgcuggacagcggccgcgggcggugggacugcaucaugaccuccuaccaguaccugaucauccagaacaccaccugggaggaccacugccaguucagccgccccucccccaucggcuaccucggccugcugagccagcggacgcgcgacaucuacaucucccggcgccuccuggggaccuucaccuggacccugagcgacagcgagggcaaggacacgcccgggggcuacugccucacccgguggaugcugaucgaggccgagcugaagugcuucgggaacaccgccguggccaagugcaacgagaagcacgacgaggaguucugcgacaugcuccgccuguucgacuucugcaagcaggccauccagcggcugaaggcggaggcccagauguccauccagcucaucaacaaggccgucaacgcccugaucaacgaccagcuggugaugaagaaccaccuccgcgacaucaugggcauccccuacugcaacuacagccgguacugguaccugaaccacaccacgaccggccgcaccucccugcccaagugcuggcucgugagcaacggguccuaccugaacgagacccacuucagcgacgacaucgagcagcaggccgacaacaugaucacggagaugcugcagaaggaguacauggagcggcagggcaagaccccgcuggggcucgucgaccuguucguguucuccaccagcuucuaccugaucuccaucuuccuccaccuggugaagaucccgacccaccgccacaucgucggcaagagcugccccaagccccaccggcugaaccacauggggaucugcuccugcggccucuacaagcagcccggcgugccggugaaguggaagcgcuga

SEQ ID NO: 36607 - RNA, 1476 nt, Artificial Sequence
  derived and/or modified CDS sequence (opt1) from LASV(G733-SLE-2010;Clade IV)__AIT17154__GPCmut10
augggccagaucgugaccuucuuccaggaggucccccacgugaucgaggaggugaugaacaucguccugaucgcccucagcauccuggccgugcugaaggggcucuacaacuucgcgaccugcggcaucguggggcuggucuccuuccugcuccugugcggccgcagcugcacgaccucccuguacaaggggguguacgagcuccagacccuggagcugaacauggagacccucaacaugugcaugccgcugagcugcacgaagaacaacucccaccacuacaucauggugggcaacgagaccggccuggagcucacccugaccaacacgagcaucaucaaccacaaguucugcaaccuguccgacgcccacaagaagaaccucuacgaccacgcccugaugagcaucaucuccaccuuccaccugagcauccccaacuucaaccaguacgaggccauguccugcgacuucaacgggggcaagaucagcguccaguacaaccucucccacagcuacgccggggacgcggccaaccacugcggcaccaucgccaacggggugcugcagaccuucaugcggauggccuggggcggcuccuacaucgcgcuggacagcgggcgcgaccggugggacugcaucaugacguccuaccaguaccucaucauccagaacaccaccugggaggaccacugccaguucagccgccccucccccaucggcuaccuggggcugcucagccagcggacccgcgacaucuacaucagccggcgccugcugggcacguucaccuggacccucuccgacagcgagggcaaggacacccccgggggcuacugccugacgcgguggaugcugaucgaggccgagcucaagugcuucgggaacaccgccguggccaagugcaacgagaagcacgacgaggaguucugcgacaugcugcgccuguucgacuucugcaagcaggccauccagcggcucaaggcggaggcccagauguccauccagcugaucaacaaggccgucaacgcccugaucaacgaccagcucaucaugaagaaccaccuccgcgacaucaugggcaucccguacugcaacuacagcaaguacugguaccugaaccacaccaccacggggaagaccucccugcccaagugcuggcuggugagcaacggcuccuaccugaacgagacccacuucagcgacgacaucgagcagcaggccgacaacaugaucaccgagaugcuccagaaggaguacauggagcggcagggcaagacgccccuggggcugguggaccuguucgucuucuccaccagcuucuaccucaucuccaucuuccugcaccuggugaagaucccgacccaccgccacguggucggcaagagcugccccaagccccaccggcucaaccacauggggaucugcuccugcggccuguacgggcagcccggcgugccggugaaguggaagcgcuga

SEQ ID NO: 36608 - RNA, 1476 nt, Artificial Sequence
  derived and/or modified CDS sequence (opt1) from MOPV/LASV reassortant(IGS-1;Clade IV)__AFY05576__GPCmut10
augggccagaucgugaccuucuuccaggaggucccccacgugaucgaggaggugaugaacaucguccugaucgcccucagcgugcuggccgugcugaaggggcucuacaacuucgcgaccugcggccuggucgggcuggugaccuuccuccugcugugcggccgcuccugcaccaccagccucuacaaggggguguacgagcugcagacccuggagcucaacauggagacgcugaacaugugcaugccgcuguccugcaccaagaacaacagccaccacuacaucauggucggcaacgagaccggccucgagcugacccugacgaacaccuccaucaucaaccacaaguucugcaaccucagcgacgcccacaagaagaaccuguacgaccacgcccugauguccaucaucagcaccuuccaccucuccauccccaacuucaaccaguacgaggccaugagcugcgacuucaacgggggcaagaucuccgugcaguacaaccugagccacuccuacgccggggacgcggccaaccacugcggcaccguggccaacgggguccugcagacguucaugcggauggccuggggcggcagcuacaucgcgcucgacuccgggcgcggcaacugggacugcaucaugaccagcuaccaguaccugaucauccagaacaccaccugggaggaccacugccaguucucccggcccagccccaucggguaccugggccuccugucccagcgcacgcgggacaucuacaucagccgccggcugcucggcaccuucaccuggacccugagcgacuccgagggggaggacacgccgggcggguacugccugacccgcuggaugcucaucgaggccgagcugaagugcuucggcaacaccgccguggccaagugcaacgagaagcacgacgaggaguucugcgacaugcugcggcuguucgacuucugcaagcaggccauccagcgccugaaggcggaggcccagaugagcauccagcugaucaacaaggccgugaacgcccucaucaacgaccagcugaucaugaagaaccaccuccgggacaucauggggauccccuacugcaacuacuccaaguacugguaccucaaccacaccacgaccggccgcaccagccugcccaagugcuggcuggucuccaacggcagcuaccucaacgagacccacuucuccgacgacaucgagcagcaggccgacaacaugaucacggagaugcugcagaaggaguacauggagcggcaggggaagacgccccugggccugguggaccucuucguguucagcaccuccuucuaccugaucagcaucuuccugcaccucgucaagaucccgacccaccgccacaucguggggaaguccugccccaagccccaccggcugaaccacaugggcaucugcagcugcgggcuguacaagcagcccggcgugccggucaaguggaagcgcuga

SEQ ID NO: 36609 - RNA, 1476 nt, Artificial Sequence
  derived and/or modified CDS sequence (opt1) from LASV(LM765-SLE-2012;Clade IV)__AIT17814__GPCmut10
augggccagaucgugaccuucuuccaggaggucccccacgugaucgaggaggugaugaacaucguccugaucgcccucagcauccuggccgugcugaaggggcucuacaacuucgcgaccugcggccugguggggcuggucacguuccuccugcugugcggccgcuccugcaccaccagccucuacaaggggguguacgagcugcagacccuggagcucaacauggagacgcugaacaugugcaugccgcuguccugcaccaagaacaacagccaccacuacaucauggugggcaacgagaccggccucgagcugacccugacgaacaccuccaucaucgaccacaaguucugcaaccucagcgacgcccaccggaagaaccuguacgaccacgcccugauguccaucaucagcaccuuccaccucuccauccccaacuucaaccaguacgaggccaugagcugcgacuucaacgggggcaagaucuccguccaguacaaccugagccacuccuacgccaaggacgcggccgaccacugcgggaccguggccaacggcgugcugcagacguucaugcgcauggccuggggcgggagcuacaucgcgcucgacuccggccgggggcgcugggacugcaucaugaccagcuaccaguaccugaucauccagaacaccaccugggaggaccacugccaguucucccggcccagccccaucggcuaccuggggcuccugucccagcgcacgcgggacaucuacaucagccgccggcugcucggcaccuucaccuggacccugagcgacuccgagggcaaggacacgcccgggggcuacugccugacccgcuggaugcucaucgaggccgagcugaagugcuucgggaacaccgccgucgccaagugcaacgagaagcacgacgaggaguucugcgacaugcugcggcuguucgacuucugcaagcaggccauccagcgccugaaggcggaggcccagaugagcauccagcugaucaacaaggccgugaacgcccucaucaacgaccagcugaucaugaagaaccaccuccgggacaucaugggcauccccuacugcaacuacuccaaguacugguaccucaaccacaccacgaccgggaagaccagccugcccaagugcuggcugguguccaacggcagcuaccucaacgagacccacuucuccgacgacaucgagcagcaggccgacaacaugaucacggagaugcugcagaaggaguacauggagcgccagggcaagaccccgcuggggcuggucgaccucuucguguucagcaccuccuucuaccugaucagcaucuuccugcaccucgugaagaucccgacccaccggcacaucgucggcaagcccugccccaagccccaccgccugaaccacauggggaucugcuccugcggccuguacaagcagccgggggugcccgugaaguggaagcgguga

SEQ ID NO: 36610 - RNA, 1476 nt, Artificial Sequence
  derived and/or modified CDS sequence (opt1) from LASV(LM776-SLE-2012;Clade IV)__AIT17824__GPCmut10
augggccagaucgugaccuucuuccaggaggucccccacgugaucgaggaggugaugaacaucguccugaucgcccucagcauccuggccgugcugaaggggcucuacaacuucgcgaccugcggccugguggggcuggucaccuuccuccugcugugcggccgcuccugcaccaccagcguguacaaggggguguacgagcuccagacccuggagcugaacauggagacgcucaacaugugcaugccgcuguccugcaccaagaacaacagccaccacuacaucauggucggcaacgagaccggccuggagcucacccugacgaacaccuccaucaucaaccacaaguucugcaaccugagcgacgcccacaagaagaaccucuacgaccacgcccugauguccaucaucagcaccuuccaccuguccauccccaacuucaaccaguacgaggccaugagcugcgacuucaacgggggcaagaucuccgugcaguacaaccucagccacuccuacgccggggacgcggccaaccacugcggcaccguggccaacgggguccugcagacguucaugcggauggccuggggcggcagcuacaucgcgcuggacuccgggcacggcaagugggacugcaucaugaccagcuaccaguaccucaucauccagaacaccaccugggaggaccacugccaguucucccgccccagccccaucggguaccugggccugcucucccagcggacgcgcgacaucuacaucagccggcgccugcugggcaccuucaccuggacccucagcgacuccgaggggaaggacacgccgggcggguacugccugacccgguggaugcugaucgaggccgagcucaagugcuucggcaacaccgccguggccaagugcaacgagaagcacgacgaggaguucugcgacaugcugcgccuguucgacuucugcaagcaggccauccagcggcucaaggcggaggcccagaugagcauccagcugaucaacaaggccgugaacgcccugaucaacgaccagcucaucaugaagaaccaccuccgcgacaucauggggauccccuacugcaacuacuccaaguacugguaccugaaccacaccacgaccggcaagaccagccugcccaagugcuggcuggucuccaacggcagcuaccugaacgagacccacuucuccgacgacaucgagcagcaggccgacaacaugaucacggagaugcuccagaaggaguacauggagcggcaggggaagacgccccugggccugguggaccuguucguguucagcaccuccuucuaccucaucagcaucuuccugcaccuggucaagaucccgacccaccgccacaucguggggaaguccugccccaagccccaccggcucaaccacaugggcaucugcagcugcgggcuguacaagcagcccggcgugccgguccgcuggaagcgguga

SEQ ID NO: 36611 - RNA, 1476 nt, Artificial Sequence
  derived and/or modified CDS sequence (opt1) from LASV(Mad39;Clade IV)__ANH09722__GPCmut10
augggccagaucgugaccuucuuccaggaggucccccacgugaucgaggaggugaugaacaucguccugaucgcccucagcauccuggccgugcugaaggggcucuacaacguggcgaccugcggccugaucgggcuggucacguuccuccugcugugcggccgcuccugcaccaccacccucuacaaggggguguacgagcugcaggcccuggagcucaacauggagacgcugaacaugugcaugccgcugagcugcaccaagaacaacucccaccacuacauccgggugggcaacgagaccggccucgagcugacccugacgaacaccagccucaucaaccacaaguucugcaaccuguccgacgcccacaagaagaaccuguacgaccacgcccucaugagcaucaucuccaccuuccaccugagcauccccaacuucaaccaguacgaggccauguccugcgacuucaacgacgggaagaucagcguccaguacaaccugucccacaccuacgcgggcgacacggccaaccacugcgggaccguggccaacggcgugcuccagaccuucaugcgcauggccuggggcgggagcuacaucgcgcuggacuccggccgcgggggcugggacugcaucaugaccagcuaccaguaccugaucauccagaacacgaccugggaggaccacugccaguucucccggcccagccccaucggguaccucggccugcugucccagcggacccgcgacaucuacaucagccggcgccuccugggcaccuucacguggacccuguccgacagcgaggggaaggacaccccgggcggguacugccucacccgguggaugcugaucgaggccgagcugaagugcuucggcaacacggccgucgccaagugcaacgagaagcacgacgaggaguucugcgacaugcuccgccuguucgacuucugcaagcaggccauccagcggcugaaggcggaggcccagaugagcauccagcucaucaacaaggccgugaacgcccugaucaacgaccagcugaucaugaagaaccaccuccgcgacaucauggggauccccuacugcaacuacuccaaguacugguaccugaaccacaccgugaccggcaagaccagccugcccaagugcuggcucgucuccaacggcagcuaccugaacgagacgcacuucuccgacgacaucgagcagcaggccgacaacaugaucaccgagaugcugcagaaggaguacauggagcggcaggggaagacgccccugggccucguggaccuguucguguucagcaccuccuucuaccugaucagcaucuuccuccaccuggucaagaucccgacccaccgccacgugguggggaagcccugccccaagccccaccggcugaaccacaugggcaucugcuccugcggguucuacaagcagccgggcguccccgugcgcuggaagcgguga

SEQ ID NO: 36612 - RNA, 1476 nt, Artificial Sequence
  derived and/or modified CDS sequence (opt1) from LASV(Z0947-SLE-2011;Clade IV)__AIT17840__GPCmut10
augggccagaucgugaccuucuuccaggaggucccccacgugaucgaggaggugaugaacaucguccugaucgcccucagcauccuggccgugcugaaggggcucuacaacuucgcgaccugcggccugguggggcuggucacguuccuccugcugugcggccgcuccugcaccaucagccucuacaaggggguguacgagcugcagacccuggagcucaacauggagacccugaacaugugcaugccgcuguccugcacgaagaacaacagccaccacuacaucauggugggcaacgagaccggccucgagcugacccugaccaacacguccaucaucaaccacaaguucugcaaccucagcgacgcccacaagaagaaccuguacgaccacgcccugauguccaucaucagcaccuuccaccucuccauccccaacuucaaccaguacgaggccaugagcugcgacuucaacgggggcaagaucuccguccaguacaaccugagccacuccuacgccggggacgcggccaaccacugcggcaccguggccaacggggugcugcagaccuucaugcggauggccuggggcggcagcuacaucgcgcucgacuccgggcgcgaccggugggacugcaucaugacgagcuaccaguaccugaucauccagaacaccaccugggaggaccacugccaguucucccgccccagccccaucggcuaccuggggcuccugucccagcggacccgcgacaucuacaucagccggcgccugcucggcacguucaccuggacccugagcgacuccgagggcaaggacacccccgggggcuacugccugacgcgguggaugcucaucgaggccgagcugaagugcuucgggaacaccgccgucgccaagugcaacgagaagcacgacgaggaguucugcgacaugcugcgccucuucgacuucugcaagcaggccauccagcggcugaaggcggaggcccagaugagcauccagcugaucaacaaggccgugaacgcccucaucaacgaccagcugaucaugaagaaccaccuccgcgacaucaugggcaucccguacugcaacuacuccaaguacugguaccugaaccacaccaccacggggaagaccagccugcccaagugcuggcugguguccaacggcagcuaccucaacgagacccacuucuccgacgacaucgagcagcaggccgacaacaugaucaccgagaugcugcagaaggaguacauggagcggcagggcaagacgccccuggggcuggucgaccucuucguguucagcaccuccuucuaccugaucagcaucuuccugcaccucgugaagaucccgacccaccgccacaucgucggcaagcccugccccaagccccaccggcugaaccacauggggaucugcuccugcggccuguacaagcagccgggggugcccgugaaguggaagcgcuga

SEQ ID NO: 36613 - RNA, 1476 nt, Artificial Sequence
  derived and/or modified CDS sequence (opt4) from LASV(Josiah;Clade IV)__NP_694870__GPCmut10
augggccagaucgugaccuucuuccaggaggugccccacgugaucgaggaggugaugaacaucgugcugaucgcccugagcgugcuggccgugcugaagggccuguacaacuucgccaccugcggccuggugggccuggugaccuuccugcugcugugcggcagaagcugcaccaccagccuguacaagggcguguacgagcugcagacccuggagcugaacauggagacccugaacaugugcaugccccugagcugcaccaagaacaacagccaccacuacaucauggugggcaacgagaccggccuggagcugacccugaccaacaccagcaucaucaaccacaaguucugcaaccugagcgacgcccacaagaagaaccuguacgaccacgcccugaugagcaucaucagcaccuuccaccugagcauccccaacuucaaccaguacgaggccaugagcugcgacuucaacggcggcaagaucagcgugcaguacaaccugagccacagcuacgccggcgacgccgccaaccacugcggcaccguggccaacggcgugcugcagaccuucaugagaauggccuggggcggcagcuacaucgcccuggacagcggcagaggcaacugggacugcaucaugaccagcuaccaguaccugaucauccagaacaccaccugggaggaccacugccaguucagcagacccagccccaucggcuaccugggccugcugagccagagaaccagagacaucuacaucagcagaagacugcugggcaccuucaccuggacccugagcgacagcgagggcaaggacacccccggcggcuacugccugaccagauggaugcugaucgaggccgagcugaagugcuucggcaacaccgccguggccaagugcaacgagaagcacgacgaggaguucugcgacaugcugagacuguucgacuucugcaagcaggccauccagagacugaaggccgaggcccagaugagcauccagcugaucaacaaggccgugaacgcccugaucaacgaccagcugaucaugaagaaccaccugagagacaucaugggcauccccuacugcaacuacagcaaguacugguaccugaaccacaccaccaccggcagaaccagccugcccaagugcuggcuggugagcaacggcagcuaccugaacgagacccacuucagcgacgacaucgagcagcaggccgacaacaugaucaccgagaugcugcagaaggaguacauggagagacagggcaagaccccccugggccugguggaccuguucguguucagcaccagcuucuaccugaucagcaucuuccugcaccuggugaagauccccacccacagacacaucgugggcaagagcugccccaagccccacagacugaaccacaugggcaucugcagcugcggccuguacaagcagcccggcgugcccgugaaguggaagagauga

SEQ ID NO: 36614 - RNA, 1473 nt, Artificial Sequence
  derived and/or modified CDS sequence (opt4) from LASV(LP;Clade I)__AAF86701__GPCmut10
augggccagaucaucaccuucuuccaggaggugccccacgugaucgaggaggugaugaacaucgugcugaucgcccugagccugcuggccauccugaagggccuguacaacaucgccaccugcggcaucaucggccugguggccuuccuguuccugugcggcaagagcugcagccugacccugaagggcggcuacgagcugcagacccuggagcugaacauggagacccugaacaugugcaugccccugagcugcaccaagaacagcagccaccacuacaucagagugggcaacgagaccggccuggagcugacccugaccaacaccagcaucaucaaccacaaguucugcaaccugagcgacgcccacaagaagaaccuguacgaccacgcccugaugagcaucaucagcaccuuccaccugagcauccccaacuucaaccaguacgaggccaugagcugcgacuucaacggcggcaagaucagcgugcaguacaaccugagccacagcuacgccggcgacgccgccgagcacugcggcaccguggccaacggcgugcugcagaccuucaugagaauggccuggggcggcagauacaucgcccuggacagcggcaagggcaacugggacugcaucaugaccagcuaccaguaccugaucauccagaacaccaccugggaggaccacugccaguucagcagacccagccccaucggcuaccugggccugcugagccagagaaccagagacaucuacaucagcagaagacugcugggcaccuucaccuggacccugagcgacagcgagggcaacgagacccccggcggcuacugccugaccagauggaugcugaucgaggccgagcugaagugcuucggcaacaccgccguggccaagugcaacgagaagcacgacgaggaguucugcgacaugcugagacuguucgacuucugcaagcaggccaucagaagacugaaggccgaggcccagaugagcauccagcugaucaacaaggccgugaacgcccugaucaacgaccagcugaucaugaagaaccaccugagagacaucaugggcauccccuacugcaacuacagcaaguacugguaccugaaccacaccagcagcggcagaaccagccugcccaagugcuggcugaucagcaacggcagcuaccugaacgagacccaguucagcgacgacaucgagcagcaggccgacaacaugaucaccgagaugcugcagaaggaguacaucgagagacagggcaagaccccccugggccugguggacaucuucaucuucagcaccagcuucuaccugaucagcaucuuccugcaccugaucaagauccccacccacagacacaucgugggcaagcccugccccaagccccacagacugaaccacaugggcgugugcagcugcggccuguacaagcaccccggcgugcccaccaaguggaagagauga

SEQ ID NO: 36615 - RNA, 1473 nt, Artificial Sequence
  derived and/or modified CDS sequence (opt4) from LASV(803213;Clade II)__AAF86703__GPCmut10
augggccagaucaucaccuucuuccaggaggugccccacgugaucgaggaggugaugaacaucgugcugaucgcccugagccugcuggccauccugaagggcaucuacaacguggccaccugcggccuguucggccugaucagcuuccugcugcugugcggcagaagcugcagcgugaccuacaagggcguguacgagcugcagacccuggagcugaacauggccaaccugaacaugugcaugccccugagcugcaccaagaacaacagccaccacuacaucauggugggcaacgagaccggccuggagcugacccugaccaacaccagcaucaucaaccacaaguucugcaaccugagcgacgcccacaagaagaaccuguacgaccacgcccugaugagcaucaucagcaccuuccaccugagcauccccaacuucaaccaguacgaggccaugagcugcgacuucaacggcggcaagaucagcgugcaguacaaccugagccacagcuucgccguggacgccgccaaccacugcggcaccaucgccaacggcgugcugcagaccuucaugagaauggccuggggcggcagcuacaucgcccuggacagcggcaagggcaacugggacugcaucaugaccagcuaccaguaccugaucauccagaacaccaccugggaggaccacugccaguucagcagacccagccccaucggcuaccugggccugcugagccagagaaccagagacaucuacaucagcagaagacugcugggcaccuucaccuggacccugagcgacagcgagggcaacgaggcccccggcggcuacugccugaccagauggaugcugaucgaggccgagcugaagugcuucggcaacaccgccguggccaagugcaacgagaagcacgacgaggaguucugcgacaugcugagacuguucgacuucugcaagcaggccaucaagagacugaagaccgaggcccagaugagcauccagcugaucaacaaggccgugaacgcccugaucaacgaccagcugaucaugaagaaccaccugagagacaucaugggcauccccuacugcaacuacagcagauacugguaccugaaccacaccgugaccggcaagaccagccugcccagaugcuggcuggugagcaacggcagcuaccugaacgagacccacuucagcgacgacaucgagcagcaggccgacaacaugaucaccgagaugcugcagaaggaguacauggacagacagggcaagaccccccugggccugguggaccuguucguguucagcaccagcuucuaccugaucagcaucuuccugcaccuggugaagauccccacccacagacacaucgugggcaagcccugccccaagccccacagacugaaccacaugggcaucugcagcugcggccuguacaagcaccccggcgugcccgugaaguggaagagauga

SEQ ID NO: 36616 - RNA, 1473 nt, Artificial Sequence
  derived and/or modified CDS sequence (opt4) from LASV(GA391;Clade III)__CAA36645__GPCmut10
augggccagaucgugaccuucuuccaggaggugccccacgugaucgaggaggugaugaacaucgugcugaucgcccugagcauccuggccauccugaagggccuguacaacguggccaccugcggccugaucggccuggugaccuuccugcugcugagcggcagaagcugcagccugaucuacaagggcaccuacgagcugcagacccuggagcugaacauggagacccugaacaugugcaugccccugagcugcaccaagaacaacagccaccacuacaucagagugggcaacgagaccggccuggagcugacccugaccaacaccagcauccugaaccacaaguucugcaaccugagcgacgcccacaagagaaaccuguacgaccacagccugaugagcaucaucagcaccuuccaccugagcauccccaacuucaaccaguacgaggccaugagcugcgacuucaacggcggcaagaucaccgugcaguacaaccugagccacagcuucgccguggacgccgccggccacugcggcacccuggccaacggcgugcugcagaccuucaugagaauggccuggggcggcagcuacaucgcccuggacagcggcagaggcaacugggacugcaucaugaccagcuaccaguaccugaucauccagaacaccaccugggacgaccacugccaguucagcagacccagccccaucggcuaccugggccugcugagccagagaaccagagacaucuacaucagcagaagacugcugggcaccuucaccuggacccugagcgacagcgagggcaacgagacccccggcggcuacugccugaccagauggaugcugaucgaggccgagcugaagugcuucggcaacaccgccguggccaagugcaacgagaagcacgacgaggaguucugcgacaugcugagacuguucgacuucugcaagcaggccaucagaagacugaagaccgaggcccagaugagcauccagcugaucaacaaggccgugaacgcccugaucaacgaccagcugaucaugaagaaccaccugagagacaucaugggcauccccuacugcaacuacagcagauacugguaccugaaccacaccagcaccggcaagaccagccugcccagaugcuggcugaucagcaacggcagcuaccugaacgagaccaaguucagcgacgacaucgagcagcaggccgacaacaugaucaccgagaugcugcagaaggaguacaucgacagacagggcaagaccccccugggccugguggaccuguucguguucagcaccagcuucuaccugaucagcaucuuccugcaccuggugaagauccccacccacagacacaucgugggcaagcccugccccaagccccacagacugaaccacaugggcaucugcagcugcggccuguacaagcagcccggcgugcccgugagauggaagagauga

SEQ ID NO: 36617 - RNA, 1476 nt, Artificial Sequence
  derived and/or modified CDS sequence (opt4) from LASV(AV;Clade V)__CCA30314__GPCmut10
augggccagaucgugaccuucuuccaggaggugccccacgugaucgaggaggugaugaacaucgugcugaucgcccugagcauccuggccgugcugaagggccuguacaacaucgccaccugcggccugaucggccugaucaccuuccugcugcugugcggcagaagcugcagcagcaaccuguacaagggcguguacgagcugcagagccuggaccugaacauggagacccugaacaugugcaugccccugagcugcaccaagaacaacagccaccacuacaucagagugggcaacgacaccggccuggagcugacccugaccaacaccagcauccugaaccacaaguucugcaaccugagcgacgcccacaagaaggaccuguacgaccacgcccugaugagcaucaucagcaccuuccaccugagcauccccaacuucaaccaguacgaggccaugagcugcgacuucaacggcggcaagaucagcgugcaguacaaccugagccacagcuacgccaucgacgccgccaaccacugcggcaccguggccaacggcauccugcagaccuucaugagaauggccuggggcggcagcuacaucgcccuggacagcggcagaggcaacugggacugcaucaugaccagcuaccaguaccugaucauccagaacaccaccugggagaaccacugccaguucagcagacccagccccaucggcuaccugggccugcugagccagagaaccagagacaucuacaucagcagaagacugcugggcaccuucaccuggacccugagcgacagcgagggcaacgccacccccggcggcuacugccugaccagauggaugcugaucgaggccgagcugaagugcuucggcaacaccgccguggccaagugcaacgagaagcacgacgaggaguucugcgacaugcugagacuguucgacuucugcaagcaggccaucagcagacugaagagcgaggcccagaugagcauccagcugaucaacaaggccgugaacgcccugaucaacgaccagcugaucaugaagaaccaccugagagacaucaugggcauccccuacugcaacuacagcaaguacugguaccugaaccacaccaucaccggcaagaccagccugcccaagugcuggcuggugagcaacggcagcuaccugaacgagacccacuucagcgacgacaucgagcagcaggccgacaacaugaucaccgagaugcugcagaaggaguacauggagagacagggcaagaccccccugggccugguggaccuguucguguucagcaccagcuucuaccugaucagcaucuuccugagacuggugaagauccccacccacagacacaucgugggcaagcccugccccaagccccacagacugaaccacaugggcaucugcagcugcggccuguacaagcagcccggcgugcccgugagauggaagagauga

SEQ ID NO: 36618 - RNA, 1473 nt, Artificial Sequence
  derived and/or modified CDS sequence (opt4) from LASV(Togo/2016/7082;Clade VI)__AMR44577__GPCmut10
augggccagaucaucaccuucuuccaggaggugccccacgugaucgaggaggugaugaacaucgugcugaucgcccugagccugcuggccauccugaagggcguguacaacguggccaccugcggcaucaucggccuggugaccuuccuguuccugugcggcagaagcugcagccugaucuacaagggcagcuacgagcugcagacccuggagcugaacauggagacccugaacaugugcaugccccugagcugcaccaagaacagcagccaccacuacaucagagugggcaacgagaccggccuggagcugacccugaccaacaccagcaucaucaaccacaaguucugcaaccugagcgacgcccacaagagaaaccuguacgaccacgcccugaugagcauccugagcaccuuccaccugagcauccccaacuucaaccaguacgaggccaugagcugcgacuucaacggcggcaagaucagcgugcaguacaaccugagccacgccuacgccguggacgccgccgagcacugcggcaccguggccaacggcgugcugcagaccuucaugagaauggccuggggcggcagcuacaucgcccuggacagcggcagaggcaacugggacugcaucaugaccagcuaccaguaccugaucauccagaacaccaccugggaggaccacugccaguucagcagacccagccccaucggcuaccugggccugcugagccagagaaccagagacaucuacaucagcagaagacugcugggcaccuucaccuggacccugagcgacagcgagggcaacgagacccccggcggcuacugccugaccagauggaugcugaucgaggccgagcugaagugcuucggcaacaccgccguggccaagugcaacgagaagcacgacgaggaguucugcgacaugcugagacuguucgacuucugcaagcaggccauccagagacugaagagcgaggcccagaugagcauccagcugaucaacaaggccgugaacgcccugaucaacgaccagcugaucaugaagaaccaccugagagacaugaugggcauccccuacugcaacuacagcaaguacugguaccugaaccacaccagcagcggcagaaccagccugcccaagugcuggcuggugagcaacggcagcuaccugaacgagacccacuucagcgacgacaucgagcagcaggccgacaacaugaucaccgagaugcugcagaaggaguacaucgacagacagggcaagaccccccugggccugguggaccuguucguguucagcaccagcuucuaccugaucagcaucuuccugcaccugaucaagauccccacccacagacacaucgugggcaagcccugccccaagccccacagacugaaccacaugggcaucugcagcugcggccuguacaagcagcccggcgugcccaccagauggaagagauga

SEQ ID NO: 36619 - RNA, 1473 nt, Artificial Sequence
  derived and/or modified CDS sequence (opt4) from LASV(KAK-428;Clade n.d. (VII))__ANH09740__GPCmut10
augggccagaucgugaccuucuuccaggaggugccccacgugaucgaggaggugaugaacaucgugcugaucgcccugagccugcuggccauccugaagggccuguacaacuucgccaccugcggcgugaucggccugaucaccuuccugcugcugugcggcagaagcugcagcgccaccuacaagggccaguacgagcugcagacccuggagcugaacauggagagccugaacaugugcaugccccugagcugcaccaagaacaacagccaccacuacaucagagccggcaacaacaccggccuggagcugacccugaccaacaccagcaucaucagccacaaguucugcaaccugagcgacgcccacaagaagaaccuguacgaccacacccugaugagcaucaucaccaccuuccaccugagcauccccaacuucaaccaguacgaggccaugagcugcgacuucaacggcggcaagaucagcauccaguacaaccugagccacagcuacgccggcgacgccgcccagcacugcggcaccguggccaacggcgugcugcagaccuucaugagaauggccuggggcggcagcuaccuggcccuggacagcggcagaagaggcugggacugcaucaucagcagcuaccaguaccugaucauccagaacaccaccugggacgaccacugccaguucagcagacccagccccaucggcuaccugggcuucgugagccagaagaccagagacaucuacaucagcagaagacugcugggcaccuucaccuggacccugagcgacagcgagggccacgacaugcccggcggcuacugccugaccagauggaugcugaucgaggccgaccugaagugcuucggcaacaccgccguggccaagugcaacgagaagcacgacgaggaguucugcgacauguggagacuguucgacuucugcaagcaggccauccagagacugaaggccgaggcccagaugaacauccagcugaucaacaaggccgugaacgcccugaucaacgaccagcugaugaugaagaaccaccugagagacaucaugggcauccccuacugcaacuacagcaaguucugguaccugaacaacaccaccaccggcagaaccagccugcccagaugcuggcugaucagcaacggcagcuaccugaacgagacccacuucagcgacgacaucgagcagcaggccgacaacaugaucaccgagaugcugcagaaggaguacauggacagacagggcaagaccccccugggccugguggaccuguucguguucagcaccagcuucuaccugaucaccaucuuccugcaccuggugaagauccccacccacagacacaucgugggcaagcccugccccaagccccacagacugaaccacaugggcaucugcagcugcggccuguacaagcagcccggcgugcccgugagauggaagagauga

SEQ ID NO: 36620 - RNA, 1473 nt, Artificial Sequence; identical to SEQ ID NO: 36614
  derived and/or modified CDS sequence (opt4) from LASV(Pinneo-NIG-1969;Clade I)__AIT17836__GPCmut10

SEQ ID NO: 36621 - RNA, 1473 nt, Artificial Sequence
  derived and/or modified CDS sequence (opt4) from LASV(ISTH0009-NIG-2011;Clade II)__AIT17404__GPCmut10
augggccagaucaucaccuucuuccaggaggugccccacgugaucgaggaggugaugaacaucgugcugaucgcccugagccugcuggccauccugaagggcaucuacaacguggccaccugcggccuguucggccuggugagcuuccugcugcugugcggcagaagcugcagcaccaccuacaagggcguguacgagcugcagacccuggagcuggacauggccagccugaacaugugcaugccccugagcugcaccaagaacaacagccaccacuacaucauggugggcaacgagaccggccuggagcugacccugaccaacaccagcaucaucaaccacaaguucugcaaccugagcgacgcccacaagaagaaccuguacgaccacgcccugaugagcaucaucagcaccuuccaccugagcauccccaacuucaaccaguacgaggccaugagcugcgacuucaacggcggcaagaucagcgugcaguacaaccugagccacgccuacgccguggacgccgccaaccacugcggcaccaucgccaacggcgugcugcagaccuucaugagaauggccuggggcggcagcuacaucgcccuggacagcggcaagggcagcugggacugcaucaugaccagcuaccaguaccugaucauccagaacaccaccugggaggaccacugccaguucagcagacccagccccaucggcuaccugggccugcugagccagagaaccagagacaucuacaucagcagaagacugcugggcaccuucaccuggacccugagcgacagcgagggcaacgagacccccggcggcuacugccugaccagauggaugcugaucgaggccgagcugaagugcuucggcaacaccgccguggccaagugcaacgagaagcacgacgaggaguucugcgacaugcugagacuguucgacuucugcaagcaggccaucagaagacugaagaccgaggcccagaugagcauccagcugaucaacaaggccgugaacgcccugaucaacgaccagcugaucaugaagaaccaccugagagacaucaugggcauccccuacugcaacuacagcaaguacugguaccugaaccacaccgugaccggcaagaccagccugcccagaugcuggcuggugagcaacggcagcuaccugaacgagacccacuucagcgacgacaucgagcagcaggccgacaacaugaucaccgagcugcugcagaaggaguacauggacagacagggcaagaccccccugggccugguggaccuguucguguucagcaccagcuucuaccugaucagcaucuuccugcaccugaucaagauccccacccacagacacaucaccggcaagcccugccccaagccccacagacugaaccacaugggcaucugcagcugcggccuguacaagcaccccggcgugcccgugaaguggaagagauga

SEQ ID NO: 36622 - RNA, 1473 nt, Artificial Sequence
  derived and/or modified CDS sequence (opt4) from LASV(ISTH2010-NIG-2012;Clade II)__AIT17482__GPCmut10
augggccagaucaucaccuucuuccaggaggugccccacgugaucgaggaggugaugaacaucgugcugaucgcccugagccugcuggccauccugaagggcaucuacaacguggccaccugcggccuguucggccuggugagcuuccugcugcugugcggcagaagcugcagcaccaccuacaagggcguguacgagcugcagacccuggagcuggacauggccagccugaacaugugcaugccccugagcugcaccaagaacaacagccaccacuacaucauggugggcaacgagaccggccuggagcugacccugaccaacaccagcaucaucaaccacaaguucugcaaccugagcgacgcccacaagaagaaccuguacgaccacgcccugaugagcaucaucagcaccuuccaccugagcauccccaacuucaaccaguacgaggccaugagcugcgacuucaacggcggcaagaucagcgugcaguacaaccugagccacgccuacgccguggacgccgccaaccacugcggcaccaucgccaacggcgugcugcagaccuucaugagaauggccuggggcggcagcuacaucgcccuggacagcggcaagggcagcugggacugcaucaugaccagcuaccaguaccugaucauccagaacaucaccugggaggaccacugccaguucagcagacccagccccaucggcuaccugggccugcugagccagagaaccagagacaucuacaucagcagaagacugcugggcaccuucaccuggacccugagcgacagcgagggcaacgagacccccggcggcuacugccugaccagauggaugcugaucgaggccgagcugaagugcuucggcaacaccgccguggccaagugcaacgagaagcacgacgaggaguucugcgacaugcugagacuguucgacuucugcaagcaggccaucagaagacugaagaccgaggcccagaugagcauccagcugaucaacaaggccgugaacgcccugaucaacgaccagcugaucaugaagaaccaccugagagacaucaugggcauccccuacugcaacuacagcaaguacugguaccugaaccacaccgugaccggcaagaccagccugcccagaugcuggcuggugagcaacggcagcuaccugaacgagacccacuucagcgacgacaucgagcagcaggccgacaacaugaucaccgagcugcugcagaaggaguacaucgacagacagggcaagaccccccugggccugguggaccuguucguguucagcaccagcuucuaccugaucagcaucuuccugcaccuggugaagauccccacccacagacacguggugggcaagcccugccccaagccccacagacugaaccacaugggcaucugcagcugcggccuguacaagcaccccggcgugcccgugaaguggaagagauga

SEQ ID NO: 36623 - RNA, 1473 nt, Artificial Sequence
  derived and/or modified CDS sequence (opt4) from LASV(Lassa virus/H.sapiens-wt/NGA/2015/ISTH_0543;Clade II)__AVO03639__GPCmut10
augggccagaucaucaccuucuuccaggaggugccccacgugaucgaggaggugaugaacaucgugcugaucgcccugagccugcuggccauccugaagggcaucuacaacguggccaccugcggccuguucggccuggugagcuuccugcugcugugcggcagaagcugcagcaccaccuacaagggcguguacgagcugcagacccuggagcuggacauggccaaccugaacaugugcaugccccugagcugcaccaagaacaacagccaccacuacaucauggugggcaacgagaccggccuggagcugacccugaccaacaccagcaucaucaaccacaaguucugcaaccugagcgacgcccacaagaagaaccuguacgaccacgcccugaugagcaucaucagcaccuuccaccugagcauccccaacuucaaccaguacgaggccaugagcugcgacuucaacggcggcaagaucagcgugcaguacaaccugagccacaccuacgccguggacgccgccaaccacugcggcaccaucgccaacggcgugcugcagaccuucaugagaauggccuggggcggcagcuacaucgcccuggacagcggcaagggcagcugggacugcaucaugaccagcuaccaguaccuggugauccagaacaccaccugggaggaccacugccaguucagcagacccagccccaucggcuaccugggccugcugagccagagaaccagagacaucuacaucagcagaagacugcugggcaccuucaccuggacccugagcgacagcgagggcaacgagacccccggcggcuacugccugaccagauggaugcugaucgaggccgagcugaagugcuucggcaacaccgccguggccaagugcaacgagaagcacgacgaggaguucugcgacaugcugagacuguucgacuucugcaagcaggccaucagaagacugaagaccgaggcccagaugagcauccagcugaucaacaaggccgugaacgcccugaucaacgaccagcugaucaugaagaaccaccugagagacaucaugggcauccccuacugcaacuacagcaaguacugguaccugaaccacaccgugaccggcaagaccagccugcccagaugcuggcuggugagcaacggcagcuaccugaacgagacccacuucagcgacgacaucgagcagcaggccgacaacaugaucaccgagcugcugcagaaggaguacaucgacagacagggcaagaccccccugggccugguggaccuguucguguucagcaccagcuucuaccugaucagcaucuuccugcaccuggugaagauccccacccacagacacaucaccggcaagcccugccccaagccccacagacugaaccacaugggcaucugcagcugcggccuguacaagcaccccggcgugcccgugaaguggaagagauga

SEQ ID NO: 36624 - RNA, 1473 nt, Artificial Sequence
  derived and/or modified CDS sequence (opt4) from LASV(Lassa virus/H.sapiens-wt/NGA/2016/ISTH_0009;Clade II)__AVO03571__GPCmut10
augggccagaucaucaccuucuuccaggaggugccccacgugaucgaggaggugaugaacaucgugcugaucgcccugagccugcuggccauccugaagggcaucuacaacguggccaccugcggccugcugggccuggugagcuuccugcugcugugcggcagaagcugcagcaccaccuacaagggcguguacgagcugcagacccuggagcuggacauggccagccugaacaugugcaugccccugagcugcaccaagaacaacagccaccacuacaucauggugggcaacgagaccggccuggagcugacccugaccaacaccagcaucaucaaccacaaguucugcaaccugagcgacgcccacaagaagaaccuguacgaccacgcccugaugagcaucaucagcaccuuccaccugagcauccccaacuucaaccaguacgaggccaugagcugcgacuucaacggcggcagaaucagcgugcaguacaaccugagccacagcuacgccguggacgccgccaaccacugcggcaccaucgccaacggcgugcugcagaccuucaugagaauggccuggggcggcagcuacaucgcccuggacagcggcaagggcagcugggacugcaucaugaccagcuaccaguaccugaucauccagaacaccaccugggaggaccacugccaguucagcagacccagccccaucggcuaccugggccugcugagccagagaaccagagacaucuacaucagcagaagacugcugggcaccuucaccuggacccugagcgacagcgagggcaacgagacccccggcggcuacugccugaccagauggaugcugaucgaggccgagcugaagugcuucggcaacaccgccguggccaagugcaacgagaagcacgacgaggaguucugcgacaugcugagacuguucgacuucugcaagcaggccaucagaagacugaagaccgaggcccagaugagcauccagcugaucaacaaggccgugaacgcccugaucaacgaccagcugaucaugaagaaccaccugagagacaucaugggcauccccuacugcaacuacagcaaguacugguaccugaaccacaccgugaccggcaagaccagccugcccagaugcuggcuggugagcaacggcagcuaccugaacgagacccacuucagcgacgacaucgagcagcaggccgacaacaugaucaccgagcugcugcagaaggaguacaucgacagacagggcaagaccccccugggccugguggaccuguucguguucagcaccagcuucuaccugaucagcaucuuccugcaccuggugaagauccccacccacagacacaucaccggcaagcccugccccaagccccacagacugaaccacaugggcaucugcagcugcggccuguacaaccaccccggcgugcccgugaaguggaagagauga

SEQ ID NO: 36625 - RNA, 1473 nt, Artificial Sequence
  derived and/or modified CDS sequence (opt4) from LASV(Lassa virus/H.sapiens-wt/NGA/2016/ISTH_0017;Clade II)__AVO03567__GPCmut10
augggccagaucaucaccuucuuccaggaggugccccacgugaucgaggaggugaugaacaucgugcugaucgcccugagccugcuggccauccugaagggcaucuacaacguggccaccugcggccuguucggccuggugagcuuccugcugcugugcggcagaagcugcagcaccaccuacaagggcguguacgagcugcagacccuggagcuggacauggccagccugaacaugugcaugccccugagcugcaccaagaacaacagccaccacuacaucauggugggcaacgagaccggccuggagcugacccugaccaacaccagcaucaucaaccacaaguucugcaaccugagcgacgcccacaagaagaaccuguacgaccacgcccugaugagcaucaucagcaccuuccaccugagcauccccaacuucaaccaguacgaggccaugagcugcgacuucaacggcggcaagaucagcgugcaguacaaccugagccacaccuacgccaucgacgccgccaaccacugcggcaccaucgccaacggcgugcugcagaccuucaugagaauggccuggggcggcagcuacaucgcccuggacagcggcaagggcagcugggacugcaucaugaccagcuaccaguaccugaucauccagaacaccaccugggaggaccacugccaguucagcagacccagccccaucggcuaccugggccugcugagccagagaaccagagacaucuacaucagcagaagacugcugggcaccuucaccuggacccugagcgacagcgagggcaacgagacccccggcggcuacugccugaccagauggaugcugaucgaggccgagcugaagugcuucggcaacaccgccguggccaagugcaacgagaagcacgacgaggaguucugcgacaugcugagacuguucgacuucugcaagcaggccaucagaagacugaagaccgaggcccagaugagcauccagcugaucaacaaggccgugaacgcccugaucaacgaccagcugaucaugaagaaccaccugagagacaucaugggcauccccuacugcaacuacagcaaguacugguaccugaaccacaccgugaccggcaagaccagccugcccagaugcuggcuggugagcaacggcagcuaccugaacgagacccacuucagcgacgacaucgagcagcaggccgacaacaugaucaccgagcugcugcagaaggaguacauggacagacagggcaagaccccccugggccugguggaccuguucguguucagcaccagcuucuaccugaucagcaucuuccugcaccuggugagaauccccacccacagacacgugaucggcaagcccugccccaagccccacagacugaaccacaugggcaucugcagcugcggccuguacaagcaccccggcgugcccgugaaguggaagagauga

SEQ ID NO: 36626 - RNA, 1473 nt, Artificial Sequence
  derived and/or modified CDS sequence (opt4) from LASV(Lassa virus/H.sapiens-wt/NGA/2018/ISTH_0959;Clade II)__AVV65099__GPCmut10
augggccagaucaucaccuucuuccaggaggugccccacgugaucgaggaggugaugaacaucgugcugaucgcccugagccugcuggccauccugaagggcaucuacaacguggugaccugcggccuguucggccuggugagcuuccugcugcugugcggcagaagcugcagcaccaccuacaagggcguguacgagcugcagacccuggagcuggacauggccagccugaacaugugcaugccccugagcugcaccaagaacaacagccaccacuacaucauggugggcaacgagaccggccuggagcugacccugaccaacaccagcaucaucaaccacaaguucugcaaccugagcgacgcccacaagaagaaccuguacgaccacgcccugaugagcaucaucagcaccuuccaccugagcauccccaacuucaaccaguacgaggccaugagcugcgacuucaacggcggcaagaucagcgugcaguacaaccugagccacgccuacgccaucgacgccgccaaccacugcggcaccaucgccaacggcgugcugcagaccuucaugagaauggccuggggcggcagcuacaucgcccuggacagcggcaagggcagcugggacugcaucaugaccagcuaccaguaccugaucauccagaacaccaccugggaggaccacugccaguucagcagacccagccccaucggcuaccugggccugcugagccagagaaccagagacaucuacaucagcagaagacugcugggcaccuucaccuggacccugagcgacagcgagggcaacgagacccccggcggcuacugccugaccagauggaugcugaucgaggccgagcugaagugcuucggcaacaccgccguggccaagugcaacgagaagcacgacgaggaguucugcgacaugcugagacuguucgacuucugcaagcaggccaucagaagacugaagaccgaggcccagaugagcauccagcugaucaacaaggccgugaacgcccugaucaacgaccagcugaucaugaagaaccaccugagagacaucaugggcauccccuacugcaacuacagcaaguacugguaccugaaccacaccgugaccggcaagaccagccugcccagaugcuggcuggugagcaacggcagcuaccugaacgagacccacuucagcgacgacaucgagcagcaggccgacaacaugaucaccgagcugcugcagaaggaguacaucgacagacagggcaagaccccccugggccugguggaccuguucguguucagcaccagcuucuaccugaucagcaucuuccugcaccuggugaagauccccacccacagacacgugaucggcaagcccugccccaagccccacagacugaaccacaugggcaucugcagcugcggccuguacaagcaccccggcgugcccgugaaguggaagagauga

SEQ ID NO: 36627 - RNA, 1473 nt, Artificial Sequence
  derived and/or modified CDS sequence (opt4) from LASV(LASV003-NIG-2008;Clade II)__AIT17580__GPCmut10
augggccagaucaucaccuucuuccaggaggugccccacgugaucgaggaggugaugaacaucgugcugaucgcccugagccugcuggccauccugaagggcaucuacaacguggccaccugcggccuguucggccuggugagcuuccugcugcugugcggcagaagcugcagcaccaccuacaagggcguguacgagcugcagacccuggagcuggacauggccagccugaacaugugcaugccccugagcugcaccaagaacaacagccaccacuacaucauggugggcaacgagaccggccuggagcugacccugaccaacaccagcaucaucaaccacaaguucugcaaccugagcgacgcccacaagaagaaccuguacgaccacgcccugaugagcaucaucagcaccuuccaccugagcauccccaacuucaaccaguacgaggccaugagcugcgacuucaacggcggcaagaucagcgugcaguacaaccugagccacaccuacgccguggacgccgccaaccacugcggcaccaucgccaacggcgugcugcagaccuucaugagaauggccuggggcggcagcuacaucgcccuggacagcggcaagggcagcugggacugcaucaugaccagcuaccaguaccugaucauccagaacaccaccugggaggaccacugccaguucagcagacccagccccaucggcuaccugggccugcugagccagagaaccagagacaucuacaucagcagaagacugcugggcaccuucaccuggacccugagcgacagcgagagcaacgagacccccggcggcuacugccugaccagauggaugcugaucgaggccgagcugaagugcuucggcaacaccgccguggccaagugcaacgagaagcacgacgaggaguucugcgacaugcugagacuguucgacuucugcaagcaggccaucagaagacugaaggccgaggcccagaugagcauccagcugaucaacaaggccgugaacgcccugaucaacgaccagcugaucaugaagaaccaccugagagacaucaugggcauccccuacugcaacuacagcaaguacugguaccugaaccacaccgugaccggcagaaccagccugcccagaugcuggcuggugagcaacggcagcuaccugaacgagacccacuucagcgacgacaucgagcagcaggccgacaacaugaucaccgagcugcugcagaaggaguacauggacagacagggcaagaccccccugggccugguggaccuguucguguucagcaccagcuucuaccugaucagcaucuuccugcaccuggugaagauccccacccacagacacgugaucggcaagcccugccccaagccccacagacugaaccacaugggcaucugcagcugcggccuguacaagcaccccggcgugcccgugaaguggaagagauga

SEQ ID NO: 36628 - RNA, 1473 nt, Artificial Sequence
  derived and/or modified CDS sequence (opt4) from LASV(LASV035-NIG-2009;Clade II)__AIT17588__GPCmut10
augggccagaucaucaccuucuuccaggaggugccccacgugaucgaggaggugaugaacaucgugcugaucgcccugagccugcuggccauccugaagggcaucuacaacguggccaccugcggccuguucggccuggugagcuuccugcugcugugcggcagaagcugcagcaccaccuacaagggcguguacgagcugcagacccuggagcuggacauggccagccugaacaugugcaugccccugagcugcaccaagaacaacagccaccacuacaucauggugggcaacgagaccggccuggagcugacccugaccaacaccagcaucaucaaccacaaguucugcaaccugagcgacgcccacaagaagaaccuguacgaccacgcccugaugagcaucaucagcaccuuccaccugagcauccccaacuucaaccaguacgaggccaugagcugcgacuucaacggcggcaagaucagcgugcaguacaaccugagccacgccuacgccguggacgccgccaaccacugcggcaccaucgccaacggcgugcugcagaccuucaugagaauggccuggggcggcagcuacaucgcccuggacagcggcaagggcagcugggacugcaucaugaccagcuaccaguaccugaucauccagaacaccaccugggaggaccacugccaguucagcagacccagccccaucggcuaccugggccugcugagccagagaaccagagacaucuacaucagcagaagacugcugggcaccuucaccuggacccugagcgacagcgagggcaacgagacccccggcggcuacugccugaccagauggaugcugaucgaggccgagcugaagugcuucggcaacaccgccguggccaagugcaacgagaagcacgacgaggaguucugcgacaugcugagacuguucgacuucugcaagcaggccaucagaagacugaaggccgaggcccagaugagcauccagcugaucaacaaggccgugaacgcccugaucaacgaccagcugaucaugaagaaccaccugagagacaucaugggcauccccuacugcaacuacagcaaguacugguaccugaaccacaccgugaccggcaagaccagccugcccagaugcuggcuggugagcaacggcagcuaccugaacgagacccacuucagcgacgacaucgagcagcaggccgacaacaugaucaccgagcugcugcagaaggaguacaucgacagacagggcaagaccccccugggccugguggaccuguucguguucagcaccagcuucuaccugaucagcaucuuccugcaccuggugaagauccccacccacagacacgugaucggcaagcccugccccaagccccacagacugaaccacaugggcaucugcagcugcggccuguacaagcaccccggcgugcccgugaaguggaagagauga

SEQ ID NO: 36629 - RNA, 1473 nt, Artificial Sequence
  derived and/or modified CDS sequence (opt4) from LASV(LASV1000-NIG-2009;Clade II)__AIT17782__GPCmut10
augggccagaucaucaccuucuuccaggaggugccccacgugaucgaggaggugaugaacaucgugcugaucgcccugagccugcuggccauccugaagggcaucuacaacguggccaccugcggccuguucggccuggugagcuuccugcugcugugcggcagaagcugcagcaccaccuacaagggcguguacgagcugcagacccuggagcuggacauggccagccugaacaugugcaugccccugagcugcaccaagaacaacagccaccacuacaucauggugggcaacgagaccggccuggagcugacccugaccaacaccagcaucaucaaccacaaguucugcaaccugagcgacgcccacaagaagaaccuguacgaccacgcccugaugagcaucaucagcaccuuccaccugagcauccccaacuucaaccaguacgaggccaugagcugcgacuucaacggcggcaagaucagcgugcaguacaaccugagccacaccuacgccguggacgccgccaaccacugcggcaccaucgccaacggcgugcugcagaccuucaugagaauggccuggggcggcagcuacaucgcccuggacagcggcaagggcagcugggacugcaucaugaccagcuaccaguaccugaucauccagaacaccaccugggaggaccacugccaguucagcagacccagccccaucggcuaccugggccugcugagccagagaaccagagacaucuacaucagcagaagacugcugggcaccuucaccuggacccugagcgacagcgagggcaacgagacccccggcggcuacugccugaccagauggaugcugaucgaggccgagcugaagugcuucggcaacaccgccguggccaagugcaacgagaagcacgacgaggaguucugcgacaugcugagacuguucgacuucugcaagcaggccaucaagagacugaagaccgaggcccagaugagcauccagcugaucaacaaggccgugaacgcccugaucaacgaccagcugaucaugaagaaccaccugagagacaucaugggcauccccuacugcaacuacagcaaguacugguaccugaaccacaccgugaccggcaagaccagccugcccagaugcuggcuggugagcaacggcagcuaccugaacgagacccacuucagcgacgacaucgagcagcaggccgacaacaugaucaccgagcugcugcagaaggaguacaucgacagacagggcaagaccccccugggccugguggaccuguucguguucagcaccagcuucuaccugaucagcaucuuccugcaccuggugaagauccccacccacagacacguggugggcaagcccugccccaagccccacagacugaaccacaugggcaucugcagcugcggccuguacaagcaccccggcgugcccgugaaguggaagagauga

SEQ ID NO: 36630 - RNA, 1473 nt, Artificial Sequence
  derived and/or modified CDS sequence (opt4) from LASV(LASV221-NIG-2010;Clade II)__AIT17624__GPCmut10
augggccagaucaucaccuucuuccaggaggugccccacgugaucgaggaggugaugaacaucgugcugaucgcccugagccugcuggccauccugaagggcaucuacaacguggccaccugcggccuguucggccuggugagcuuccugcugcugugcggcagaagcugcagcaccaccuacaagggcguguacgagcugcagacccuggagcuggacauggccagccugaacaugugcaugccccugagcugcaccaagaacaacagccaccacuacaucauggugggcaacgagaccggccuggagcugacccugaccaacaccagcaucaucaaccacaaguucugcaaccugagcgacgcccacaagaagaaccuguacgaccacgcccugaugagcaucaucagcaccuuccaccugagcauccccaacuucaaccaguacgaggccaugagcugcgacuucaacggcggcaagaucagcgugcaguacaaccugagccacaccuacgccaucgacgccgccaaccacugcggcaccaucgccaacggcgugcugcagaccuucaugagaauggccuggggcggcagcuacaucgcccuggacagcggcaagggcagcugggacugcaucaugaccagcuaccaguaccugaucauccagaacaccaccugggaggaccacugccaguucagcagacccagccccaucggcuaccugggccugcugagccagagaaccagagacaucuacaucagcagaagacugcugggcaccuucaccuggacccugagcgacagcgagggcaacgagacccccggcggcuacugccugaccagauggaugcugaucgaggccgagcugaagugcuucggcaacaccgccguggccaagugcaacgagaagcacgacgaggaguucugcgacaugcugagacuguucgacuucugcaagcaggccaucagaagacugaagaccgaggcccagaugagcauccagcugaucaacaaggccgugaacgcccugaucaacgaccagcugaucaugaagaaccaccugagagacaucaugggcauccccuacugcaacuacagcaaguacugguaccugaaccacaccgugaccggcaagaccagccugcccagaugcuggcuggugagcaacggcagcuaccugaacgagacccacuucagcgacgacaucgagcagcaggccgacaacaugaucaccgagaugcugcagaaggaguacauggacagacagggcaagaccccccugggccugguggaccuguucguguucagcaccagcuucuaccugaucagcaucuuccugcaccuggugaagauccccacccacagacacgugaucggcaagcccugccccaagccccacagacugaaccacaugggcaucugcagcugcggccuguacaagcaccccggcgugcccgugaaguggaagagauga

SEQ ID NO: 36631 - RNA, 1473 nt, Artificial Sequence
  derived and/or modified CDS sequence (opt4) from LASV(LASV237-NIG-2010;Clade II)__AIT17638__GPCmut10
augggccagaucaucaccuucuuccaggaggugccccacgugaucgaggaggugaugaacaucgugcugaucgcccugagccugcuggccauccugaagggcaucuacaacguggccaccugcggccuguucggccuggugagcuuccugcugcugugcggcagaagcugcagcaccaccuacaagggcguguacgagcugcagacccuggagcuggacauggccagccugaacaugugcaugccccugagcugcaccaagaacaacagccaccacuacaucauggugggcaacgagaccggccuggagcugacccugaccaacaccagcaucaucaaccacaaguucugcaaccugagcgacgcccacaagaaggaccuguacgaccacgcccugaugagcaucaucagcaccuuccaccugagcauccccaacuucaaccaguacgaggccaugagcugcgacuucaacggcggcaagaucagcgugcaguacaaccugagccacaccuacgccguggacgccgccaaccacugcggcaccaucgccaacggcgugcugcagaccuucaugagaauggccuggggcggcagcuacaucgcccuggacagcggcaagggcagcugggacugcaucaugaccagcuaccaguaccugaucauccagaacaccaccugggaggaccacugccaguucagcagacccagccccaucggcuaccugggccugcugagccagagaaccagagacaucuacaucagcagaagacugcugggcaccuucaccuggacccugagcgacagcgagggcaacgagacccccggcggcuacugccugaccagauggaugcugaucgaggccgagcugaagugcuucggcaacaccgccguggccaagugcaacgagaagcacgacgaggaguucugcgacaugcugagacuguucgacuucugcaagcaggccaucagaagacugaagaccgaggcccagaugagcauccagcugaucaacaaggccgugaacgcccugaucaacgaccagcugaucaugaagaaccaccugagagacaucaugggcauccccuacugcaacuacagcaaguacugguaccugaaccacaccgugaccggcaagaccagccugcccagaugcuggcuggugagcaacggcagcuaccugaacgagacccacuucagcgacgacaucgagcagcaggccgacaacaugaucaccgagcugcugcagaaggaguacauggacagacagggcaagaccccccugggccugguggaccuguucguguucagcaccagcuucuaccugaucagcaucuuccugcaccugaucaagauccccacccacagacacaucaccggcaagcccugccccaagccccacagacugaaccacaugggcaucugcagcugcggccuguacaagcaccccggcgugcccgugaaguggaagagauga

SEQ ID NO: 36632 - RNA, 1473 nt, Artificial Sequence
  derived and/or modified CDS sequence (opt4) from LASV(LASV253-NIG-2011;Clade II)__AIT17670__GPCmut10
augggccagaucaucaccuucuuccaggaggugccccacgugaucgaggaggugaugaacaucgugcugaucgcccugagccugcuggccauccugaagggcaucuacaacguggccaccugcggccuguucggccuggugagcuuccugcugcugugcggcagaagcugcagcaccaccuacaagggcguguacgagcugcagacccuggagcuggacauggccagccugaacaugugcaugccccugagcugcaccaagaacaacagccaccacuacaucauggugggcaacgagaccggccuggagcugacccugaccaacaccagcaucaucaaccacaaguucugcaaccugagcgacgcccacaagaagaaccuguacgaccacgcccugaugagcaucaucagcaccuuccaccugagcauccccaacuucaaccaguacgaggccaugagcugcgacuucaacggcggcaagaucagcgugcaguacaaccugagccacaccuacgccguggacgccgccaaccacugcggcaccaucgccaacggcgugcugcagaccuucaugagaauggccuggggcggcagcuacaucgcccuggacagcggcaagggcagcugggacugcaucaugaccagcuaccaguaccugaucauccagaacaccaccugggaggaccacugccaguucagcagacccagccccaucggcuaccugggccugcugagccagagaaccagagacaucuacaucagcagaagacugcugggcaccuucaccuggacccugagcgacagcgagggcaacgagacccccggcggcuacugccugaccagauggaugcugaucgaggccgagcugaagugcuucggcaacaccgccguggccaagugcaacgagaagcacgacgaggaguucugcgacaugcugagacuguucgacuucugcaagcaggccaucagaagacugaaggccgaggcccagaugagcauccagcugaucaacaaggccgugaacgcccugaucaacgaccagcugaucaugaagaaccaccugagagacaucaugggcauccccuacugcaacuacagcaaguacugguaccugaaccacaccgugaccggcagaaccagccugcccagaugcuggcuggugagcaacggcagcuaccugaacgagacccacuucagcgacgacaucgagcagcaggccgacaacaugaucaccgagcugcugcagaaggaguacaucgacagacagggcaagaccccccugggccugguggaccuguucguguucagcaccagcuucuaccugaucagcaucuuccugcaccuggugaagauccccacccacagacacaucaucggcaagcccugccccaagccccacagacugaaccacaugggcaucugcagcugcggccuguacaagcaccccggcgugcccgugaaguggaagagauga

SEQ ID NO: 36633 - RNA, 1473 nt, Artificial Sequence
  derived and/or modified CDS sequence (opt4) from LASV(LASV254-NIG-2011;Clade II)__AIT17674__GPCmut10
augggccagaucaucaccuucuuccaggaggugccccacgugaucgaggaggugaugaacaucgugcugaucgcccugagccugcuggccauccugaagggcaucuacaacguggccaccugcggccuguucggccuggugagcuuccugcugcugugcggcagaagcugcagcaccaccuacaagggcguguacgagcugcagacccuggagcuggacaugaccaaccugaacaugugcaugccccugagcugcaccaagaacaacagccaccacuacaucauggugggcaacgagaccggccuggagcugacccugaccaacaccagcaucaucaaccacaaguucugcaaccugagcgacgcccacaagaagaaccuguacaaccacgcccugaugagcaucaucagcaccuuccaccugagcauccccaacuucaaccaguacgaggccaugagcugcgacuucaacggcggcaagaucagcgugcaguacaaccugagccacagcuacgccguggacgccgccaaccacugcggcaccaucgccaacggcgugcugcagaccuucaugagaauggccuggggcggcagcuacaucgcccuggacagcggcaagggcaacugggacugcaucaugaccagcuaccaguaccugaucauccagaacaccaccugggaggaccacugccaguucagcagacccagccccaucggcuaccugggccugcugagccagagaaccagagacaucuacaucagcagaagacugcugggcaccuucaccuggacccugagcgacagcgagggcaacgagacccccggcggcuacugccugaccagauggaugcugaucgaggccgagcugaagugcuucggcaacaccgccguggccaagugcaacgagaagcacgacgaggaguucugcgacaugcugagacuguucgacuucugcaagcaggccaucagaagacugaagaccgaggcccaggccaacauccagcugaucaacaaggccgugaacgcccugaucaacgaccagcugaucaugaagaaccaccugagagacaucaugggcauccccuacugcaacuacagcaaguacugguaccugaaccacaccgugaccggcaagaccagccugcccagaugcuggcuggugagcaacggcagcuaccugaacgagacccacuucagcgacgacaucgagcagcaggccgacaacaugaucaccgagcugcugcagaaggaguacauggacagacagggcaagaccccccugggccugguggaccuguucguguucagcaccagcuucuaccugaucagcaucuuccugcaccuggugaagauccccacccacagacacgugaucggcaagcccugccccaagccccacagacugaaccacaugggcaucugcagcugcggccuguacaagcaccccggcgugcccgugaaguggaagagauga

SEQ ID NO: 36634 - RNA, 1473 nt, Artificial Sequence
  derived and/or modified CDS sequence (opt4) from LASV(Nig08-A19;Clade III)__ADU56618__GPCmut10
augggccagaucgugaccuucuuccaggaggugccccacgugaucgaggaggugaugaacaucgugcugaucgcccugagcauccuggccauccugaagggccuguacaacaucgccaccugcggccugaucggccuggugaccuuccugcugcugagcggcagaagcugcagcaugaccuacaagggcguguacgagcugcagacccuggagcugaacaugaacacccugaacaugugcaugccccugagcugcaccaagaacaacagccaccacuacaucauggugggcaacgagaccggccuggagcugacccugaccaacaccagccugcugcaccacaaguucugcaaccugagcgacgcccacaagaagaaccuguacgaccacacccugaugagcaucaucagcaccuuccaccugagcauccccaacuucaaccaguacgaggccaugagcugcgacuucaacggcggcaagaucaccgugcaguacaaccugagccacagcuacgccaucgacgccgccaaccacugcggcaccguggccaacggcgugcugcagaccuucaugagaauggccuggggcggcagcuacaucgcccuggacagcggcagaggcaagugggacugcaucaugaccagcuaccaguaccugaucauccagaacaccaccugggaggaccacugccaguucagcagacccagccccaucggcuaccugggccugcugagccagagaaccagagacaucuacaucagcagaagacugcugggcaccuucaccuggacccugagcgacagcgagggcaacgagacccccggcggcuacugccugaccagauggaugcugaucgaggccgagcugaagugcuucggcaacaccgccguggccaagugcaacgagaagcacgacgaggaguucugcgacaugcugagacuguucgacuucugcaagcaggccaucagaagacugaaggccgaggcccagaugagcauccagcugaucaacaaggccgugaacgcccugaucaacgaccagcugaucaugaagaaccaccugagagacaucaugggcauccccuacugcaacuacagcaaguacugguaccugaaccacaccagcaccggcagaaccagccugcccagaugcuggcuggugagcaacggcagcuaccugaacgagacccacuucagcgacgacaucgagcagcaggccgacaacaugaucaccgagaugcugcagaaggaguaccuggacagacagggcaagaccccccugggccugguggaccuguucguguucagcaccagcuucuaccugaucagcaucuuccugcaccuggugaagauccccacccacagacacaucgugggcaagcccugccccaagccccacagacugaaccacaugggcaucugcagcugcggccuguacaagcagcccggcgugcccgugagauggaagagauga

SEQ ID NO: 36635 - RNA, 1476 nt, Artificial Sequence
  derived and/or modified CDS sequence (opt4) from LASV(G1180-SLE-2010;Clade IV)__AIT17168__GPCmut10
augggccagaucgugaccuucuuccaggaggugccccacgugaucgaggaggugaugaacaucgugcugaucgcccugagcauccuggccgugcugaagggccuguacaacuucgccaccugcggccuggugggccugcugaccuuccugcugcugugcggcagaagcugcaccgccagcagauacaagggcguguacgagcugcagacccuggagcugaacauggagacccugaacaugugcaugccccugagcugcaccaagaacaacagccaccacuacaucauggugggcaacgagaccggccuggagcugacccugaccaacaccagcaucaucaaccacaaguucugcaaccugagcgacgcccacaagaagaaccuguacgaccacgcccugaugagcaucaucagcaccuuccaccugagcauccccaacuucaaccaguacgaggccaugagcugcgacuucaacggcggcaagaucagcgugcaguacaaccugagccacagcuacgccggcgacgccgccaaccacugcggcaccguggccaacggcgugcugcagaccuucaugagaauggccuggggcggcagcuacaucgcccuggacagcggccacggcagcugggacugcaucaugaccagcuaccaguaccugaucauccagaacaccaccugggaggaccacugccaguucagcagacccagccccaucggcuaccugggccugcugagccagagaaccagagacaucuacaucagcagaagacugcugggcaccuucaccuggacccugagcgacagcgagggcaaggacacccccggcggcuacugccugaccagauggaugcugaucgaggccgagcugaagugcuucggcaacaccgccguggccaagugcaacgagaagcacgacgaggaguucugcgacaugcugagacuguucgacuucugcaagcaggccauccagagacugaaggccgaggcccagaugagcauccagcugaucaacaaggccgugaacgcccugaucaacgaccagcugaucaugaagaaccaccugagagacaucaugggcauccccuacugcaacuacagcaaguacugguaccugaaccacaccaccaccggcaagaccagccugcccaagugcuggcuggugagcaacggcagcuaccugaacgagacccacuucagcgacgacaucgagcagcaggccgacaacaugaucaccgagaugcugcagaaggaguacauggagagacagggcaagaccccccugggccugguggaccuguucguguucagcaccagcuucuaccugaucagcaucuuccugcaccuggugaagauccccacccacagacacaucgugggcaagagcugccccaagccccacagacugaaccacaugggcaucugcagcugcggccuguacaagcagcccggcgugcccgugaaguggaagagauga

SEQ ID NO: 36636 - RNA, 1476 nt, Artificial Sequence
  derived and/or modified CDS sequence (opt4) from LASV(G1442-SLE-2011;Clade IV)__AIT17180__GPCmut10
augggccagaucgugaccuucuuccaggaggugccccacgugaucgaggaggugaugaacaucgugcugaucgcccugagcauccuggccgugcugaagggccuguacaacguggccaccugcggccugaucggccuggugaccuuccugcugcugugcggcagaagcugcaccaccacccuguacaagggcguguacgagcugcagacccuggagcugaacauggagacccugaacaugugcaugccccugagcugcaccaagaacaacagccaccacuacaucagagugggcaacgagaccggccuggagcugacccugaccaacaccagcaucaucaaccacaaguucugcaaccugagcgacgcccacaagaagaaccuguacgaccacgcccugaugagcaucaucagcaccuuccaccugagcauccccaacuucaaccaguacgaggccaugagcugcgacuucaacggcggcaagaucagcgugcaguacaaccugagccacagcuacgccggcgacgccgccaaccacugcggcaccguggccaacggcgugcugcagaccuucaugagaauggccuggggcggcagcuacaucgcccuggacagcggcagaggcaacugggacugcaucaugaccagcuaccaguaccugaucauccagaacaccaccugggacgaccacugccaguucagcagacccagccccaucggcuaccugggccugcugagccagagaaccagagacguguacaucagcagaagacugcugggcaccuucaccuggacccugagcgacagcgagggcaaggacacccccggcggcuacugccugaccagauggaugcugaucgaggccgagcugaagugcuucggcaacaccgccguggccaagugcaacgagaagcacgacgaggaguucugcgacaugcugagacuguucgacuucugcaagcaggccauccagagacugaaggccgaggcccagaugagcauccagcugaucaacaaggccgugaacgcccugaucaacgaccagcugaucaugaagaaccaccugagagacaucaugggcauccccuacugcaacuacagcaaguacugguaccugaacaacaccgccaccggcaagaccagccugcccaagugcuggcugaucagcaacggcagcuaccugaacgagacccacuucagcgacgacaucgagcaggaggccgacaacaugaucaccgagaugcugcagaaggaguacauggagagacagggcaagaccccccugggccugguggaccuguucguguucagcaccagcuucuaccugaucagcaucuuccugcaccuggugaagauccccacccacagacacaucgugggcaagagcugccccaagccccacagacugaaccacaugggcaucugcagcugcggccuguacaagcagcccggcgugcccgugagauggaagagauga

SEQ ID NO: 36637 - RNA, 1476 nt, Artificial Sequence
  derived and/or modified CDS sequence (opt4) from LASV(G3010-SLE-2013;Clade IV)__AIT17344__GPCmut10
augggccagaucgugaccuucuuccaggaggugccccacgugaucgaggaggugaugaacaucgugcugaucgcccugagcauccuggccgugcugaagggccuguacaacuucgccaccugcggccuggugggccuggugaccuuccugcugcugugcggcagaagcugcaccaccagccuguacaagggcguguacgagcugcagacccuggagcugaacauggagacccugaacaugugcaugccccugagcugcaccaagaacaacagccaccacuacaucauggugggcaacgagaccggccuggagcugacccugaccaacaccagcaucaucaaccacaaguucugcaaccugagcgacgcccacaagaagaaccuguacaaccacgcccugaugagcaucaucagcaccuuccaccugagcauccccaacuucaaccaguacgaggccaugagcugcgacuucaacggcggcaagaucagcgugcaguacaaccugagccacagcuacgccggcgacgccgccagccacugcggcaccguggccaacggcgugcugcagaccuucaugagaauggccuggggcggcagcuacaucgcccuggacagcggcuacggcaagugggacugcaucaugaccagcuaccaguaccugaucauccagaacaccaccugggaggaccacugccaguucagcagacccagccccaucggcuaccugggccugcugagccagagaaccagagacaucuacaucagcagaagacugcugggcaccuucaccuggacccugagcgacagcgagggcaaggacacccccggcggcuacugccugaccagauggaugcugaucgaggccgagcugaagugcuucggcaacaccgccguggccaagugcaacgagaagcacgacgaggaguucugcgacaugcugagacuguucgacuucugcaagcaggccauccagagacugaagaccgaggcccagaugagcauccagcugaucaacaaggccgugaacgcccugaucaacgaccagcugaucaugaagaaccaccugagagacaucaugggcauccccuacugcaacuacagcaaguacugguaccugaaccacaccaccaccggcaagaccagccugcccaagugcuggcuggugagcaacggcagcuaccugaacgagacccacuucagcgacgacaucgagcagcaggccgacaacaugaucaccgagaugcugcagaaggaguacauggagagacagggcaagaccccccugggccugguggaccuguucguguucagcaccagcuucuaccugaucagcaucuuccugcaccuggugaagauccccacccacagacacaucgugggcaagagcugccccaagccccacagacugaaccacaugggcaucugcagcugcggccuguacaagcagcccggcgugcccgugagauggaagagauga

SEQ ID NO: 36638 - RNA, 1476 nt, Artificial Sequence
  derived and/or modified CDS sequence (opt4) from LASV(G502-SLE-2009;Clade IV)__AIT17126__GPCmut10
augggccagaucgugaccuucuuccaggaggugccccacgugaucgaggaggugaugaacaucgugcugaucgcccugagcauccuggccgugcugaagggccuguacaacuucgccaccugcggccuggugggccugcugaccuuccugcugcugugcggcagaagcugcaccaccggccuguacaagggcguguacgagcugcagacccuggagcugaacauggagacccugaacaugugcaugccccugagcugcaccaagaacaacagccaccacuacaucauggugggcaacgagaccggccuggagcugacccugaccaacaccagcaucaucaaccacaaguucugcaaccugagcgacgcccacaagaagaaccuguacgaccacgcccugaugagcaucaucagcaccuuccaccugagcauccccaacuucaaccaguacgaggccaugagcugcgacuucaacggcggcaagaucagcgugcaguacaaccugagccacagcuacgccggcgacgccgccgaccacugcggcaccguggccaacggcgugcugcagaccuucaugagaauggccuggggcggcagcuacaucgcccuggacagcggcagaggcagaugggacugcaucaugaccagcuaccaguaccugaucauccagaacaccaccugggaggaccacugccaguucagcagacccagccccaucggcuaccugggccugcugagccagagaaccagagacaucuacaucagcagaagacugcugggcaccuucaccuggacccugagcgacagcgagggcaaggacacccccggcggcuacugccugaccagauggaugcugaucgaggccgagcugaagugcuucggcaacaccgccguggccaagugcaacgagaagcacgacgaggaguucugcgacaugcugagacuguucgacuucugcaagcaggccauccagagacugaaggccgaggcccagaugagcauccagcugaucaacaaggccgugaacgcccugaucaacgaccagcuggugaugaagaaccaccugagagacaucaugggcauccccuacugcaacuacagcagauacugguaccugaaccacaccaccaccggcagaaccagccugcccaagugcuggcuggugagcaacggcagcuaccugaacgagacccacuucagcgacgacaucgagcagcaggccgacaacaugaucaccgagaugcugcagaaggaguacauggagagacagggcaagaccccccugggccugguggaccuguucguguucagcaccagcuucuaccugaucagcaucuuccugcaccuggugaagauccccacccacagacacaucgugggcaagagcugccccaagccccacagacugaaccacaugggcaucugcagcugcggccuguacaagcagcccggcgugcccgugaaguggaagagauga

SEQ ID NO: 36639 - RNA, 1476 nt, Artificial Sequence
  derived and/or modified CDS sequence (opt4) from LASV(G733-SLE-2010;Clade IV)__AIT17154__GPCmut10
augggccagaucgugaccuucuuccaggaggugccccacgugaucgaggaggugaugaacaucgugcugaucgcccugagcauccuggccgugcugaagggccuguacaacuucgccaccugcggcaucgugggccuggugagcuuccugcugcugugcggcagaagcugcaccaccagccuguacaagggcguguacgagcugcagacccuggagcugaacauggagacccugaacaugugcaugccccugagcugcaccaagaacaacagccaccacuacaucauggugggcaacgagaccggccuggagcugacccugaccaacaccagcaucaucaaccacaaguucugcaaccugagcgacgcccacaagaagaaccuguacgaccacgcccugaugagcaucaucagcaccuuccaccugagcauccccaacuucaaccaguacgaggccaugagcugcgacuucaacggcggcaagaucagcgugcaguacaaccugagccacagcuacgccggcgacgccgccaaccacugcggcaccaucgccaacggcgugcugcagaccuucaugagaauggccuggggcggcagcuacaucgcccuggacagcggcagagacagaugggacugcaucaugaccagcuaccaguaccugaucauccagaacaccaccugggaggaccacugccaguucagcagacccagccccaucggcuaccugggccugcugagccagagaaccagagacaucuacaucagcagaagacugcugggcaccuucaccuggacccugagcgacagcgagggcaaggacacccccggcggcuacugccugaccagauggaugcugaucgaggccgagcugaagugcuucggcaacaccgccguggccaagugcaacgagaagcacgacgaggaguucugcgacaugcugagacuguucgacuucugcaagcaggccauccagagacugaaggccgaggcccagaugagcauccagcugaucaacaaggccgugaacgcccugaucaacgaccagcugaucaugaagaaccaccugagagacaucaugggcauccccuacugcaacuacagcaaguacugguaccugaaccacaccaccaccggcaagaccagccugcccaagugcuggcuggugagcaacggcagcuaccugaacgagacccacuucagcgacgacaucgagcagcaggccgacaacaugaucaccgagaugcugcagaaggaguacauggagagacagggcaagaccccccugggccugguggaccuguucguguucagcaccagcuucuaccugaucagcaucuuccugcaccuggugaagauccccacccacagacacguggugggcaagagcugccccaagccccacagacugaaccacaugggcaucugcagcugcggccuguacggccagcccggcgugcccgugaaguggaagagauga

SEQ ID NO: 36640 - RNA, 1476 nt, Artificial Sequence
  derived and/or modified CDS sequence (opt4) from MOPV/LASV reassortant(IGS-1;Clade IV)__AFY05576__GPCmut10
augggccagaucgugaccuucuuccaggaggugccccacgugaucgaggaggugaugaacaucgugcugaucgcccugagcgugcuggccgugcugaagggccuguacaacuucgccaccugcggccuggugggccuggugaccuuccugcugcugugcggcagaagcugcaccaccagccuguacaagggcguguacgagcugcagacccuggagcugaacauggagacccugaacaugugcaugccccugagcugcaccaagaacaacagccaccacuacaucauggugggcaacgagaccggccuggagcugacccugaccaacaccagcaucaucaaccacaaguucugcaaccugagcgacgcccacaagaagaaccuguacgaccacgcccugaugagcaucaucagcaccuuccaccugagcauccccaacuucaaccaguacgaggccaugagcugcgacuucaacggcggcaagaucagcgugcaguacaaccugagccacagcuacgccggcgacgccgccaaccacugcggcaccguggccaacggcgugcugcagaccuucaugagaauggccuggggcggcagcuacaucgcccuggacagcggcagaggcaacugggacugcaucaugaccagcuaccaguaccugaucauccagaacaccaccugggaggaccacugccaguucagcagacccagccccaucggcuaccugggccugcugagccagagaaccagagacaucuacaucagcagaagacugcugggcaccuucaccuggacccugagcgacagcgagggcgaggacacccccggcggcuacugccugaccagauggaugcugaucgaggccgagcugaagugcuucggcaacaccgccguggccaagugcaacgagaagcacgacgaggaguucugcgacaugcugagacuguucgacuucugcaagcaggccauccagagacugaaggccgaggcccagaugagcauccagcugaucaacaaggccgugaacgcccugaucaacgaccagcugaucaugaagaaccaccugagagacaucaugggcauccccuacugcaacuacagcaaguacugguaccugaaccacaccaccaccggcagaaccagccugcccaagugcuggcuggugagcaacggcagcuaccugaacgagacccacuucagcgacgacaucgagcagcaggccgacaacaugaucaccgagaugcugcagaaggaguacauggagagacagggcaagaccccccugggccugguggaccuguucguguucagcaccagcuucuaccugaucagcaucuuccugcaccuggugaagauccccacccacagacacaucgugggcaagagcugccccaagccccacagacugaaccacaugggcaucugcagcugcggccuguacaagcagcccggcgugcccgugaaguggaagagauga

SEQ ID NO: 36641 - RNA, 1476 nt, Artificial Sequence
  derived and/or modified CDS sequence (opt4) from LASV(LM765-SLE-2012;Clade IV)__AIT17814__GPCmut10
augggccagaucgugaccuucuuccaggaggugccccacgugaucgaggaggugaugaacaucgugcugaucgcccugagcauccuggccgugcugaagggccuguacaacuucgccaccugcggccuggugggccuggugaccuuccugcugcugugcggcagaagcugcaccaccagccuguacaagggcguguacgagcugcagacccuggagcugaacauggagacccugaacaugugcaugccccugagcugcaccaagaacaacagccaccacuacaucauggugggcaacgagaccggccuggagcugacccugaccaacaccagcaucaucgaccacaaguucugcaaccugagcgacgcccacagaaagaaccuguacgaccacgcccugaugagcaucaucagcaccuuccaccugagcauccccaacuucaaccaguacgaggccaugagcugcgacuucaacggcggcaagaucagcgugcaguacaaccugagccacagcuacgccaaggacgccgccgaccacugcggcaccguggccaacggcgugcugcagaccuucaugagaauggccuggggcggcagcuacaucgcccuggacagcggcagaggcagaugggacugcaucaugaccagcuaccaguaccugaucauccagaacaccaccugggaggaccacugccaguucagcagacccagccccaucggcuaccugggccugcugagccagagaaccagagacaucuacaucagcagaagacugcugggcaccuucaccuggacccugagcgacagcgagggcaaggacacccccggcggcuacugccugaccagauggaugcugaucgaggccgagcugaagugcuucggcaacaccgccguggccaagugcaacgagaagcacgacgaggaguucugcgacaugcugagacuguucgacuucugcaagcaggccauccagagacugaaggccgaggcccagaugagcauccagcugaucaacaaggccgugaacgcccugaucaacgaccagcugaucaugaagaaccaccugagagacaucaugggcauccccuacugcaacuacagcaaguacugguaccugaaccacaccaccaccggcaagaccagccugcccaagugcuggcuggugagcaacggcagcuaccugaacgagacccacuucagcgacgacaucgagcagcaggccgacaacaugaucaccgagaugcugcagaaggaguacauggagagacagggcaagaccccccugggccugguggaccuguucguguucagcaccagcuucuaccugaucagcaucuuccugcaccuggugaagauccccacccacagacacaucgugggcaagcccugccccaagccccacagacugaaccacaugggcaucugcagcugcggccuguacaagcagcccggcgugcccgugaaguggaagagauga

SEQ ID NO: 36642 - RNA, 1476 nt, Artificial Sequence
  derived and/or modified CDS sequence (opt4) from LASV(LM776-SLE-2012;Clade IV)__AIT17824__GPCmut10
augggccagaucgugaccuucuuccaggaggugccccacgugaucgaggaggugaugaacaucgugcugaucgcccugagcauccuggccgugcugaagggccuguacaacuucgccaccugcggccuggugggccuggugaccuuccugcugcugugcggcagaagcugcaccaccagcguguacaagggcguguacgagcugcagacccuggagcugaacauggagacccugaacaugugcaugccccugagcugcaccaagaacaacagccaccacuacaucauggugggcaacgagaccggccuggagcugacccugaccaacaccagcaucaucaaccacaaguucugcaaccugagcgacgcccacaagaagaaccuguacgaccacgcccugaugagcaucaucagcaccuuccaccugagcauccccaacuucaaccaguacgaggccaugagcugcgacuucaacggcggcaagaucagcgugcaguacaaccugagccacagcuacgccggcgacgccgccaaccacugcggcaccguggccaacggcgugcugcagaccuucaugagaauggccuggggcggcagcuacaucgcccuggacagcggccacggcaagugggacugcaucaugaccagcuaccaguaccugaucauccagaacaccaccugggaggaccacugccaguucagcagacccagccccaucggcuaccugggccugcugagccagagaaccagagacaucuacaucagcagaagacugcugggcaccuucaccuggacccugagcgacagcgagggcaaggacacccccggcggcuacugccugaccagauggaugcugaucgaggccgagcugaagugcuucggcaacaccgccguggccaagugcaacgagaagcacgacgaggaguucugcgacaugcugagacuguucgacuucugcaagcaggccauccagagacugaaggccgaggcccagaugagcauccagcugaucaacaaggccgugaacgcccugaucaacgaccagcugaucaugaagaaccaccugagagacaucaugggcauccccuacugcaacuacagcaaguacugguaccugaaccacaccaccaccggcaagaccagccugcccaagugcuggcuggugagcaacggcagcuaccugaacgagacccacuucagcgacgacaucgagcagcaggccgacaacaugaucaccgagaugcugcagaaggaguacauggagagacagggcaagaccccccugggccugguggaccuguucguguucagcaccagcuucuaccugaucagcaucuuccugcaccuggugaagauccccacccacagacacaucgugggcaagagcugccccaagccccacagacugaaccacaugggcaucugcagcugcggccuguacaagcagcccggcgugcccgugagauggaagagauga

SEQ ID NO: 36643 - RNA, 1476 nt, Artificial Sequence
  derived and/or modified CDS sequence (opt4) from LASV(Mad39;Clade IV)__ANH09722__GPCmut10
augggccagaucgugaccuucuuccaggaggugccccacgugaucgaggaggugaugaacaucgugcugaucgcccugagcauccuggccgugcugaagggccuguacaacguggccaccugcggccugaucggccuggugaccuuccugcugcugugcggcagaagcugcaccaccacccuguacaagggcguguacgagcugcaggcccuggagcugaacauggagacccugaacaugugcaugccccugagcugcaccaagaacaacagccaccacuacaucagagugggcaacgagaccggccuggagcugacccugaccaacaccagccugaucaaccacaaguucugcaaccugagcgacgcccacaagaagaaccuguacgaccacgcccugaugagcaucaucagcaccuuccaccugagcauccccaacuucaaccaguacgaggccaugagcugcgacuucaacgacggcaagaucagcgugcaguacaaccugagccacaccuacgccggcgacaccgccaaccacugcggcaccguggccaacggcgugcugcagaccuucaugagaauggccuggggcggcagcuacaucgcccuggacagcggcagaggcggcugggacugcaucaugaccagcuaccaguaccugaucauccagaacaccaccugggaggaccacugccaguucagcagacccagccccaucggcuaccugggccugcugagccagagaaccagagacaucuacaucagcagaagacugcugggcaccuucaccuggacccugagcgacagcgagggcaaggacacccccggcggcuacugccugaccagauggaugcugaucgaggccgagcugaagugcuucggcaacaccgccguggccaagugcaacgagaagcacgacgaggaguucugcgacaugcugagacuguucgacuucugcaagcaggccauccagagacugaaggccgaggcccagaugagcauccagcugaucaacaaggccgugaacgcccugaucaacgaccagcugaucaugaagaaccaccugagagacaucaugggcauccccuacugcaacuacagcaaguacugguaccugaaccacaccgugaccggcaagaccagccugcccaagugcuggcuggugagcaacggcagcuaccugaacgagacccacuucagcgacgacaucgagcagcaggccgacaacaugaucaccgagaugcugcagaaggaguacauggagagacagggcaagaccccccugggccugguggaccuguucguguucagcaccagcuucuaccugaucagcaucuuccugcaccuggugaagauccccacccacagacacguggugggcaagcccugccccaagccccacagacugaaccacaugggcaucugcagcugcggcuucuacaagcagcccggcgugcccgugagauggaagagauga

SEQ ID NO: 36644 - RNA, 1476 nt, Artificial Sequence
  derived and/or modified CDS sequence (opt4) from LASV(Z0947-SLE-2011;Clade IV)__AIT17840__GPCmut10
augggccagaucgugaccuucuuccaggaggugccccacgugaucgaggaggugaugaacaucgugcugaucgcccugagcauccuggccgugcugaagggccuguacaacuucgccaccugcggccuggugggccuggugaccuuccugcugcugugcggcagaagcugcaccaucagccuguacaagggcguguacgagcugcagacccuggagcugaacauggagacccugaacaugugcaugccccugagcugcaccaagaacaacagccaccacuacaucauggugggcaacgagaccggccuggagcugacccugaccaacaccagcaucaucaaccacaaguucugcaaccugagcgacgcccacaagaagaaccuguacgaccacgcccugaugagcaucaucagcaccuuccaccugagcauccccaacuucaaccaguacgaggccaugagcugcgacuucaacggcggcaagaucagcgugcaguacaaccugagccacagcuacgccggcgacgccgccaaccacugcggcaccguggccaacggcgugcugcagaccuucaugagaauggccuggggcggcagcuacaucgcccuggacagcggcagagacagaugggacugcaucaugaccagcuaccaguaccugaucauccagaacaccaccugggaggaccacugccaguucagcagacccagccccaucggcuaccugggccugcugagccagagaaccagagacaucuacaucagcagaagacugcugggcaccuucaccuggacccugagcgacagcgagggcaaggacacccccggcggcuacugccugaccagauggaugcugaucgaggccgagcugaagugcuucggcaacaccgccguggccaagugcaacgagaagcacgacgaggaguucugcgacaugcugagacuguucgacuucugcaagcaggccauccagagacugaaggccgaggcccagaugagcauccagcugaucaacaaggccgugaacgcccugaucaacgaccagcugaucaugaagaaccaccugagagacaucaugggcauccccuacugcaacuacagcaaguacugguaccugaaccacaccaccaccggcaagaccagccugcccaagugcuggcuggugagcaacggcagcuaccugaacgagacccacuucagcgacgacaucgagcagcaggccgacaacaugaucaccgagaugcugcagaaggaguacauggagagacagggcaagaccccccugggccugguggaccuguucguguucagcaccagcuucuaccugaucagcaucuuccugcaccuggugaagauccccacccacagacacaucgugggcaagcccugccccaagccccacagacugaaccacaugggcaucugcagcugcggccuguacaagcagcccggcgugcccgugaaguggaagagauga

SEQ ID NO: 36645 - RNA, 1476 nt, Artificial Sequence
  derived and/or modified CDS sequence (opt5) from LASV(Josiah;Clade IV)__NP_694870__GPCmut10
augggccagaucgugaccuucuuucaagaggucccccacguuauugaagaggugaugaacaucgugcugauugcccucagcguccuggcugugcuuaaggggcuguacaauuucgccacaugcggacucguuggccuggugacguuucuucugcucugugggagauccugcaccacaucucuguauaaaggagucuacgaacugcagacccucgagcugaacauggaaacacuuaauauguguaugccucugagcugcaccaagaacaauucccaucacuauaucauggugggcaacgagacagggcucgagcugacccuuacgaauaccucuauuaucaaccauaaauucuguaaucugagcgacgcgcacaagaaaaaccucuacgaucaugcucugauguccaucauuucuacauuucaccugagcaucccgaauuucaaccaguaugaagccauguccugcgacuuuaauggaggcaagauuagcguucaguacaaccucucucacuccuaugccggcgaugcugccaaucauugugggaccguggcuaacggaguccugcaaacauucaugcggauggccuggggcgggagcuacaucgcgcuugacucuggacgcggcaacugggauugcauuaugaccuccuaccaguaucugaucauucagaauacgacaugggaggaccacugucaguuuagcagacccucuccuaucggguaccucggacugcuuucccaacggacccgcgauaucuauauuagcagacggcugcucggcacauucaccuggacccuguccgacucugaaggcaaggauacacccgggggauacugccugacgcgcuggaugcucaucgaggccgagcugaaauguuuuggcaacaccgcuguggccaagugcaaugaaaaacaugacgaggaguucugcgauaugcuuagacuguuugacuucuguaagcaggcuauucagcggcucaaagccgaagcgcagaugagcauccaacugauuaacaaggccgugaaugcucuuaucaacgaucagcugaucaugaagaaucaccuccgcgacauuauggggaucccuuauugcaacuacuccaaauauugguaccugaaucacacaaccacaggaagaaccagccugcccaaguguuggcucgucucuaacggcuccuaccugaaugaaacgcauuucagcgacgauauugagcagcaagccgacaacaugaucacagagaugcuucagaaagaauauauggagcggcaggggaagaccccucugggacucguugaucuguuuguguucucuaccagcuuuuaccugauuuccaucuuccuucaccucgugaaaaucccgacacaucgccacauugucggcaagucuugccccaaaccucauagacugaaucacaugggcaucuguagcugcgggcuguauaagcagcccggagugccuguuaaguggaaacgguga

SEQ ID NO: 36646 - RNA, 1473 nt, Artificial Sequence
  derived and/or modified CDS sequence (opt5) from LASV(LP;Clade I)__AAF86701__GPCmut10
augggccagaucauuaccuucuuucaagaggugccccacgucaucgaagagguuaugaacauugugcugaucgcccucagccugcuugcuauucugaaggggcucuacaauaucgccacaugcggaaucauuggccugguggcguuccuuuuucugugugggaaauccugcucucucacgcugaagggaggcuaugaacugcagacccucgagcugaacauggaaacacuuaauauguguaugccucugagcugcaccaaaaacuccucucaucacuacaucagagucgggaaugagacaggacucgagcugacccuuacaaacaccagcauuaucaaucauaaguucuguaaccuguccgacgcucacaaaaagaaucucuaugaucaugcccugaugucuauuaucagcacguuucaccuguccauuccgaacuucaaucaguacgaagccaugagcugcgacuuuaacggcggcaagaucucugugcaguauaaucucucccacagcuacgcuggggaugccgcugagcauuguggaaccguugccaacggcgugcugcaaacauucaugcggauggcguggggagggcgcuauaucgcccuugacucuggcaaagggaauugggauugcauuaugaccuccuaccaguaccugaucauucagaacacaaccugggaagaccacugucaguuuagcagacccucuccuaucggauaucucggccugcuuucccaacggacgcgcgauauuuacaucagcagacggcugcucggcacauucaccuggacacuguccgacucugaggggaacgagacccccggaggcuauugccugacccgcuggaugcucaucgaagcugagcugaaguguuuugggaauacagccgucgcuaaaugcaacgaaaagcaugaugaggaguucugcgacaugcuuagacuguuugauuucuguaaacaggccauucggcgccucaaggcggaagcccagaugagcauccagcugauuaauaaggcugugaacgcccuuaucaaugaccaacugauuaugaaaaaccaccucagagauaucaugggaaucccuuacugcaauuauuccaaguacugguaucugaaccacacgagcucuggccggaccucccugcccaaauguuggcucauuagcaaugggucuuaccugaacgagacacaguucagcgacgacaucgaacagcaagcugauaauaugauuaccgagaugcuucagaaggaauacaucgagcgccagggaaaaacaccucugggccucguugacauuuuuaucuucuccaccucuuuuuaucugauuagcaucuuccugcaucuuaucaagauuccgacgcacagacauaucgugggcaaacccugcccuaagccccaccggcucaaccauaugggggucuguuccugcggacuguacaagcacccuggcgugcccacaaaauggaagcgcuga

SEQ ID NO: 36647 - RNA, 1473 nt, Artificial Sequence
  derived and/or modified CDS sequence (opt5) from LASV(803213;Clade II)__AAF86703__GPCmut10
augggccagaucauuaccuucuuucaagaggugccccacgucaucgaagagguuaugaacauugugcugaucgcccucagccugcuugcuauucugaaggggaucuacaauguggccacaugcggacucuucggccugaucuccuuucuucugcucugugggagaucuugcagcgucacguauaaaggaguguacgaacugcagacccuggagcucaacauggcgaaucugaacauguguaugccucuuuccugcacaaagaauaacucucaucacuauauuaugguuggcaaugaaaccgggcuggagcucacacugaccaacacaagcaucauuaaucauaaauucuguaaccuuuccgacgcucacaagaaaaaucuguacgaucaugcccucaugucuaucauuagcaccuuucaccuguccaucccgaacuucaaucaguaugaggccaugagcugcgacuuuaacggaggcaagauuucugugcaguacaaucugucccacagcuucgcugucgaugccgcuaaccauuguggcacgaucgccaacggggugcuccaaaccuuuaugcggauggcguggggaggcucuuauaucgcccuggacuccgggaagggaaauugggauugcauuaugacaagcuaccaguaccuuaucauucagaacaccacaugggaagaccacugucaguucucucgccccuccccuaucggcuaucuggggcuccugagccaaagaacccgggauauuuacaucucccgcagacuucugggaacguuuacauggacccucucugacagcgagggcaaugaagcucccggcggguauugccugacacgguggaugcugaucgaggccgagcucaaauguuucggaaacaccgcuguugccaagugcaaugaaaaacaugaugaggaauuuugcgacaugcugcgccuuuucgauuucuguaagcaggcgauuaaaagacugaagaccgaggcccagauguccauccagcucauuaacaaggcugugaaugcccugaucaacgaccaacuuauuaugaaaaaucaucugcgggauaucaugggcaucccuuacugcaacuauagccgcuacugguaucucaaucacacagucacggggaagaccucucugcccagauguuggcugguguccaacggaagcuaccucaaugaaacacacuuuucugacgacauugagcagcaggcugauaacaugaucaccgagaugcugcaaaaagaauacauggaccggcagggcaagacaccucuugggcugguggaucucuucgucuuuagcaccuccuucuaucugauuucuaucuuucugcaccuuguuaaaauuccgacgcaucgccacaucgugggaaagcccugcccuaaaccccauagacucaaucacaugggcauuuguagcugcggccuguacaagcacccuggggugcccgucaaguggaaacgguga

SEQ ID NO: 36648 - RNA, 1473 nt, Artificial Sequence
  derived and/or modified CDS sequence (opt5) from LASV(GA391;Clade III)__CAA36645__GPCmut10
augggccagaucgugaccuucuuucaagaggucccccacguuauugaagaggugaugaacaucgugcugauugcccucagcauccuggcuauucuuaaggggcuguacaaugucgccacaugcggacucaucggccuggugacguuccuucugcucuccgggagaucuuguagccugaucuauaaaggaaccuacgaacugcagacacucgagcugaacauggaaacccuuaauaugugcaugccucuguccuguacaaagaacaauucucaucacuauauucggguuggcaacgagaccgggcucgagcugacacuuaccaauacgagcauccugaaccauaaauuuugcaaucucuccgacgcgcacaagcgcaaccuguacgaucauucucugaugagcauuaucuccaccuuccaccucagcauuccgaauuuuaaccaguaugaagcuaugucuugugacuucaauggaggcaaaaucacagugcaguacaaccugucccacagcuuugccgucgaugccgcuggccauugcgggacccuugccaauggagugcugcaaacauucaugagaauggcuuggggcgggucuuauauugcccucgacuccggacggggcaacugggauuguaucaugaccagcuaccaguaccugaucauucagaacacgacaugggacgaucacugccaguuuucucgccccuccccuaucggguaucuuggacugcucagccaaagaacccgggacauuuacaucucccgcagacugcugggcacauucaccuggacccucucugauagcgagggcaaugaaacacccgggggauauugucugacgcgguggaugcuuauugaggcggagcugaagugcuuuggcaacaccgccguugcuaaguguaaugaaaaacaugacgaggaguucugcgauaugcuccgccuguuugacuucugcaagcaggccaucagacggcuuaaaacagaagcucagauguccauccagcugauuaacaaggccgugaaugcgcucaucaacgaucaacugauuaugaaaaaucaucugcgcgacaucauggggauuccuuacuguaacuauagcagauacugguaucucaaucacaccucuacaggaaagaccucccugccccggugcuggcuuaucagcaacggcucuuaccugaaugaaacgaaguucagcgacgauaucgagcagcaggccgacaacaugauuacagagaugcuccaaaaagaauacaucgaucgccaggggaagaccccucugggacuggucgaccuuuuuguguucuccaccucuuuuuaucucauuagcaucuuccugcaccuggugaaaauuccgacacacagacauaucgucggcaagcccuguccuaaaccccaccggcucaaucauaugggcauuugcuccugugggcuguacaagcagccuggaguucccgugagauggaaacgcuga

SEQ ID NO: 36649 - RNA, 1476 nt, Artificial Sequence
  derived and/or modified CDS sequence (opt5) from LASV(AV;Clade V)__CCA30314__GPCmut10
augggccagaucgugaccuucuuucaagaggucccccacguuauugaagaggugaugaacaucgugcugauugcccucagcauccuggcuguccuuaaggggcuguacaauauugccacaugcggacucaucggccugaucacguuccuucugcucugugggagauccugcucuagcaaccuguauaaaggaguguacgaacugcagucccucgaccugaauauggagacccuuaacauguguaugccucugucuugcacaaagaauaacagccaucacuauauucggguuggcaaugauaccgggcucgaacugacacuuaccaacacauccauccugaaucauaaauuuuguaaccucucugacgcgcacaagaaagaucuguacgaccaugcucugaugagcauuaucuccaccuuccaccucagcauuccgaauuuuaaccaguaugaggccaugucuugcgauuucaauggaggcaagaucuccgugcaguacaaccugagccacucuuaugccauugacgcugccaaucauuguggcacggucgcuaacgggauccuucaaaccuuuaugcgcauggccuggggaggcuccuacaucgcgcuggauagcgggagaggaaacugggacugcauuaugacaucuuaccaguaucucaucauucagaauaccacaugggagaaccacugucaguucucccggcccagcccuaucggcuaccuggggcuucugucccaacgcaccagagauauuuauaucucucggcgccuccugggaacguuuacauggacccugagcgacuccgaaggcaaugccacacccggcggguacugccucaccagauggaugcugaucgaggcugaacuuaaguguuucggaaacaccgccguggcuaaaugcaaugagaagcaugaugaggaauuuugcgacaugcugcgccucuucgauuuuuguaaacaggccauuagccggcugaagucugaggcgcagauguccauccagcuuauuaacaaagccguuaaugcucugaucaacgaccaacucauuaugaagaaucaccugagagacaucaugggcaucccuuauugcaacuacagcaaguauugguaccugaaucacacaauuacggggaaaaccucucuccccaaguguuggcuggugagcaacggauccuaccuuaaugaaacacauuucucugaugacaucgagcagcaggccgauaacaugauuaccgaaaugcugcaaaaagaguauauggagcggcagggcaagacaccucucgggcuggucgaccuguucguguuuagcaccuccuucuaccuuaucagcauuuuucuccgccuggugaaaaucccgacgcacagacauauugucggaaagcccugcccuaaaccccaccggcugaaucauaugggcaucuguucuugcggccucuauaagcagccugggguucccgugcgcuggaagagauga

SEQ ID NO: 36650 - RNA, 1473 nt, Artificial Sequence
  derived and/or modified CDS sequence (opt5) from LASV(Togo/2016/7082;Clade VI)__AMR44577__GPCmut10
augggccagaucauuaccuucuuucaagaggugccccacgucaucgaagagguuaugaacauugugcugaucgcccucagccugcuugcuauucugaaggggguguacaaugucgccacaugcggaaucaucggccucgugacguuccuguuucuuugugggagauccugcucucugauuuauaaaggaagcuacgaacuccagacccuggagcugaacauggaaacacucaauauguguaugccucuguccugcaccaagaacucuagccaucacuauauccggguuggcaaugagacagggcuugagcugacccucacaaacaccuccauuaucaaucauaaauucuguaaccugucugacgcgcacaagcgcaaucuuuacgaucaugcucugaugagcauucucuccacguuucaccugagcaucccgaacuucaaucaguaugaagccaugucuugcgacuuuaacggaggcaaaauuuccgugcaguacaaucugagccacgccuaugcugucgaugccgcugagcauuguggcaccguggccaacgggguucuccaaacauucaugagaauggcguggggaggcucuuacaucgcccuggacuccgggcggggaaauugggauugcaucaugaccagcuaccaguaucuuauuauccagaacacaaccugggaagaccacugucaguuuucucgccccuccccuauuggcuaccuggggcuccugagccaaagaacgcgggauaucuauauuucccgcagacuucugggaacauucaccuggacacucucugacagcgagggcaacgagacccccggcggguacugccugacccgguggaugcugaucgaagcugagcucaaguguuuuggaaauacagccguggcuaagugcaacgaaaaacaugaugaggaguucugcgacaugcugcgccuuuuugauuucuguaagcaggccauccagagacugaaauccgaagcgcagaugagcauucaacucaucaauaaggccgucaacgcucugauuaaugaccagcuuaucaugaaaaaccaucugcgggauaugaugggcauuccuuauugcaauuacucuaaguauugguaccucaaccacacguccagcgggcgcaccucucugcccaaguguuggcuggugagcaauggauccuaccucaacgagacacacuucucugacgacaucgaacagcaagccgauaauaugaucaccgagaugcugcagaaagaauauauugacagacagggcaagacaccucuugggcugguggaucucuuugucuucagcaccuccuuuuaccugaucagcauuuuccugcaccuuaucaaaauuccgacgcaucggcacaucguuggaaagcccugcccuaaaccccaucgccucaaccacaugggcauuuguucuugcggccuguauaagcagccuggggugcccacaagauggaaacgguga

SEQ ID NO: 36651 - RNA, 1473 nt, Artificial Sequence
  derived and/or modified CDS sequence (opt5) from LASV(KAK-428;Clade n.d. (VII))__ANH09740__GPCmut10
augggccagaucgugaccuucuuucaagaggucccccacguuauugaagaggugaugaacaucgugcugauugcccucagccugcuugcuauccugaaggggcucuacaauuucgccacaugcggagucauuggccugaucacguuucuucugcucugugggagauccugcucugcgaccuauaaaggacaguacgaacugcagacacuggagcucaacauggaaagccugaauauguguaugccucuuuccugcaccaagaacaauucucaucacuauauccgggcuggcaacaauacagggcuggagcucacccugacaaacaccagcauuaucucccauaaauucuguaaucuuucugacgcccacaagaaaaaccuguacgaucauacgcucaugagcauuaucaccacauuucaccuguccauuccgaauuucaaccaguaugaggccaugagcugcgacuuuaauggaggcaagaucucuauucaauacaaccugucccacagcuaugcuggcgaugccgcucagcauugugggaccguggccaauggaguucuccagacauucaugcgcauggcguggggcgggucuuaccuggcccuugacuccggaagacggggcugggauugcaucaucagcucuuaccaguaucugauuauccaaaacaccacgugggacgaucacugucaguuuucccgccccagcccuauuggguaccucggauucgugucccagaagacaagagacaucuauauuucucggcgccugcuuggcaccuuuacauggacccugagcgauuccgaaggccaugacaugcccgggggauacugccucaccagauggaugcugaucgaggcugaucugaaauguuucggcaacacagccgucgcuaagugcaaugaaaaacacgacgaggaguuuugcgauauguggcgccucuucgacuucuguaagcaggccauccaacggcugaaagcggaagcccagaugaacauucagcuuaucaauaaggcugugaacgcccugauuaaugaccaacucaugaugaagaaccaccugagagauaucauggggauuccuuauugcaauuacagcaaauuuugguaucuuaacaauacgaccacaggacggaccucucugccccgcuguuggcucaucuccaacggcagcuaccugaaugagacacauuucucugacgauaucgaacagcaggcugacaacaugauuaccgagaugcugcagaaggaauacauggauagacaagggaaaacgccucucggacugguugaccuuuuuguguucagcacauccuuuuaucugaucaccauuuuccuccaccuggucaagaucccgacccaucggcacauugugggcaaacccugcccuaagccccaucgccugaaucacaugggcaucuguucuugcgggcuuuacaaacagccuggagugcccgucagauggaagcgguga

SEQ ID NO: 36652 - RNA, 1473 nt, Artificial Sequence; identical to SEQ ID NO: 36646
  derived and/or modified CDS sequence (opt5) from LASV(Pinneo-NIG-1969;Clade I)__AIT17836__GPCmut10

SEQ ID NO: 36653 - RNA, 1473 nt, Artificial Sequence
  derived and/or modified CDS sequence (opt5) from LASV(ISTH0009-NIG-2011;Clade II)__AIT17404__GPCmut10
augggccagaucauuaccuucuuucaagaggugccccacgucaucgaagagguuaugaacauugugcugaucgcccucagccugcuugcuauucugaaggggaucuacaauguggccacaugcggacucuucggccuggucuccuuucuucugcucugugggagaucuugcagcacgaccuauaaaggaguguacgaacugcagacacuggagcucgacauggcgucccugaacauguguaugccucuuucuugcaccaagaauaacagccaucacuauaucaugguuggcaaugaaacagggcuggagcucacccugacaaacaccuccauuaucaaucauaaauucuguaaccuuucugaugcucacaagaaaaaucuguacgaccaugcccucaugagcauuaucuccacguuucaccugagcauuccgaacuucaaucaguaugaggccaugucuugcgauuuuaacggaggcaagaucuccgugcaguacaaucugagccacgcuuaugccgucgacgcugccaaccauuguggcaccauugcgaauggggugcuccaaacauucaugcggauggccuggggaggcucuuacaucgcucuggauuccgggaagggaagcugggacugcaucaugaccucuuaccaguaucuuauuauccagaacacaaccugggaagaucacugucaguuuucccgccccagcccuauuggcuaccuggggcuccugucccaaagaacgcgggacaucuauauuucucgcagacuucugggaacauucaccuggacacucagcgauuccgagggcaacgaaacccccggcggguacugccugacccgguggaugcugaucgaggccgagcucaaauguuuuggaaauacagcuguugccaagugcaacgaaaaacaugacgaggaguucugcgauaugcugcgccuuuuugacuucuguaagcaggcgaucagacggcugaaaacggaagcccagaugagcauucagcucaucaauaaggcugugaacgcccugauuaaugaucaacuuaucaugaagaaccaucugcgcgacauuaugggcaucccuuauugcaauuacucuaaauauugguaccucaaccacaccgucacagggaagaccucccugcccagauguuggcuggugagcaauggaucuuaccucaacgaaacacacuucagcgacgauaucgagcagcaggcugacaauaugauuaccgagcugcuucaaaaagaauauauggaucggcagggcaagacgccucuggggcucguggaccuguuugucuucuccacaucuuuuuaccugaucagcauuuuccuucaccucaucaaaauuccgacccaucgccacaucaccggaaagcccugcccuaaaccccauagacugaaccacaugggcauuuguuccugcggccuguauaagcacccugggguucccgugaaguggaaacgguga

SEQ ID NO: 36654 - RNA, 1473 nt, Artificial Sequence
  derived and/or modified CDS sequence (opt5) from LASV(ISTH2010-NIG-2012;Clade II)__AIT17482__GPCmut10
augggccagaucauuaccuucuuucaagaggugccccacgucaucgaagagguuaugaacauugugcugaucgcccucagccugcuugcuauucugaaggggaucuacaauguggccacaugcggacucuucggccuggucuccuuucuucugcucugugggagaucuugcagcacgaccuauaaaggaguguacgaacugcagacacuggagcucgacauggcgucccugaacauguguaugccucuuucuugcaccaagaauaacagccaucacuauaucaugguuggcaaugaaacagggcuggagcucacccugacaaacaccuccauuaucaaucauaaauucuguaaccuuucugaugcucacaagaaaaaucuguacgaccaugcccucaugagcauuaucuccacguuucaccugagcauuccgaacuucaaucaguaugaggccaugucuugcgauuuuaacggaggcaagaucuccgugcaguacaaucugagccacgcuuaugccgucgacgcugccaaccauuguggcaccauugcgaauggggugcuccaaacauucaugcggauggccuggggaggcucuuacaucgcucuggauuccgggaagggaagcugggacugcaucaugaccucuuaccaguaucuuauuauccagaacauuacaugggaagaucacugucaguuuucccgccccagcccuaucggcuaccuggggcuccugucccaaagaacccgggacauuuauaucucucgcagacuucugggaacguucacauggacccucagcgauuccgagggcaacgaaacacccggcggguacugccugacccgguggaugcugaucgaggccgagcucaaauguuuuggaaauaccgcuguugccaagugcaacgaaaaacaugacgaggaguucugcgauaugcugcgccuuuuugacuucuguaagcaggcgauuagacggcugaaaacagaagcccagaugagcauccagcucauuaauaaggcugugaacgcccugaucaaugaucaacuuauuaugaagaaccaucugcgcgacaucaugggcaucccuuauugcaauuacucuaaauauugguaccucaaccacacggucaccgggaagacaucccugcccagauguuggcuggugagcaauggaucuuaccucaacgaaacccacuucagcgacgauauugagcagcaggcugacaauaugaucacagagcugcuucaaaaagaauauauugaucggcagggcaagaccccucuggggcucguggaccuguuugucuucuccacgucuuuuuaccugaucagcauuuuccuucaccucguuaaaaucccgacacaucgccacguggugggaaagcccugcccuaaaccccauagacugaaccacaugggcauuuguuccugcggccuguauaagcacccugggguccccgugaaguggaaacgguga

SEQ ID NO: 36655 - RNA, 1473 nt, Artificial Sequence
  derived and/or modified CDS sequence (opt5) from LASV(Lassa virus/H.sapiens-wt/NGA/2015/ISTH_0543;Clade II)__AVO03639__GPCmut10
augggccagaucauuaccuucuuucaagaggugccccacgucaucgaagagguuaugaacauugugcugaucgcccucagccugcuugcuauucugaaggggaucuacaauguggccacaugcggacucuucggccuggucuccuuucuucugcucugugggagaucuugcagcacgaccuauaaaggaguguacgaacugcagacacuggagcucgacauggcgaaccugaauauguguaugccucuuuccugcaccaagaacaauucucaucacuauaucaugguuggcaacgaaacagggcuggagcucacccugacaaauaccagcauuaucaaccauaaauucuguaaucuuuccgaugcucacaagaaaaaccuguacgaccaugcccucaugucuauuaucagcacguuucaccuguccauuccgaauuucaaccaguaugaggccaugagcugcgauuuuaauggaggcaagaucucugugcaguacaaccugucccacaccuaugcugucgacgccgcuaaucauuguggcacaauugccaacggggugcuccaaaccuucaugcggauggcguggggaggcagcuacaucgcccuggauucugggaagggauccugggacugcaucaugacaagcuaccaguaucuuguuauucagaacaccacgugggaagaucacugucaguuuucucgccccuccccuaucggcuaccuggggcuccugagccaaagaacacgggacauuuauaucucccgcagacuucugggaaccuucacauggacccucucugauagcgagggcaaugaaacccccggcggguacugccugacacgguggaugcugauugaggcugagcucaaauguuuuggaaacacggccguggcuaagugcaaugaaaaacaugacgaggaguucugcgauaugcugcgccuuuuugacuucuguaagcaggccaucagacggcugaaaaccgaagcgcagauguccauccagcucauuaacaaggccgucaaugcucugaucaacgaucaacuuauuaugaagaaucaucugcgcgacaucaugggcauuccuuauugcaacuacagcaaauauugguaccucaaucacacagugaccgggaagacaucucugcccagauguuggcugguguccaacggaagcuaccucaaugaaacccacuucucugacgauaucgagcagcaggccgacaacaugaucacggagcugcuucaaaaagaauauauugaucggcagggcaagacaccucuggggcucgucgaccuguuuguuuucagcaccuccuuuuaccugaucucuauuuuccuucaccucgugaaaaucccgacccaucgccacauuacaggaaagcccugcccuaaaccccauagacugaaucacaugggcaucuguagcugcggccuguauaagcacccuggggugcccgucaaguggaaacgguga

SEQ ID NO: 36656 - RNA, 1473 nt, Artificial Sequence
  derived and/or modified CDS sequence (opt5) from LASV(Lassa virus/H.sapiens-wt/NGA/2016/ISTH_0009;Clade II)__AVO03571__GPCmut10
augggccagaucauuaccuucuuucaagaggugccccacgucaucgaagagguuaugaacauugugcugaucgcccucagccugcuugcuauucugaaggggaucuacaauguggccacaugcggacuccugggccuugucuccuuccugcuccugugugggagaucuugcagcacgaccuauaaaggaguguacgaacugcagacacucgagcuggacauggcgucccuuaacauguguaugccucugucuugcaccaagaauaacagccaucacuauaucaugguuggcaaugaaacagggcucgagcugacccuuacaaacaccuccauuaucaaucauaaauuuuguaaccugucugaugcucacaagaaaaaucucuacgaccaugcccugaugagcauuaucuccacguuccaccugagcauuccgaacuuuaaucaguaugaggccaugucuugcgauuucaacggaggccggaucuccgugcaguacaaucucagccacucuuaugcugucgacgccgcuaaccauuguggcaccauugccaauggggugcugcaaacauuuaugcgcauggcguggggaggcuccuacaucgcccuugauagcgggaagggaucuugggacugcaucaugaccuccuaccaguaucugauuauccagaacacaaccugggaagaucacugucaguucagcagacccuccccuauuggcuaccucgggcugcuuucucaacggacgcgcgacaucuauauuagcagacggcugcucggaacauuuaccuggacacuguccgauagcgagggcaacgaaacccccggcggguacugccugacccgcuggaugcucaucgaggcugagcugaaguguuucggaaauacagccguugcuaaaugcaacgaaaagcaugacgaggaauuuugcgauaugcuuagacuguucgacuuuuguaaacaggccauccggcgccucaagacggaggcgcagaugucuauucagcugaucaauaaagccgugaacgcucuuauuaaugaucaacugaucaugaagaaccaccucagagacauuaugggcaucccuuauugcaauuacuccaaguauugguaccugaaccacaccgucacagggaaaaccagccugccccgguguuggcucgugucuaauggaagcuaccugaacgaaacacauuucuccgacgauaucgagcagcaggccgacaauaugauuaccgagcuucugcaaaaggaauauaucgaucgccagggcaaaacgccucucgggcugguggaccuguucgucuuuucuaccagcuucuaccuuauuuccaucuuucuccaccugguuaagauuccgacacauagacacaucaccggaaaacccugcccuaagccccaucggcugaaccacaugggcauuuguagcugcggccucuauaaucacccuggggugcccgugaaauggaagcgcuga

SEQ ID NO: 36657 - RNA, 1473 nt, Artificial Sequence
  derived and/or modified CDS sequence (opt5) from LASV(Lassa virus/H.sapiens-wt/NGA/2016/ISTH_0017;Clade II)__AVO03567__GPCmut10
augggccagaucauuaccuucuuucaagaggugccccacgucaucgaagagguuaugaacauugugcugaucgcccucagccugcuugcuauucugaaggggaucuacaauguggccacaugcggacucuucggccuggucuccuuucuucugcucugugggagaucuugcagcacgaccuauaaaggaguguacgaacugcagacacuggagcucgacauggcgucccugaacauguguaugccucuuucuugcaccaagaauaacagccaucacuauaucaugguuggcaaugaaacagggcuggagcucacccugacaaacaccuccauuaucaaucauaaauucuguaaccuuucugaugcucacaagaaaaaucuguacgaccaugcccucaugagcauuaucuccacguuucaccugagcauuccgaacuucaaucaguaugaggccaugucuugcgauuuuaacggaggcaagaucuccgugcaguacaaucugagccacaccuaugcuauugacgccgcuaaccauuguggcacaaucgccaaugggguccuccaaaccuucaugcggauggcguggggaggcucuuacaucgcccuggauuccgggaagggaagcugggacugcauuaugacaucuuaccaguaucuuaucauucagaacaccacgugggaagaucacugucaguuuucccgccccagcccuaucggcuaccuggggcuccugucccaaagaacacgggacauuuauaucucucgcagacuucugggaaccuucacauggacccucagcgauuccgagggcaacgaaacccccggcggguacugccugacacgguggaugcugaucgaggcugagcucaaauguuuuggaaauacggccguggcuaagugcaacgaaaaacaugacgaggaguucugcgauaugcugcgccuuuuugacuucuguaagcaggccauuagacggcugaaaaccgaagcgcagaugagcauccagcucauuaauaaggccguuaacgcucugaucaaugaucaacuuauuaugaagaaccaucugcgcgacaucaugggcaucccuuauugcaauuacucuaaauauugguaccucaaccacacagugaccgggaagacaucccugcccagauguuggcuggucagcaauggaucuuaccucaacgaaacccacuucagcgacgauauugagcagcaggccgacaauaugaucacggagcugcuucaaaaagaauauauggaucggcagggcaagacaccucuggggcucguggaccuguuuguguucuccaccucuuuuuaccugauuagcaucuuccuucaccucguccgcauuccgacccauagacacguuaucggaaaacccugcccuaagccccaucggcugaaccacaugggcauuuguuccugcggccuguauaaacacccuggggugcccgugaaguggaagcgcuga

SEQ ID NO: 36658 - RNA, 1473 nt, Artificial Sequence
  derived and/or modified CDS sequence (opt5) from LASV(Lassa virus/H.sapiens-wt/NGA/2018/ISTH_0959;Clade II)__AVV65099__GPCmut10
augggccagaucauuaccuucuuucaagaggugccccacgucaucgaagagguuaugaacauugugcugaucgcccucagccugcuugcuauucugaaggggaucuacaauguggucacaugcggacucuucggccugguguccuuucuucugcucugugggagaucuugcagcacgaccuauaaaggaguuuacgaacugcagacacuggagcucgacauggccucccugaacauguguaugccucuuucuugcaccaagaauaacagccaucacuauaucauggugggcaaugaaacagggcuggagcucacccugacaaacaccuccauuaucaaucauaaauucuguaaccuuucugaugcgcacaagaaaaaucuguacgaccaugcucucaugagcauuaucuccacguuucaccugagcauuccgaacuucaaucaguaugaggccaugucuugcgauuuuaacggaggcaagaucuccguccaguacaaucugagccacgccuaugcuauugacgccgcuaaccauuguggcaccaucgccaauggggugcuccaaacauucaugcggauggcguggggaggcucuuacaucgcccuggauuccgggaagggaagcugggacugcauuaugaccucuuaccaguaucuuaucauucagaacacaaccugggaagaucacugucaguuuucccgccccagcccuaucggcuaccuggggcuccugucccaaagaacgcgggacauuuauaucucucgcagacuucugggaacauucaccuggacacucagcgauuccgagggcaacgaaacccccggcggguacugccugacccgguggaugcugaucgaggcugagcucaaauguuuuggaaauacagccguugcuaagugcaacgaaaaacaugacgaggaguucugcgauaugcugcgccuuuuugacuucuguaagcaggccauuagacggcugaaaacggaagcgcagaugagcauccagcucauuaauaaggccgugaacgcucugaucaaugaucaacuuauuaugaagaaccaucugcgcgacaucaugggcaucccuuauugcaauuacucuaaauauugguaccucaaccacaccgucacagggaagaccucccugcccagauguuggcuggugagcaauggaucuuaccucaacgaaacacacuucagcgacgauauugagcagcaggccgacaauaugaucaccgagcugcuucaaaaagaauauauugaucggcagggcaagacgccucuggggcucguggaccuguuugucuucuccacaucuuuuuaccugaucagcauuuuccuucaccucguuaaaaucccgacccaucgccacgugauuggaaagcccugcccuaaaccccauagacugaaccacaugggcaucuguuccugcggccuguauaagcacccuggggugcccgucaaguggaaacgguga

SEQ ID NO: 36659 - RNA, 1473 nt, Artificial Sequence
  derived and/or modified CDS sequence (opt5) from LASV(LASV003-NIG-2008;Clade II)__AIT17580__GPCmut10
augggccagaucauuaccuucuuucaagaggugccccacgucaucgaagagguuaugaacauugugcugaucgcccucagccugcuugcuauucugaaggggaucuacaauguggccacaugcggacucuucggccuggucuccuuucuucugcucugugggagaucuugcagcacgaccuauaaaggaguguacgaacugcagacacuggagcucgacauggcgucccugaacauguguaugccucuuucuugcaccaagaauaacagccaucacuauaucaugguuggcaaugaaacagggcuggagcucacccugacaaacaccuccauuaucaaucauaaauucuguaaccuuucugaugcucacaagaaaaaucuguacgaccaugcccucaugagcauuaucuccacguuucaccugagcauuccgaacuucaaucaguaugaggccaugucuugcgauuuuaacggaggcaagaucuccgugcaguacaaucugagccacaccuaugcugucgacgccgcuaaccauuguggcacaauugccaauggggugcuccaaaccuucaugcggauggcguggggaggcucuuacaucgcccuggauuccgggaagggaagcugggacugcaucaugacaucuuaccaguaucuuauuauccagaacaccacgugggaagaucacugucaguuuucccgccccagcccuauuggcuaccuggggcuccugucccaaagaacacgggacaucuauauuucucgcagacuucugggaaccuucacauggacccucagcgauuccgagagcaacgaaacccccggcggcuacugccugacacgguggaugcugaucgaggcugagcucaaauguuuugggaauacggccguugcuaagugcaacgaaaaacaugacgaggaguucugcgauaugcugcgccuuuuugacuucuguaagcaggccaucagacggcugaaagcggaagcccagaugucuauucagcucaucaauaaggcugugaacgcccugauuaaugaucaacuuaucaugaagaaccaucugcgcgacauuaugggaaucccuuauugcaauuacuccaaauauugguaccucaaccacaccgucacaggcagaaccagccugccccgguguuggcuggugucuaaugggagcuaccucaacgaaacacacuucuccgacgauaucgagcagcaggcugacaauaugauuaccgagcugcuucaaaaggaauauauggaucgccagggaaaaacgccucugggccucguggaccuguuugucuucucuaccagcuuuuaccugaucuccauuuuccuucaccucguuaagaucccgacacauagacacgugauugggaaacccugcccuaagccccaucggcugaaccacaugggaaucuguagcugcggccuguauaaacacccuggcgugcccgucaaguggaagcgcuga

SEQ ID NO: 36660 - RNA, 1473 nt, Artificial Sequence
  derived and/or modified CDS sequence (opt5) from LASV(LASV035-NIG-2009;Clade II)__AIT17588__GPCmut10
augggccagaucauuaccuucuuucaagaggugccccacgucaucgaagagguuaugaacauugugcugaucgcccucagccugcuugcuauucugaaggggaucuacaauguggccacaugcggacucuucggccuggucuccuuucuucugcucugugggagaucuugcagcacgaccuauaaaggaguguacgaacugcagacacuggagcucgacauggcgucccugaacauguguaugccucuuucuugcaccaagaauaacagccaucacuauaucaugguuggcaaugaaacagggcuggagcucacccugacaaacaccuccauuaucaaucauaaauucuguaaccuuucugaugcucacaagaaaaaucuguacgaccaugcccucaugagcauuaucuccacguuucaccugagcauuccgaacuucaaucaguaugaggccaugucuugcgauuuuaacggaggcaagaucuccgugcaguacaaucugagccacgcuuaugccgucgacgcugccaaccauuguggcaccauugcgaauggggugcuccaaacauucaugcggauggccuggggaggcucuuacaucgcucuggauuccgggaagggaagcugggacugcaucaugaccucuuaccaguaucuuauuauccagaacacaaccugggaagaucacugucaguuuucccgccccagcccuauuggcuaccuggggcuccugucccaaagaacgcgggacaucuauauuucucgcagacuucugggaacauucaccuggacacucagcgauuccgagggcaacgaaacccccggcggguacugccugacccgguggaugcugaucgaggccgagcucaaauguuuuggaaauacagcuguugccaagugcaacgaaaaacaugacgaggaguucugcgauaugcugcgccuuuuugacuucuguaagcaggcgaucagacggcugaaagccgaagcucagaugagcauucagcucaucaauaaggccgugaacgcucugauuaaugaucaacuuaucaugaagaaccaucugcgcgacauuaugggcaucccuuauugcaauuacucuaaauauugguaccucaaccacacggucaccgggaagacaucccugcccagauguuggcuggugagcaauggaucuuaccucaacgaaacccacuucagcgacgauaucgagcagcaggccgacaauaugauuacagagcugcuucaaaaagaauauaucgaucggcagggcaagaccccucuggggcucguggaccuguuugucuucuccacgucuuuuuaccugauuagcaucuuccuucaccucguuaaaauuccgacacaucgccacgugaucggaaagcccugcccuaaaccccauagacugaaccacaugggcauuuguuccugcggccuguauaagcacccuggggugcccgucaaguggaaacgguga

SEQ ID NO: 36661 - RNA, 1473 nt, Artificial Sequence
  derived and/or modified CDS sequence (opt5) from LASV(LASV1000-NIG-2009;Clade II)__AIT17782__GPCmut10
augggccagaucauuaccuucuuucaagaggugccccacgucaucgaagagguuaugaacauugugcugaucgcccucagccugcuugcuauucugaaggggaucuacaauguggccacaugcggacucuucggccuggucuccuuucuucugcucugugggagaucuugcagcacgaccuauaaaggaguguacgaacugcagacacuggagcucgacauggcgucccugaacauguguaugccucuuucuugcaccaagaauaacagccaucacuauaucaugguuggcaaugaaacagggcuggagcucacccugacaaacaccuccauuaucaaucauaaauucuguaaccuuucugaugcucacaagaaaaaucuguacgaccaugcccucaugagcauuaucuccacguuucaccugagcauuccgaacuucaaucaguaugaggccaugucuugcgauuuuaacggaggcaagaucuccgugcaguacaaucugagccacaccuaugcugucgacgccgcuaaccauuguggcacaauugccaauggggugcuccaaaccuucaugcggauggcguggggaggcucuuacaucgcccuggauuccgggaagggaagcugggacugcaucaugacaucuuaccaguaucuuauuauccagaacaccacgugggaagaucacugucaguuuucccgccccagcccuauuggcuaccuggggcuccugucccaaagaacacgggacaucuauauuucucgcagacuucugggaaccuucacauggacccucagcgauuccgagggcaacgaaacccccggcggguacugccugacacgguggaugcugaucgaggcugagcucaaauguuuuggaaauacggccguugcuaagugcaacgaaaaacaugacgaggaguucugcgauaugcugcgccuuuuugacuucuguaagcaggccaucaaaagacugaagaccgaagcgcagaugagcauucagcucaucaauaaggccgugaacgcucugauuaaugaucaacuuaucaugaaaaaccaucugcgggacauuaugggcaucccuuauugcaauuacucuaaguauugguaccucaaccacacagucaccgggaaaacaucccugccccgcuguuggcuggugagcaauggaucuuaccucaacgaaacccacuucagcgacgauaucgagcagcaggccgacaauaugauuacggagcugcuucaaaaggaauauaucgauagacagggcaaaacaccucuggggcucguggaccuguuugucuucuccaccucuuuuuaccugauuagcaucuuccuucaccucguuaagauuccgacccaucggcacguggugggaaaacccugcccuaagccccaucgccugaaccacaugggcaucuguuccugcggccuguauaagcacccugggguccccgugaaauggaagagauga

SEQ ID NO: 36662 - RNA, 1473 nt, Artificial Sequence
  derived and/or modified CDS sequence (opt5) from LASV(LASV221-NIG-2010;Clade II)__AIT17624__GPCmut10
augggccagaucauuaccuucuuucaagaggugccccacgucaucgaagagguuaugaacauugugcugaucgcccucagccugcuugcuauucugaaggggaucuacaauguggccacaugcggacucuucggccuggucuccuuucuucugcucugugggagaucuugcagcacgaccuauaaaggaguguacgaacugcagacacuggagcucgacauggcgucccugaacauguguaugccucuuucuugcaccaagaauaacagccaucacuauaucaugguuggcaaugaaacagggcuggagcucacccugacaaacaccuccauuaucaaucauaaauucuguaaccuuucugaugcucacaagaaaaaucuguacgaccaugcccucaugagcauuaucuccacguuucaccugagcauuccgaacuucaaucaguaugaggccaugucuugcgauuuuaacggaggcaagaucuccgugcaguacaaucugagccacaccuaugcuauugacgccgcuaaccauuguggcacaaucgccaaugggguccuccaaaccuucaugcggauggcguggggaggcucuuacaucgcccuggauuccgggaagggaagcugggacugcauuaugacaucuuaccaguaucuuaucauucagaacaccacgugggaagaucacugucaguuuucccgccccagcccuaucggcuaccuggggcuccugucccaaagaacacgggacauuuauaucucucgcagacuucugggaaccuucacauggacccucagcgauuccgagggcaacgaaacccccggcggguacugccugacacgguggaugcugaucgaggcugagcucaaauguuuuggaaauacggccguggcuaagugcaacgaaaaacaugacgaggaguucugcgauaugcugcgccuuuuugacuucuguaagcaggccauuagacggcugaaaaccgaagcgcagaugagcauccagcucauuaauaaggccguuaacgcucugaucaaugaucaacuuauuaugaagaaccaucugcgcgacaucaugggcaucccuuauugcaauuacucuaaauauugguaccucaaccacacagugaccgggaagacaucccugcccagauguuggcuggucagcaauggaucuuaccucaacgaaacccacuucagcgacgauauugagcagcaggccgacaauaugaucacggagaugcugcaaaaagaauauauggaucggcagggcaagacaccucuugggcugguggaccucuuuguguucuccaccucuuuuuaccugauuagcaucuuccugcaccuugucaaaauuccgacccaucgccacguuaucggaaagcccugcccuaaaccccauagacucaaccacaugggcauuuguuccugcggccuguauaagcacccuggggugcccgugaaguggaaacgguga

SEQ ID NO: 36663 - RNA, 1473 nt, Artificial Sequence
  derived and/or modified CDS sequence (opt5) from LASV(LASV237-NIG-2010;Clade II)__AIT17638__GPCmut10
augggccagaucauuaccuucuuucaagaggugccccacgucaucgaagagguuaugaacauugugcugaucgcccucagccugcuugcuauucugaaggggaucuacaauguggccacaugcggacucuucggccuggucuccuuucuucugcucugugggagaucuugcagcacgaccuauaaaggaguguacgaacugcagacacuggagcucgacauggcgucccugaacauguguaugccucuuucuugcaccaagaauaacagccaucacuauaucaugguuggcaaugaaacagggcuggagcucacccugacaaacaccuccauuaucaaucauaaauucuguaaccuuucugaugcucacaagaaagaccuguacgaucaugcccucaugagcauuaucuccacguuucaccugagcauuccgaauuucaaccaguaugaggccaugucuugcgacuuuaauggaggcaagaucuccgugcaguacaaccugagccacaccuaugcugucgaugccgcuaaucauuguggcacaauugccaacggggugcuccaaaccuucaugcggauggcguggggaggcucuuacaucgcccuggacuccgggaagggaagcugggauugcaucaugacaucuuaccaguaucuuauuauccagaauaccacgugggaagaccacugucaguuuucccgccccagcccuauuggcuaccuggggcuccugucccaaagaacacgggauaucuauauuucucgcagacuucugggaaccuucacauggacccucagcgacuccgagggcaacgaaacccccggcggguacugccugacacgguggaugcugaucgaggcugagcucaaauguuuuggaaacacggccguugcuaagugcaaugaaaaacaugaugaggaguucugcgacaugcugcgccuuuuugauuucuguaagcaggccaucagacggcugaaaaccgaagcgcagaugagcauucagcucaucaacaaggccgugaaugcucugauuaacgaccaacuuaucaugaagaaucaucugcgcgacauuaugggcaucccuuauugcaacuacucuaaauauugguaccucaaucacacagucaccgggaagacaucccugcccagauguuggcuggugagcaacggaucuuaccucaaugaaacccacuucagcgaugacaucgagcagcaggccgauaacaugauuacggagcugcuucaaaaagaauauauggaccggcagggcaagacaccucuggggcucguggaucuguuugucuucuccaccucuuuuuaccugaucagcauuuuccuucaccucaucaaaauuccgacccaucgccacaucacaggaaagcccugcccuaaaccccauagacugaaucacaugggcauuuguuccugcggccuguauaagcacccugggguucccgugaaguggaaacgguga

SEQ ID NO: 36664 - RNA, 1473 nt, Artificial Sequence
  derived and/or modified CDS sequence (opt5) from LASV(LASV253-NIG-2011;Clade II)__AIT17670__GPCmut10
augggccagaucauuaccuucuuucaagaggugccccacgucaucgaagagguuaugaacauugugcugaucgcccucagccugcuugcuauucugaaggggaucuacaauguggccacaugcggacucuucggccuggucuccuuucuucugcucugugggagaucuugcagcacgaccuauaaaggaguguacgaacugcagacacuggagcucgacauggcgucccugaacauguguaugccucuuucuugcaccaagaauaacagccaucacuauaucaugguuggcaaugaaacagggcuggagcucacccugacaaacaccuccauuaucaaucauaaauucuguaaccuuucugaugcucacaagaaaaaucuguacgaccaugcccucaugagcauuaucuccacguuucaccugagcauuccgaacuucaaucaguaugaggccaugucuugcgauuuuaacggaggcaagaucuccgugcaguacaaucugagccacaccuaugcugucgacgccgcuaaccauuguggcacaauugccaauggggugcuccaaaccuucaugcggauggcguggggaggcucuuacaucgcccuggauuccgggaagggaagcugggacugcaucaugacaucuuaccaguaucuuauuauccagaacaccacgugggaagaucacugucaguuuucccgccccagcccuauuggcuaccuggggcuccugucccaaagaacacgggacaucuauauuucucgcagacuucugggaaccuucacauggacccucagcgauuccgagggcaacgaaacccccggcggguacugccugacacgguggaugcugaucgaggcugagcucaaauguuuuggaaauacggccguugcuaagugcaacgaaaaacaugacgaggaguucugcgauaugcugcgccuuuuugacuucuguaagcaggccaucagacggcugaaagcggaagcccagaugagcauucagcucaucaauaaggcugugaacgcccugauuaaugaucaacuuaucaugaagaaccaucugcgcgacauuaugggcaucccuuauugcaauuacucuaaauauugguaccucaaccacaccgucacagggagaaccucccugccccgguguuggcuggugagcaauggaucuuaccucaacgaaacacacuucagcgacgauaucgagcagcaggcugacaauaugauuaccgagcugcuucaaaaggaauauaucgaucgccagggcaaaacgccucuggggcucguggaccuguuugucuucuccacaucuuuuuaccugauuagcaucuuccuucaccucguuaagauuccgacccauagacacaucauuggaaaacccugcccuaagccccaucggcugaaccacaugggcaucuguuccugcggccuguauaaacacccuggggugcccgugaaguggaagcgcuga

SEQ ID NO: 36665 - RNA, 1473 nt, Artificial Sequence
  derived and/or modified CDS sequence (opt5) from LASV(LASV254-NIG-2011;Clade II)__AIT17674__GPCmut10
augggccagaucauuaccuucuuucaagaggugccccacgucaucgaagagguuaugaacauugugcugaucgcccucagccugcuugcuauucugaaggggaucuacaauguggccacaugcggacucuucggccuggucuccuuucuucugcucugugggagaucuugcagcacgaccuauaaaggaguguacgaacugcagacacuggagcucgacaugaccaaccugaauauguguaugccucuuuccugcacaaagaacaauucucaucacuauaucaugguuggcaacgaaaccgggcuggagcucacacugaccaauacgagcauuaucaaccauaaauucuguaaucuuuccgaugcgcacaagaaaaaccuguacaaucaugcucucaugucuauuaucagcaccuuucaccuguccauuccgaacuucaaucaguaugaggccaugagcugcgacuuuaacggaggcaagaucucugugcaguacaaucugucccacagcuaugccgucgaugcugccaaccauuguggcacaauugcuaacggggugcuccaaaccuucaugcggauggccuggggaggcucuuacaucgcgcuggacuccgggaagggaaauugggauugcaucaugacaagcuaccaguaucuuauuauccagaacaccacgugggaagaccacugucaguuuucucgccccuccccuauuggcuaccuggggcuccugagccaaagaacacgggauaucuauauuucccgcagacuucugggaaccuucacauggacccucucugacagcgagggcaaugaaacccccggcggguacugccugacacgguggaugcugaucgaggccgagcucaaauguuuuggaaacacggcuguugccaagugcaaugaaaaacaugaugaggaguucugcgacaugcugcgccuuuuugauuucuguaagcaggcuaucagacggcugaaaaccgaagcccaggcgaacauucagcucaucaauaaggccgugaacgcucugauuaaugaccaacuuaucaugaagaaccaucugcgcgauauuaugggcaucccuuauugcaauuacuccaaauauugguaccucaaccacacagucaccgggaagacaagccugcccagauguuggcuggugucuaauggauccuaccucaacgaaacccacuucagcgacgacaucgagcagcaggccgauaauaugauuacggagcugcuucaaaaagaauauauggaccggcagggcaagacaccucuggggcucguggaucuguuugucuucucuaccagcuuuuaccugaucuccauuuuccuucaccucguuaaaaucccgacccaucgccacgugauuggaaagcccugcccuaaaccccauagacugaaccacaugggcaucuguucuugcggccuguauaagcacccuggggugcccgucaaguggaaacgguga

SEQ ID NO: 36666 - RNA, 1473 nt, Artificial Sequence
  derived and/or modified CDS sequence (opt5) from LASV(Nig08-A19;Clade III)__ADU56618__GPCmut10
augggccagaucgugaccuucuuucaagaggucccccacguuauugaagaggugaugaacaucgugcugauugcccucagcauccuggcuauucuuaaggggcuguacaauaucgccacaugcggacucaucggccuggucacguuccuucugcucuccgggagaucuuguagcaugaccuauaaaggaguguacgaacugcagacacuggagcucaacaugaauacccugaacaugugcaugccucuuuccuguacaaagaauaacucucaucacuauauuaugguuggcaaugaaaccgggcuggagcucacacugaccaacacgagccuucugcaucacaaauuuugcaaucucuccgacgcgcauaagaaaaaccuguacgaucacacccugaugucuaucauuagcacauuccaccucuccaucccgaauuuuaaccaguaugaggcuaugagcugugacuucaauggaggcaagauuaccgugcaguacaaccugucucauuccuaugccaucgaugccgcuaaucacugcggcacagucgccaacggggugcuucaaaccuuuaugcggauggcuuggggaggcagcuacauugcccuggacucugggcgcggaaagugggauuguaucaugacguccuaccaguaucucaucauucagaacacaaccugggaagaccauugccaguucagcagacccucuccuaucggcuaccuggggcuucugucccaacggacacgcgauauuuauaucagcagacggcuccugggaaccuuuaccuggacacuguccgacucugagggcaaugaaacgcccggcggguacugucucacccgcuggaugcugauugaggcggagcuuaaaugcuucggaaacacagccguugcuaaguguaaugaaaaacacgaugaggaauuuugcgacaugcugagacucuucgauuuuugcaagcaggccauccggcgccugaaagcugaggcccagaugagcauccagcuuauuaacaaggcggugaaugcccugaucaacgaccaacucauuaugaagaaucaccugagagauaucaugggcauuccuuauuguaacuacuccaaauauugguaccugaaucauaccagcacagggcggaccucucucccccgcugcuggcuggucuccaacggaagcuaccuuaaugaaacgcacuucucugacgacaucgagcagcaggcugauaacaugaucacagagaugcugcaaaaggaauaucucgacagacagggcaaaaccccucuggggcugguggaucuuuucguguuuagcaccuccuucuaccucauuucuaucuuucugcaucuggucaagauuccgacacaccggcauaucguuggaaaacccuguccuaagccccaccgccucaaucacaugggcauuugcagcuguggccuguauaaacagccuggggugcccgugagauggaagcgguga

SEQ ID NO: 36667 - RNA, 1476 nt, Artificial Sequence
  derived and/or modified CDS sequence (opt5) from LASV(G1180-SLE-2010;Clade IV)__AIT17168__GPCmut10
augggccagaucgugaccuucuuucaagaggucccccacguuauugaagaggugaugaacaucgugcugauugcccucagcauccuggcuguccuuaaggggcuguacaauuucgccacaugcggacucgugggccugcuuacguuucugcuccugugugggagauccugcaccgcgucucgguauaaaggaguuuacgaacugcagacacucgagcugaacauggaaacccuuaauauguguaugccucugagcugcacaaagaacaauucccaucacuauauuauggugggcaacgagaccgggcucgagcugacacuuaccaauacgucuaucaucaaccauaaauucuguaaucugagcgacgcucacaagaaaaaccucuacgaucaugcccugauguccauuaucucuaccuuucaccugagcauuccgaauuucaaccaguaugaagccauguccugcgacuuuaauggaggcaagaucagcguccaguacaaccucucucacuccuaugcuggcgaugccgcuaaucauugugggacaguggccaacggaguucugcaaaccuucaugcgcauggcguggggcgggagcuacauugcccuugacucuggacacggcuccugggauugcaucaugacaagcuaccaguaucugauuauccagaacaccacgugggaggaccauugucaguuuucuagacccuccccuaucggguaccucggacugcuuagccaacggacacgcgauauuuauaucuccagacggcugcucggcaccuucacauggacccugucugacagcgaaggcaaggauacccccgggggauacugccugacacgcuggaugcucauugaggcugagcugaaauguuuuggcaauacggccguggcuaagugcaacgaaaaacacgacgaggaguucugcgauaugcuuagacuguuugacuucuguaagcaggccauccagcggcucaaagcggaagcccagauguccauucaacugaucaauaaggcugucaacgcccuuaucaaugaucagcugauuaugaagaaccaccuccgcgacaucauggggauuccuuauugcaauuacagcaaauauugguaccugaaccauaccacaaccggaaagacaucucugcccaaauguuggcucguguccaauggcagcuaccugaacgaaacccacuucucugacgauaucgagcagcaagcugacaauaugauuacggagaugcuucagaaggaauauauggagagacaggggaaaacaccucugggacucguggaucuguuugucuucagcaccuccuuuuaccugaucucuaucuuccuucaucucguuaagauuccgacccaccggcauaucgugggcaaaagcugccccaagccucaccgccugaaccacaugggcauuuguuccugcgggcuguauaagcagcccggagugccugucaaauggaagagauga

SEQ ID NO: 36668 - RNA, 1476 nt, Artificial Sequence
  derived and/or modified CDS sequence (opt5) from LASV(G1442-SLE-2011;Clade IV)__AIT17180__GPCmut10
augggccagaucgugaccuucuuucaagaggucccccacguuauugaagaggugaugaacaucgugcugauugcccucagcauccuggcuguccuuaaggggcuguacaauguggccacaugcggacucauuggccugguuacguuccuucugcucugugggagauccugcaccacaacccuguauaaaggaguguacgaacugcagacacucgagcugaacauggaaacccuuaauauguguaugccucugucuugcacaaagaacaauagccaucacuauauccgggucggcaacgagaccgggcucgagcugacgcuuaccaauacauccaucauuaaccauaaauuuuguaaucugucugacgcgcacaagaaaaaccucuacgaucaugcucugaugagcaucauuuccaccuuccaccugucuaucccgaauuuuaaccaguaugaagccaugagcugcgacuucaauggaggcaagauuuccgugcaguacaaccucagccacucuuaugccggcgaugcugccaaucauugugggacaguugcuaacggagugcugcaaaccuuuaugcgcauggccuggggcggguccuacaucgcgcuugacagcggaagaggcaacugggauugcauuaugacgucuuaccaguaucugaucauccagaauacaaccugggacgaucacugucaguucucccggcccagcccuauuggguaccucggacugcuuucucaacgcacaagagacgucuauaucucccggcgccugcucggcaccuuuaccuggacacugagcgauuccgagggcaaggacacgcccgggggauacugccugaccagauggaugcucauugaagccgagcugaaauguuucggcaacacagcuguggccaagugcaaugagaaacaugaugaagaguuuugcgacaugcuucggcuguucgauuuuuguaagcaggcuauccagcgccucaaagccgaagcgcagaugucuauucaacugaucaacaaggccgugaaugcucuuaucaacgaccagcugauuaugaagaaucaccucagagacaucauggggauuccuuauugcaacuacagcaaauauugguaccugaauaacaccgccacaggaaagaccucccugcccaaauguuggcucaucagcaauggcucuuaccugaacgagacgcacuucuccgaugacauugaacaggaggcugauaauaugaucacagagaugcuucaaaaggaauauauggagcggcaggggaaaaccccucugggacucgucgaccuguucguuuuuagcaccucuuucuaccugaucagcauuuuucuucaucucgugaagaucccgacacaccgccauauugugggcaaauccugccccaagccucacagacugaaccauaugggcaucuguucuugcgggcuguauaagcagcccggagucccugugcgguggaaacgcuga

SEQ ID NO: 36669 - RNA, 1476 nt, Artificial Sequence
  derived and/or modified CDS sequence (opt5) from LASV(G3010-SLE-2013;Clade IV)__AIT17344__GPCmut10
augggccagaucgugaccuucuuucaagaggucccccacguuauugaagaggugaugaacaucgugcugauugcccucagcauccuggcuguccuuaaggggcuguacaauuucgccacaugcggacucgugggccugguuacguuucuucugcucugugggagauccugcaccacaucucuguauaaaggaguguacgaacugcagacccucgagcugaacauggaaacacuuaauauguguaugccucugagcugcaccaagaacaauucccaucacuauauuauggucggcaacgagacagggcucgagcugacccuuacgaauaccucuaucaucaaccauaaauucuguaaucugagcgacgcgcacaagaaaaaccucuacaaucaugcucugauguccauuaucucuacauuucaccugagcauuccgaacuucaaucaguaugaagccauguccugcgauuuuaacggaggcaagaucagcgugcaguacaaucucucucacuccuaugccggcgacgcugccagccauugugggaccguugcuaacggagugcugcaaacauucaugcggauggccuggggcgggucuuacauugcgcuugauuccggauacggcaagugggacugcaucaugaccagcuaucaguaccugauuauccagaacacgacaugggaggaucacugucaguuuucucgccccuccccuaucggguaucucggacugcuuagccaaagaacccgggacauuuacaucucccgcagacugcucggcacauucaccuggacccugucugauagcgaaggcaaagacacacccgggggauauugccugacgcgguggaugcucauugaggccgagcugaaguguuuuggcaauaccgcugucgccaaaugcaacgaaaagcaugaugaggaguucugcgacaugcuucgccuguuugauuucuguaaacaggcuauccagagacucaagacagaagcccagauguccauucaacugaucaauaaggcggugaacgcccuuaucaaugaccagcugauuaugaaaaaccaccuccgggauaucauggggauuccuuacugcaauuauagcaaguacugguaccugaaccacaccacaaccggaaaaacgucucugcccaaguguuggcucguguccaauggcagcuaucugaacgaaacacauuucucugacgacaucgagcagcaagcugauaauaugauuaccgagaugcuucagaaagaauacauggagcgccaggggaagaccccucugggacucgucgaccuguuuguuuucagcacauccuuuuaucugaucucuaucuuccuucaccucgugaaaauuccgacccauagacacaucgugggcaagagcugccccaagccucaucggcugaaccacaugggcauuuguuccugcgggcuguacaaacagcccggagucccugugcgcuggaagagauga

SEQ ID NO: 36670 - RNA, 1476 nt, Artificial Sequence
  derived and/or modified CDS sequence (opt5) from LASV(G502-SLE-2009;Clade IV)__AIT17126__GPCmut10
augggccagaucgugaccuucuuucaagaggucccccacguuauugaagaggugaugaacaucgugcugauugcccucagcauccuggcuguccuuaaggggcuguacaauuucgccacaugcggacucgugggccugcuuacguuucugcuccugugugggagauccugcaccacaggacuguauaaaggcguuuacgaacuccagacccuggagcuuaacauggaaacacugaauauguguaugccucucucuugcaccaagaacaauagccaucacuauauuaugguggggaacgagacaggacuggagcuuacccugacgaauaccuccaucaucaaccauaaauucuguaaucucucugacgcgcacaagaaaaaccuguacgaucaugcucugaugagcauuaucuccacauuucaccucucuauuccgaauuucaaccaguaugaagccaugagcugcgacuuuaauggcggcaagaucuccguccaguacaaccugagccacucuuaugccggggaugcugccgaccauuguggaaccguggcuaauggcguucuucaaacauucaugcggauggccuggggaggguccuacauugcgcuggauagcggccgcgggagaugggacugcaucaugaccucuuaccaguaucucauuauccagaacacgacaugggaggaucacugucaguuuucccggcccagcccuaucggauaccugggccuucugucucaacgcaccagagacauuuauaucucccggcgccuccugggcacauucaccuggacccugagcgauuccgaagggaaggacacacccggaggcuacugccucacgagauggaugcugauugaggccgagcuuaaauguuuugggaacaccgcuguggccaagugcaaugaaaaacaugaugaggaguucugcgacaugcugcggcucuuugauuucuguaagcaggcuauccagcgccugaaagccgaagcgcagaugucuauucaacuuaucaacaaggccgucaaugcucugaucaacgaccagcucgugaugaagaaucaccugagagacauuaugggaaucccuuauugcaacuacagccgguauugguaccugaaucacacaaccacaggccgcaccucccuccccaaauguuggcuggugagcaacgggucuuaccuuaaugaaacgcauuucuccgaugacauugagcagcaagccgauaacaugaucacagagaugcugcagaaggaauauauggagagacagggaaaaaccccucucggccuggucgaccuguuuguuuucagcaccucuuuuuaccuuauuagcaucuuccuccaccuggugaagaucccgacacaucggcacauugugggcaaauccugccccaagccucaucgccugaaucacauggggaucuguucuugcggacucuauaaacagcccggcgucccugugaaguggaagagauga

SEQ ID NO: 36671 - RNA, 1476 nt, Artificial Sequence
  derived and/or modified CDS sequence (opt5) from LASV(G733-SLE-2010;Clade IV)__AIT17154__GPCmut10
augggccagaucgugaccuucuuucaagaggucccccacguuauugaagaggugaugaacaucgugcugauugcccucagcauccuggcuguccuuaaggggcuguacaauuucgccacaugcggaauugugggccucguuuccuuucugcuucugugugggagaucuugcacgaccagccucuauaaaggaguguacgaacugcagacacuggagcucaacauggaaacccugaauauguguaugccucuuuccugcacaaagaacaauucucaucacuauaucauggucggcaacgagaccgggcuggagcucacacugaccaauacgagcaucauuaaccauaaauucuguaaucuuuccgacgcgcacaagaaaaaccuguacgaucaugcucucaugucuaucauuagcaccuuucaccuguccaucccgaauuucaaccaguaugaagccaugagcugcgacuuuaauggaggcaagauuucugugcaguacaaccugucccacagcuaugccggcgaugcugccaaucauugugggacaaucgcuaacggaguucuccaaaccuucaugcggauggccuggggcgggucuuacauugcgcuggacuccggacgcgauagaugggacugcaucaugacaagcuaccaguaucuuaucauucagaacaccacgugggaggaucacugucaguuuucucggcccuccccuaucggcuaccuggggcuccugagccaacgcacaagagacauuuauaucucccggcgccuucugggaaccuucacauggacccucucugauagcgaaggcaaggacacccccggcggguacugccugacaagauggaugcugauugaggccgagcucaaauguuuuggaaauacggcuguggccaagugcaacgaaaaacaugaugaggaguucugcgacaugcugcggcuuuuugauuucuguaagcaggcuauccagcgccugaaagccgaagcgcagauguccauccaacucauuaauaaggccgucaacgcucugaucaaugaccagcuuauuaugaagaaccaccugagagacaucaugggcauuccuuauugcaauuacagcaaauauugguaccucaaccacaccacaaccgggaagacaucucugcccaaauguuggcugguguccaauggaagcuaccucaacgaaacccauuucucugaugacaucgagcagcaagccgauaauaugaucacggagaugcugcagaaggaauauauggagcggcagggcaaaacaccucuugggcugguggaccucuuugucuucagcaccuccuuuuaccugauuucuaucuuccugcaccuuguuaagauuccgacccaucgccacguggugggaaaaagcugccccaagccucauagacucaaccacaugggcaucuguuccugcggccuguaugggcagcccggagucccugugaaguggaaacgguga

SEQ ID NO: 36672 - RNA, 1476 nt, Artificial Sequence
  derived and/or modified CDS sequence (opt5) from MOPV/LASV reassortant(IGS-1;Clade IV)__AFY05576__GPCmut10
augggccagaucgugaccuucuuucaagaggucccccacguuauugaagaggugaugaacaucgugcugauugcccucagcguccuggcugugcuuaaggggcuguacaauuucgccacaugcggacucguuggccuggugacguuucuucugcucugugggagauccugcaccacaucucuguauaaaggagucuacgaacugcagacccucgagcugaacauggaaacacuuaauauguguaugccucugagcugcaccaagaacaauucccaucacuauaucauggugggcaacgagacagggcucgagcugacccuuacgaauaccucuauuaucaaccauaaauucuguaaucugagcgacgcgcacaagaaaaaccucuacgaucaugcucugauguccaucauuucuacauuucaccugagcaucccgaauuucaaccaguaugaagccauguccugcgacuuuaauggaggcaagauuagcguucaguacaaccucucucacuccuaugccggcgaugcugccaaucauugugggaccguggcuaacggaguccugcaaacauucaugcggauggccuggggcgggagcuacaucgcgcuugacucuggacgcggcaacugggauugcauuaugaccuccuaccaguaucugaucauucagaauacgacaugggaggaccacugucaguuuagcagacccucuccuaucggguaccucggacugcuuucccaacggacccgcgauaucuauauuagcagacggcugcucggcacauucaccuggacccuguccgacucugaaggcgaggauacacccgggggauacugccugacgcgcuggaugcucaucgaggccgaacugaaguguuuuggcaacaccgcuguggccaaaugcaaugagaagcaugacgaagaguucugcgauaugcuuagacuguuugacuucuguaaacaggcuauucagcggcucaaggccgaagcgcagaugagcauccaacugauuaacaaagccgugaaugcucuuaucaacgaucagcugaucaugaagaaucaccuccgcgacauuauggggaucccuuauugcaacuacuccaaguauugguaccugaaucacacaaccacaggaagaaccagccugcccaaauguuggcucgucucuaacggcuccuaccugaaugagacgcauuucagcgacgauauugagcagcaagccgacaacaugaucacagaaaugcuucagaaggaguauauggaacggcaggggaaaaccccucugggacucguugaucuguuuguguucucuaccagcuuuuaccugauuuccaucuuccuucaccucgugaagaucccgacacaucgccacauugucggcaaaucuugccccaagccucauagacugaaucacaugggcaucuguagcugcgggcuguauaaacagcccggagugccuguuaaguggaagcgguga

SEQ ID NO: 36673 - RNA, 1476 nt, Artificial Sequence
  derived and/or modified CDS sequence (opt5) from LASV(LM765-SLE-2012;Clade IV)__AIT17814__GPCmut10
augggccagaucgugaccuucuuucaagaggucccccacguuauugaagaggugaugaacaucgugcugauugcccucagcauccuggcuguccuuaaggggcuguacaauuucgccacaugcggacucgugggccugguuacguuucuucugcucugugggagauccugcaccacaucucuguauaaaggaguguacgaacugcagacccucgagcugaacauggaaacacuuaauauguguaugccucugagcugcaccaagaacaauucccaucacuauauuauggucggcaacgagacagggcucgagcugacccuuacgaauaccucuaucaucgaccauaaauucuguaaccugagcgaugcgcaccggaagaaucucuacgaccaugcucugauguccauuaucucuacauuucaccugagcauuccgaacuucaaucaguaugaagccauguccugcgauuuuaacggaggcaaaaucagcgugcaguacaaucucucucacuccuaugccaaggacgcugccgaucauuguggcaccguugcuaacggggugcugcaaacauucaugcgcauggccuggggaggcagcuacauugcgcuugacucugggagaggacggugggauugcaucaugaccuccuaccaguaucugauuauccagaauacgacaugggaggaccacugucaguuuagccgccccucuccuaucggcuaccucgggcugcuuucccaaagaacccgggauauuuauaucagccgcagacugcucggaacauucaccuggacccuguccgacucugaaggcaaggauacacccggcggguacugccugacgcgguggaugcucauugaggccgagcugaaauguuuuggaaacaccgcugucgccaagugcaacgaaaaacaugacgaggaguucugcgauaugcuucgccuguuugacuucuguaagcaggcuauccagagacucaaagccgaagcgcagaugagcauucaacugaucaauaaggccgugaacgcucuuaucaaugaccagcugauuaugaagaaccaccuccgggauaucaugggcauuccuuauugcaauuacuccaaauauugguaccugaaccacacaaccacagggaagaccagccugcccaaauguuggcucgugucuaauggauccuaccugaacgaaacgcauuucagcgacgauaucgagcagcaagccgacaauaugauuacagagaugcuucagaaggaauauauggagcgccagggcaaaaccccucuggggcucgucgaucuguuuguuuucucuaccagcuuuuaccugaucuccaucuuccuucaccucgugaagauuccgacacauagacacaucgugggaaaacccugcccuaagccccaucggcugaaccacaugggcauuuguucuugcggccuguauaagcagccugggguccccgugaaauggaagcgcuga

SEQ ID NO: 36674 - RNA, 1476 nt, Artificial Sequence
  derived and/or modified CDS sequence (opt5) from LASV(LM776-SLE-2012;Clade IV)__AIT17824__GPCmut10
augggccagaucgugaccuucuuucaagaggucccccacguuauugaagaggugaugaacaucgugcugauugcccucagcauccuggcuguccuuaaggggcuguacaauuucgccacaugcggacucgugggccugguuacguuucuucugcucugugggagauccugcaccacaucuguguauaaaggagucuacgaacugcagacccuggagcucaacauggaaacacugaauauguguaugccucuuagcugcaccaagaacaauucccaucacuauauuauggugggcaacgagacagggcuggagcucacccugacgaauaccucuaucaucaaccauaaauucuguaaucuuagcgacgcgcacaagaaaaaccuguacgaucaugcucucauguccauuaucucuacauuucaccugagcauuccgaauuucaaccaguaugaagccauguccugcgacuuuaauggaggcaagaucagcguucaguacaaccugucucacuccuaugccggcgaugcugccaaucauugugggaccguggcuaacggaguccuccaaacauucaugcggauggccuggggcgggagcuacauugcgcuggacucuggacacggcaagugggauugcaucaugaccuccuaccaguaucuuauuauccagaacacgacaugggaggaccauugucaguuuagccgccccucuccuaucggguaccugggacuccugucccaaagaacccgggauauuuauaucagccgcagacuucugggcacauucaccuggacccucuccgacucugaaggcaaagauacacccgggggauacugccugacgcgguggaugcugauugaggccgagcucaaguguuuuggcaauaccgcuguggccaaaugcaacgaaaagcacgacgaggaguucugcgauaugcugcgccuuuuugacuucuguaaacaggcuauccagagacugaaggccgaagcgcagaugagcauucaacucaucaauaaggccgugaacgcucugaucaaugaucagcuuauuaugaaaaaccaucugcgggacaucauggggauuccuuauugcaauuacuccaaguauugguaccucaaccacacaaccacaggaaaaaccagccugcccaaguguuggcuggucucuaauggcuccuaccucaacgaaacgcacuucagcgacgauaucgagcagcaagccgacaauaugauuacagagaugcugcagaaagaauauauggagcgccaggggaagaccccucuuggacugguugaucucuuuguguucucuaccagcuuuuaccugaucuccaucuuccugcaucuugugaaaauuccgacacacagacauaucgucggcaagucuugccccaagccucaccggcucaaccacaugggcauuuguagcugcgggcuguauaaacagcccggagugccuguucgcuggaagagauga

SEQ ID NO: 36675 - RNA, 1476 nt, Artificial Sequence
  derived and/or modified CDS sequence (opt5) from LASV(Mad39;Clade IV)__ANH09722__GPCmut10
augggccagaucgugaccuucuuucaagaggucccccacguuauugaagaggugaugaacaucgugcugauugcccucagcauccuggcuguccuuaaggggcuguacaauguggccacaugcggacucauuggccugguuacguuccuucugcucugugggagauccugcaccacaacccuguauaaaggaguguacgaacugcaggcgcucgagcugaacauggaaacacuuaauauguguaugccucugucuugcaccaagaacaauagccaucacuauauccgggucggcaacgagacagggcucgagcugacccuuacgaauaccucccugaucaaccauaaauuuuguaaucucucugacgcucacaagaaaaaccuguacgaucaugcccugaugagcauuaucuccacauuccaccucucuauuccgaauuuuaaccaguaugaagccaugagcugcgacuucaaugauggaaagaucuccgugcaguacaaccugagccacaccuaugcuggcgacacagccaaucauuguggcaccguugcuaacggggugcuucaaacguuuaugcgcauggccuggggaggcucuuacauugcgcuggauuccgggagaggaggcugggacugcaucaugacaagcuaccaguaucucauuauccagaacaccacaugggaggaucacugucaguucucucggcccuccccuaucggguaccugggacuucugagccaacgcaccagagacauuuauaucucucggcgccuccugggcaccuuuacauggacgcuguccgauagcgaaggcaaggacacccccgggggauacugccucacaagauggaugcugauugaggccgagcuuaaauguuucggcaauaccgcugucgccaagugcaacgaaaaacaugaugaggaauuuugcgacaugcugcgccucuucgauuuuuguaagcaggcuauccagcggcugaaagccgaggcgcagauguccauucaacuuaucaauaaggccgugaacgcucugaucaaugaccagcucauuaugaagaaccaccugagagacaucauggggauuccuuauugcaauuacucuaaauauugguaccugaaccacacagugaccggaaagacgagccuccccaaauguuggcuggucuccaauggcagcuaccuuaacgaaacacauuucucugaugacaucgagcagcaagccgauaauaugauuaccgagaugcugcagaaggaauauauggagcggcaggggaaaaccccucucggacugguugaccuguucguguuuuccaccagcuucuaccuuaucucuaucuuucuccaccuggugaagauuccgacacaucgccacgucgugggcaaacccugcccuaagccccauagacugaaccacaugggcaucuguagcugcggguucuauaagcagccuggaguucccgugcgguggaaacgcuga

SEQ ID NO: 36676 - RNA, 1476 nt, Artificial Sequence
  derived and/or modified CDS sequence (opt5) from LASV(Z0947-SLE-2011;Clade IV)__AIT17840__GPCmut10
augggccagaucgugaccuucuuucaagaggucccccacguuauugaagaggugaugaacaucgugcugauugcccucagcauccuggcuguccuuaaggggcuguacaauuucgccacaugcggacucgugggccugguuacguuucuucugcucugugggagauccugcaccauuucucuguauaaaggaguguacgaacugcagacacucgagcugaacauggaaacccuuaauauguguaugccucugagcugcacaaagaacaauucccaucacuauaucauggucggcaacgagaccgggcucgagcugacacuuaccaauacgucuaucauuaaccauaaauucuguaaucugagcgacgcgcacaagaaaaaccucuacgaucaugcucugauguccaucauuucuaccuuucaccugagcaucccgaauuucaaccaguaugaagccauguccugcgacuuuaauggaggcaagauuagcgugcaguacaaccucucucacuccuaugccggcgaugcugccaaucauugugggacaguugcuaacggagugcugcaaaccuucaugcggauggccuggggcgggagcuacaucgcgcuugacucuggacgcgauagaugggacugcauuaugacauccuaccaguaucugaucauccagaacaccacgugggaggaucacugucaguuuagccggcccucuccuauuggcuaccucgggcugcuuucccaacgcacaagagacaucuauauuagccggcgccugcucggaaccuucacauggacccuguccgauucugaaggcaaggacacccccggcggguacugccugacaagauggaugcucaucgaggccgagcugaaauguuuuggaaauacggcugucgccaagugcaacgaaaaacaugaugaggaguucugcgacaugcuucggcuguuugauuucuguaagcaggcuauucagcgccucaaagccgaagcgcagaugagcauccaacugaucaauaaggccgugaacgcucuuauuaaugaccagcugaucaugaagaaccaccucagagacauuaugggcaucccuuauugcaauuacuccaaauauugguaccugaaccacaccacaaccgggaagacaagccugcccaaauguuggcucgugucuaauggauccuaccugaacgaaacccauuucagcgaugacauugagcagcaagccgauaauaugaucacggagaugcuucagaaggaauauauggagcggcagggcaaaacaccucuggggcucgucgaccuguuuguuuucucuaccagcuuuuaccugaucuccauuuuccuucaccucgugaagaucccgacccaucgccacauugugggaaaacccugcccuaagccccauagacugaaccacaugggcaucuguucuugcggccuguauaagcagccugggguccccgugaaauggaagcgguga

SEQ ID NO: 36677 - RNA, 1717 nt, Artificial Sequence
  mRNA product Design a-1 (hSL-A64-N5) comprising derived and/or modified sequence from LASV(Josiah;Clade IV)__NP_694870__GPCmut10 (opt1)
aggagagucccgcagucggcguccagcggcucugcuuguucgugugugugucguugcaggccuuauucaagcuuaccaugggccagaucgugaccuucuuccaggaggucccccacgugaucgaggaggugaugaacaucguccugaucgcccucagcgugcuggccgugcugaaggggcucuacaacuucgcgaccugcggccuggucgggcuggugacguuccuccugcugugcggccgcuccugcaccaccagccucuacaaggggguguacgagcugcagacccuggagcucaacauggagacgcugaacaugugcaugccgcuguccugcaccaagaacaacagccaccacuacaucauggucggcaacgagaccggccucgagcugacgcugaccaacaccuccaucaucaaccacaaguucugcaaccucagcgacgcccacaagaagaaccuguacgaccacgcccugauguccaucaucagcaccuuccaccucuccauccccaacuucaaccaguacgaggccaugagcugcgacuucaacgggggcaagaucuccgugcaguacaaccugagccacuccuacgccggggacgcggccaaccacugcggcacgguggccaacgggguccugcagaccuucaugcggauggccuggggcggcagcuacaucgcgcucgacuccgggcgcggcaacugggacugcaucaugaccagcuaccaguaccugaucauccagaacaccacgugggaggaccacugccaguucucccggcccagccccaucggguaccugggccuccugucccagcgcacccgggacaucuacaucagccgccggcugcucggcaccuucaccuggacgcugagcgacuccgaggggaaggacaccccgggcggguacugccugacccgcuggaugcucaucgaggccgagcugaagugcuucggcaacaccgccguggccaagugcaacgagaagcacgacgaggaguucugcgacaugcugcggcuguucgacuucugcaagcaggccauccagcgccugaaggcggaggcccagaugagcauccagcugaucaacaaggccgugaacgcccucaucaacgaccagcugaucaugaagaaccaccuccgggacaucauggggauccccuacugcaacuacuccaaguacugguaccucaaccacacgaccaccggccgcaccagccugcccaagugcuggcuggucuccaacggcagcuaccucaacgagacgcacuucuccgacgacaucgagcagcaggccgacaacaugaucaccgagaugcugcagaaggaguacauggagcggcaggggaagacgccccugggccucguggaccuguucguguucagcaccuccuucuaccugaucagcaucuuccugcaccucgucaagaucccgacccaccgccacaucguggggaaguccugccccaagccccaccggcugaaccacaugggcaucugcagcugcgggcuguacaagcagcccggcgugccggucaaguggaagcgcugaggacuagucccuguucccagagcccacuuuuuuuucuuuuuuugaaauaaaauagccugucuuucagaucucaaaggcucuuuucagagccaccaaaaaaaaaaaaaaaaaaaaaaaaaaaaaaaaaaaaaaaaaaaaaaaaaaaaaaaaaaaaaaaaagaauu

SEQ ID NO: 36678 - RNA, 1714 nt, Artificial Sequence
  mRNA product Design a-1 (hSL-A64-N5) comprising derived and/or modified sequence from LASV(LP;Clade I)__AAF86701__GPCmut10 (opt1)
aggagagucccgcagucggcguccagcggcucugcuuguucgugugugugucguugcaggccuuauucaagcuuaccaugggccagaucaucaccuucuuccaggaggugccccacgucaucgaggaggugaugaacaucgugcugaucgcccucagccugcuggccauccucaaggggcuguacaacaucgcgaccugcggcaucaucgggcuggucgccuuccucuuccugugcggcaaguccugcagccugacgcucaagggcggguacgagcugcagacccuggagcucaacauggagacccugaacaugugcaugccgcuguccugcacgaagaacagcucccaccacuacauccgcgugggcaacgagaccgggcucgagcugacccugaccaacacgagcaucaucaaccacaaguucugcaaccucuccgacgcccacaagaagaaccuguacgaccacgcccugaugagcaucaucuccaccuuccaccucagcauccccaacuucaaccaguacgaggccauguccugcgacuucaacggcgggaagaucagcgugcaguacaaccugucccacagcuacgcgggcgacgccgccgagcacugcgggaccgucgccaacggcgugcugcagaccuucaugcggauggcguggggcgggcgcuacaucgcccucgacuccggcaaggggaacugggacugcaucaugacgagcuaccaguaccugaucauccagaacaccaccugggaggaccacugccaguucucccggcccagccccaucggcuaccugggccuccugucccagcgcacccgggacaucuacaucagccgccggcugcucgggacguucaccuggacccugagcgacuccgagggcaacgagacccccgggggcuacugccugacgcgcuggaugcucaucgaggccgagcugaagugcuucgggaacaccgccguggccaagugcaacgagaagcacgacgaggaguucugcgacaugcugcggcuguucgacuucugcaagcaggcgauccgccggcugaaggccgaggcccagaugagcauccagcugaucaacaaggccgucaacgcccucaucaacgaccagcugaucaugaagaaccaccuccgcgacaucaugggcauccccuacugcaacuacuccaaguacugguaccucaaccacaccagcuccggccggaccagccugcccaagugcuggcugaucuccaacgggagcuaccucaacgagacgcaguucuccgacgacaucgagcagcaggcggacaacaugaucaccgagaugcugcagaaggaguacaucgagcgccagggcaagaccccgcuggggcucguggacaucuucaucuucagcaccuccuucuaccugaucagcaucuuccugcaccugaucaagaucccgacgcaccggcacaucgugggcaagcccugccccaagccccaccgccucaaccacaugggggucugcuccugcggccuguacaagcacccgggcgugcccaccaaguggaagcggugaggacuagucccuguucccagagcccacuuuuuuuucuuuuuuugaaauaaaauagccugucuuucagaucucaaaggcucuuuucagagccaccaaaaaaaaaaaaaaaaaaaaaaaaaaaaaaaaaaaaaaaaaaaaaaaaaaaaaaaaaaaaaaaaagaauu

SEQ ID NO: 36679 - RNA, 1714 nt, Artificial Sequence
  mRNA product Design a-1 (hSL-A64-N5) comprising derived and/or modified sequence from LASV(803213;Clade II)__AAF86703__GPCmut10 (opt1)
aggagagucccgcagucggcguccagcggcucugcuuguucgugugugugucguugcaggccuuauucaagcuuaccaugggccagaucaucaccuucuuccaggaggugccccacgucaucgaggaggugaugaacaucgugcugaucgcccucagccugcuggccauccucaaggggaucuacaacgucgcgaccugcggccuguucgggcugaucuccuuccuccugcugugcggccgcagcugcuccgugacguacaaggggguguacgagcuccagacccuggagcugaacauggccaaccucaacaugugcaugccgcugagcugcaccaagaacaacucccaccacuacaucauggucggcaacgagacgggccuggagcucacccugaccaacaccagcaucaucaaccacaaguucugcaaccuguccgacgcccacaagaagaaccucuacgaccacgcccugaugagcaucaucuccacguuccaccugagcauccccaacuucaaccaguacgaggccauguccugcgacuucaacgggggcaagaucagcgugcaguacaaccucucccacagcuucgcgguggacgccgccaaccacugcgggaccaucgccaacggcguccugcagaccuucaugcggauggcguggggcggguccuacaucgcccuggacagcggcaaggggaacugggacugcaucaugaccuccuaccaguaccucaucauccagaacacgaccugggaggaccacugccaguucagccgccccucccccaucggcuaccuggggcugcucagccagcggacccgcgacaucuacaucagccggcgccugcugggcaccuucacguggacccucuccgacagcgagggcaacgaggcccccgggggcuacugccugacccgguggaugcugaucgaggccgagcucaagugcuucgggaacaccgccguggcgaagugcaacgagaagcacgacgaggaguucugcgacaugcugcgccuguucgacuucugcaagcaggccaucaagcggcucaagacggaggcccagauguccauccagcugaucaacaaggccgugaacgcccugaucaacgaccagcucaucaugaagaaccaccuccgcgacaucaugggcauccccuacugcaacuacagccgguacugguaccugaaccacaccgucaccgggaagaccucccugccccgcugcuggcuggugagcaacggcuccuaccugaacgagacgcacuucagcgacgacaucgagcagcaggcggacaacaugaucaccgagaugcuccagaaggaguacauggaccggcagggcaagaccccgcuggggcugguggaccucuucgucuucuccaccagcuucuaccugaucuccaucuuccugcaccuggugaagaucccgacgcaccgccacaucgugggcaagcccugccccaagccccaccggcucaaccacauggggaucugcagcugcggccuguacaagcacccggggguccccgugaaguggaagcgcugaggacuagucccuguucccagagcccacuuuuuuuucuuuuuuugaaauaaaauagccugucuuucagaucucaaaggcucuuuucagagccaccaaaaaaaaaaaaaaaaaaaaaaaaaaaaaaaaaaaaaaaaaaaaaaaaaaaaaaaaaaaaaaaaagaauu

SEQ ID NO: 36680 - RNA, 1714 nt, Artificial Sequence
  mRNA product Design a-1 (hSL-A64-N5) comprising derived and/or modified sequence from LASV(GA391;Clade III)__CAA36645__GPCmut10 (opt1)
aggagagucccgcagucggcguccagcggcucugcuuguucgugugugugucguugcaggccuuauucaagcuuaccaugggccagaucgugaccuucuuccaggaggucccccacgugaucgaggaggugaugaacaucguccugaucgcccucagcauccuggccauccugaaggggcucuacaacguggcgaccugcggccugaucgggcuggugacguuccuccugcuguccggccgcagcugcucccucaucuacaaggggaccuacgagcugcagacccuggagcucaacauggagacccugaacaugugcaugccgcugagcugcaccaagaacaacucccaccacuacauccgggucggcaacgagaccggccucgagcugacccugacgaacaccagcauccucaaccacaaguucugcaaccuguccgacgcccacaagcgcaaccuguacgaccacagccucauguccaucaucagcaccuuccaccuguccauccccaacuucaaccaguacgaggccaugagcugcgacuucaacgggggcaagaucaccgugcaguacaaccugucccacagcuucgccguggacgccgcggggcacugcggcacgcucgccaacgggguccugcagaccuucaugcggauggccuggggcggcuccuacaucgcccuggacagcgggcgcggcaacugggacugcaucaugaccuccuaccaguaccucaucauccagaacaccacgugggacgaccacugccaguucagccggcccucccccaucggguaccugggccugcucagccagcgcacccgggacaucuacaucagccgccggcugcugggcaccuucaccuggacgcucuccgacagcgaggggaacgagaccccgggcggguacugccugacccgcuggaugcugaucgaggcggagcucaagugcuucggcaacaccgccguggccaagugcaacgagaagcacgacgaggaguucugcgacaugcugcggcuguucgacuucugcaagcaggccauccgccggcucaagacggaggcccagauguccauccagcugaucaacaaggcggugaacgcccugaucaacgaccagcucaucaugaagaaccaccuccgcgacaucauggggauccccuacugcaacuacagccgguacugguaccugaaccacaccuccaccggcaagaccagccugccccgcugcuggcugaucuccaacggcagcuaccugaacgagacgaaguucuccgacgacaucgagcagcaggccgacaacaugaucaccgagaugcuccagaaggaguacaucgaccggcaggggaagacgccccugggccuggucgaccuguucguguucagcaccuccuucuaccucaucagcaucuuccugcaccuggugaagaucccgacccaccgccacaucgucgggaagcccugccccaagccccaccggcucaaccacaugggcaucugcuccugcgggcuguacaagcagccgggcgugcccgugcgcuggaagcggugaggacuagucccuguucccagagcccacuuuuuuuucuuuuuuugaaauaaaauagccugucuuucagaucucaaaggcucuuuucagagccaccaaaaaaaaaaaaaaaaaaaaaaaaaaaaaaaaaaaaaaaaaaaaaaaaaaaaaaaaaaaaaaaaagaauu

SEQ ID NO: 36681 - RNA, 1717 nt, Artificial Sequence
  mRNA product Design a-1 (hSL-A64-N5) comprising derived and/or modified sequence from LASV(AV;Clade V)__CCA30314__GPCmut10 (opt1)
aggagagucccgcagucggcguccagcggcucugcuuguucgugugugugucguugcaggccuuauucaagcuuaccaugggccagaucgugaccuucuuccaggaggucccccacgugaucgaggaggugaugaacaucguccugaucgcccucagcauccuggccgugcugaaggggcucuacaacaucgcgaccugcggccugaucgggcugaucacguuccuccugcugugcggccgcuccugcagcuccaaccucuacaaggggguguacgagcugcagagccuggaccucaacauggagacccugaacaugugcaugccgcuguccugcaccaagaacaacagccaccacuacauccgggucggcaacgacacgggccucgagcugacccugaccaacaccuccauccucaaccacaaguucugcaaccugagcgacgcccacaagaaggaccuguacgaccacgcccucauguccaucaucagcacguuccaccuguccauccccaacuucaaccaguacgaggccaugagcugcgacuucaacgggggcaagaucuccgugcaguacaaccugagccacuccuacgccaucgacgcggccaaccacugcgggaccguggccaacggcauccuccagaccuucaugcgcauggccuggggcgggagcuacaucgcgcuggacuccggccgggggaacugggacugcaucaugaccagcuaccaguaccugaucauccagaacacgaccugggagaaccacugccaguucucccgccccagccccaucggcuaccucgggcugcugagccagcggacccgcgacaucuacaucucccggcgccuccugggcaccuucacguggacccugagcgacuccgagggcaacgccacccccgggggcuacugccucacccgguggaugcugaucgaggccgagcugaagugcuucgggaacacggccgucgccaagugcaacgagaagcacgacgaggaguucugcgacaugcuccgccuguucgacuucugcaagcaggcgaucagccggcugaaguccgaggcccagaugagcauccagcucaucaacaaggccgugaacgcccugaucaacgaccagcugaucaugaagaaccaccuccgcgacaucaugggcauccccuacugcaacuacuccaaguacugguaccugaaccacaccaucaccgggaagaccagccugcccaagugcuggcucguguccaacggcagcuaccugaacgagacgcacuucuccgacgacaucgagcagcaggccgacaacaugaucaccgagaugcugcagaaggaguacauggagcggcagggcaagaccccgcucgggcuggucgaccuguucguguucagcaccuccuucuaccugaucagcaucuuccuccgccuggugaagaucccgacgcaccggcacaucgucggcaagcccugccccaagccccaccgccugaaccacauggggaucugcuccugcggccucuacaagcagccgggggugcccgugcgguggaagcgcugaggacuagucccuguucccagagcccacuuuuuuuucuuuuuuugaaauaaaauagccugucuuucagaucucaaaggcucuuuucagagccaccaaaaaaaaaaaaaaaaaaaaaaaaaaaaaaaaaaaaaaaaaaaaaaaaaaaaaaaaaaaaaaaaagaauu

SEQ ID NO: 36682 - RNA, 1714 nt, Artificial Sequence
  mRNA product Design a-1 (hSL-A64-N5) comprising derived and/or modified sequence from LASV(Togo/2016/7082;Clade VI)__AMR44577__GPCmut10 (opt1)
aggagagucccgcagucggcguccagcggcucugcuuguucgugugugugucguugcaggccuuauucaagcuuaccaugggccagaucaucaccuucuuccaggaggugccccacgucaucgaggaggugaugaacaucgugcugaucgcccucagccugcuggccauccucaagggggucuacaacguggcgaccugcggcaucaucgggcuggugacguuccuguuccucugcggccgcuccugcagccugaucuacaagggguccuacgagcugcagacccucgagcugaacauggagacccugaacaugugcaugccgcucagcugcacgaagaacuccagccaccacuacauccgggucggcaacgagaccggccuggagcugacccucaccaacacguccaucaucaaccacaaguucugcaaccugagcgacgcccacaagcgcaaccuguacgaccacgcccucauguccauccugagcaccuuccaccuguccauccccaacuucaaccaguacgaggccaugagcugcgacuucaacgggggcaagaucuccgugcaguacaaccucagccacgccuacgcgguggacgccgccgagcacugcgggaccgucgccaacggcgugcugcagaccuucaugcggauggcguggggcggguccuacaucgcccuggacagcggccgcgggaacugggacugcaucaugacguccuaccaguaccucaucauccagaacaccaccugggaggaccacugccaguucagccggcccucccccaucggcuaccuggggcugcucagccagcgcacccgggacaucuacaucagccgccggcugcugggcacguucaccuggacccucuccgacagcgagggcaacgagacccccgggggcuacugccugacgcgcuggaugcugaucgaggccgagcucaagugcuucgggaacaccgccguggccaagugcaacgagaagcacgacgaggaguucugcgacaugcugcggcuguucgacuucugcaagcaggcgauccagcgccucaaguccgaggcccagaugagcauccagcugaucaacaaggccgucaacgcccugaucaacgaccagcucaucaugaagaaccaccuccgggacaugaugggcauccccuacugcaacuacuccaaguacugguaccugaaccacaccagcuccgggcgcaccagccugcccaagugcuggcugguguccaacggcagcuaccugaacgagacgcacuucuccgacgacaucgagcagcaggccgacaacaugaucaccgagaugcuccagaaggaguacaucgaccggcagggcaagaccccgcuggggcugguggaccucuucgucuucagcaccuccuucuaccugaucagcaucuuccugcaccugaucaagaucccgacgcaccgccacaucgugggcaagcccugccccaagccccaccggcucaaccacauggggaucugcuccugcggccuguacaagcagccgggggugcccacccgcuggaagcggugaggacuagucccuguucccagagcccacuuuuuuuucuuuuuuugaaauaaaauagccugucuuucagaucucaaaggcucuuuucagagccaccaaaaaaaaaaaaaaaaaaaaaaaaaaaaaaaaaaaaaaaaaaaaaaaaaaaaaaaaaaaaaaaaagaauu

SEQ ID NO: 36683 - RNA, 1714 nt, Artificial Sequence
  mRNA product Design a-1 (hSL-A64-N5) comprising derived and/or modified sequence from LASV(KAK-428;Clade n.d. (VII))__ANH09740__GPCmut10 (opt1)
aggagagucccgcagucggcguccagcggcucugcuuguucgugugugugucguugcaggccuuauucaagcuuaccaugggccagaucgugaccuucuuccaggaggucccccacgugaucgaggaggugaugaacaucguccugaucgcccucagccugcuggccauccucaaggggcuguacaacuucgcgaccugcggcgugaucgggcugaucacguuccuccugcugugcggccgcuccugcagcgccaccuacaaggggcaguacgagcuccagacccuggagcugaacauggagucccucaacaugugcaugccgcugagcugcacgaagaacaacucccaccacuacauccgggccggcaacaacaccggccuggagcucacccugaccaacacgagcaucaucucccacaaguucugcaaccugagcgacgcccacaagaagaaccucuacgaccacacccugauguccaucaucaccaccuuccaccugagcauccccaacuucaaccaguacgaggccauguccugcgacuucaacgggggcaagaucagcauccaguacaaccucucccacagcuacgcgggggacgccgcccagcacugcggcacgguggccaacgggguccugcagaccuucaugcgcauggcguggggcggcuccuaccuggcccucgacagcgggcggcgcggcugggacugcaucaucuccagcuaccaguaccugaucauccagaacaccaccugggacgaccacugccaguucucccggcccagccccaucggguaccugggcuucgugagccagaagacgcgcgacaucuacaucucccggcgccuccugggcaccuucaccuggacccugagcgacuccgaggggcacgacaugccgggcggguacugccucacgcgguggaugcugaucgaggccgaccugaagugcuucggcaacaccgccguggccaagugcaacgagaagcacgacgaggaguucugcgacauguggcgccucuucgacuucugcaagcaggcgauccagcggcugaaggccgaggcccagaugaacauccagcugaucaacaaggccgucaacgcccucaucaacgaccagcugaugaugaagaaccaccuccgcgacaucauggggauccccuacugcaacuacagcaaguucugguaccugaacaacaccaccacgggccggaccucccugccccgcugcuggcugaucagcaacggcuccuaccucaacgagacccacuucagcgacgacaucgagcagcaggcggacaacaugaucaccgagaugcugcagaaggaguacauggaccggcaggggaagacgccccugggccucguggaccuguucguguucuccaccagcuucuaccugaucaccaucuuccuccaccuggucaagaucccgacccaccgccacaucguggggaagcccugccccaagccccaccggcugaaccacaugggcaucugcuccugcgggcuguacaagcagccgggcgugcccguccgcuggaagcggugaggacuagucccuguucccagagcccacuuuuuuuucuuuuuuugaaauaaaauagccugucuuucagaucucaaaggcucuuuucagagccaccaaaaaaaaaaaaaaaaaaaaaaaaaaaaaaaaaaaaaaaaaaaaaaaaaaaaaaaaaaaaaaaaagaauu

SEQ ID NO: 36684 - RNA, 1714 nt, Artificial Sequence; identical to SEQ ID NO: 36678
  mRNA product Design a-1 (hSL-A64-N5) comprising derived and/or modified sequence from LASV(Pinneo-NIG-1969;Clade I)__AIT17836__GPCmut10 (opt1)

SEQ ID NO: 36685 - RNA, 1714 nt, Artificial Sequence
  mRNA product Design a-1 (hSL-A64-N5) comprising derived and/or modified sequence from LASV(ISTH0009-NIG-2011;Clade II)__AIT17404__GPCmut10 (opt1)
aggagagucccgcagucggcguccagcggcucugcuuguucgugugugugucguugcaggccuuauucaagcuuaccaugggccagaucaucaccuucuuccaggaggugccccacgucaucgaggaggugaugaacaucgugcugaucgcccucagccugcuggccauccucaaggggaucuacaacgucgcgaccugcggccuguucgggcugguguccuuccuccugcugugcggccgcagcugcuccacgaccuacaaggggguguacgagcuccagacccuggagcuggacauggccagccucaacaugugcaugccgcuguccugcacgaagaacaacagccaccacuacaucauggucggcaacgagaccggccuggagcucacccugaccaacacguccaucaucaaccacaaguucugcaaccugagcgacgcccacaagaagaaccucuacgaccacgcccugauguccaucaucagcaccuuccaccuguccauccccaacuucaaccaguacgaggccaugagcugcgacuucaacgggggcaagaucuccgugcaguacaaccucagccacgcguacgccguggacgccgccaaccacugcgggaccaucgcgaacggcguccugcagaccuucaugcggauggccuggggcggguccuacaucgcccuggacagcggcaagggguccugggacugcaucaugacgagcuaccaguaccucaucauccagaacaccaccugggaggaccacugccaguucucccgccccagccccaucggcuaccuggggcugcucagccagcggacccgcgacaucuacaucucccggcgccugcugggcacguucaccuggacccucagcgacuccgagggcaacgagacccccgggggcuacugccugacgcgguggaugcugaucgaggccgagcucaagugcuucgggaacaccgccguggcgaagugcaacgagaagcacgacgaggaguucugcgacaugcugcgccuguucgacuucugcaagcaggccauccggcgccucaagaccgaggcccagaugagcauccagcugaucaacaaggccgugaacgcccugaucaacgaccagcucaucaugaagaaccaccuccgggacaucaugggcaucccguacugcaacuacuccaaguacugguaccugaaccacaccgucacggggaagaccagccugccccgcugcuggcugguguccaacggcagcuaccugaacgagacccacuucuccgacgacaucgagcagcaggcggacaacaugaucaccgagcuccugcagaaggaguacauggaccggcagggcaagacgccccuggggcucguggaccuguucgucuucagcaccuccuucuaccugaucagcaucuuccugcaccucaucaagaucccgacccaccgccacaucaccggcaagcccugccccaagccccaccggcugaaccacauggggaucugcuccugcggccuguacaagcacccgggggugcccgugaaguggaagcgcugaggacuagucccuguucccagagcccacuuuuuuuucuuuuuuugaaauaaaauagccugucuuucagaucucaaaggcucuuuucagagccaccaaaaaaaaaaaaaaaaaaaaaaaaaaaaaaaaaaaaaaaaaaaaaaaaaaaaaaaaaaaaaaaaagaauu

SEQ ID NO: 36686 - RNA, 1714 nt, Artificial Sequence
  mRNA product Design a-1 (hSL-A64-N5) comprising derived and/or modified sequence from LASV(ISTH2010-NIG-2012;Clade II)__AIT17482__GPCmut10 (opt1)
aggagagucccgcagucggcguccagcggcucugcuuguucgugugugugucguugcaggccuuauucaagcuuaccaugggccagaucaucaccuucuuccaggaggugccccacgucaucgaggaggugaugaacaucgugcugaucgcccucagccugcuggccauccucaaggggaucuacaacgucgcgaccugcggccuguucgggcugguguccuuccuccugcugugcggccgcagcugcuccacgaccuacaaggggguguacgagcuccagacccuggagcuggacauggccagccucaacaugugcaugccgcuguccugcacgaagaacaacagccaccacuacaucauggucggcaacgagaccggccuggagcucacccugaccaacacguccaucaucaaccacaaguucugcaaccugagcgacgcccacaagaagaaccucuacgaccacgcccugauguccaucaucagcaccuuccaccuguccauccccaacuucaaccaguacgaggccaugagcugcgacuucaacgggggcaagaucuccgugcaguacaaccucagccacgcguacgccguggacgccgccaaccacugcgggaccaucgcgaacggcguccugcagaccuucaugcggauggccuggggcggguccuacaucgcccuggacagcggcaagggguccugggacugcaucaugacgagcuaccaguaccucaucauccagaacaucaccugggaggaccacugccaguucucccgccccagccccaucggcuaccuggggcugcucagccagcggacccgcgacaucuacaucucccggcgccugcugggcaccuucacguggacccucagcgacuccgagggcaacgagacccccgggggcuacugccugacccgguggaugcugaucgaggccgagcucaagugcuucgggaacacggccguggcgaagugcaacgagaagcacgacgaggaguucugcgacaugcugcgccuguucgacuucugcaagcaggccauccggcgccucaagaccgaggcccagaugagcauccagcugaucaacaaggccgugaacgcccugaucaacgaccagcucaucaugaagaaccaccuccgggacaucaugggcauccccuacugcaacuacuccaaguacugguaccugaaccacaccgucaccgggaagacgagccugccccgcugcuggcugguguccaacggcagcuaccugaacgagacccacuucuccgacgacaucgagcagcaggcggacaacaugaucaccgagcuccugcagaaggaguacaucgaccggcagggcaagaccccgcuggggcucguggaccuguucgucuucagcacguccuucuaccugaucagcaucuuccugcaccucgugaagaucccgacccaccgccacguggucggcaagcccugccccaagccccaccggcugaaccacauggggaucugcuccugcggccuguacaagcacccgggggugcccgugaaguggaagcgcugaggacuagucccuguucccagagcccacuuuuuuuucuuuuuuugaaauaaaauagccugucuuucagaucucaaaggcucuuuucagagccaccaaaaaaaaaaaaaaaaaaaaaaaaaaaaaaaaaaaaaaaaaaaaaaaaaaaaaaaaaaaaaaaaagaauu

SEQ ID NO: 36687 - RNA, 1714 nt, Artificial Sequence
  mRNA product Design a-1 (hSL-A64-N5) comprising derived and/or modified sequence from LASV(Lassa virus/H.sapiens-wt/NGA/2015/ISTH_0543;Clade II)__AVO03639__GPCmut10 (opt1)
aggagagucccgcagucggcguccagcggcucugcuuguucgugugugugucguugcaggccuuauucaagcuuaccaugggccagaucaucaccuucuuccaggaggugccccacgucaucgaggaggugaugaacaucgugcugaucgcccucagccugcuggccauccucaaggggaucuacaacgucgcgaccugcggccuguucgggcugguguccuuccuccugcugugcggccgcagcugcuccacgaccuacaaggggguguacgagcuccagacccuggagcuggacauggccaaccucaacaugugcaugccgcugagcugcacgaagaacaacucccaccacuacaucauggucggcaacgagaccggccuggagcucacccugaccaacacgagcaucaucaaccacaaguucugcaaccuguccgacgcccacaagaagaaccucuacgaccacgcccugaugagcaucaucuccaccuuccaccugagcauccccaacuucaaccaguacgaggccauguccugcgacuucaacgggggcaagaucagcgugcaguacaaccucucccacaccuacgcgguggacgccgccaaccacugcgggaccaucgccaacggcguccugcagacguucaugcggauggcguggggcgggagcuacaucgcccuggacuccggcaaggggagcugggacugcaucaugaccuccuaccaguaccucgugauccagaacaccaccugggaggaccacugccaguucagccgccccucccccaucggcuaccuggggcugcucagccagcggacgcgcgacaucuacaucagccggcgccugcugggcaccuucaccuggacccucuccgacagcgagggcaacgagacgcccgggggcuacugccugacccgguggaugcugaucgaggccgagcucaagugcuucgggaacaccgccguggccaagugcaacgagaagcacgacgaggaguucugcgacaugcugcgccuguucgacuucugcaagcaggcgauccggcgccucaagaccgaggcccagauguccauccagcugaucaacaaggccgucaacgcccugaucaacgaccagcucaucaugaagaaccaccuccgggacaucaugggcauccccuacugcaacuacagcaaguacugguaccugaaccacacggugaccgggaagaccucccugccccgcugcuggcuggugagcaacggcuccuaccugaacgagacccacuucagcgacgacaucgagcagcaggccgacaacaugaucacggagcuccugcagaaggaguacaucgaccggcagggcaagaccccgcuggggcucgucgaccuguucguguucuccaccagcuucuaccugaucuccaucuuccugcaccucgugaagaucccgacccaccgccacaucacgggcaagcccugccccaagccccaccggcugaaccacauggggaucugcagcugcggccuguacaagcacccggggguccccgugaaguggaagcgcugaggacuagucccuguucccagagcccacuuuuuuuucuuuuuuugaaauaaaauagccugucuuucagaucucaaaggcucuuuucagagccaccaaaaaaaaaaaaaaaaaaaaaaaaaaaaaaaaaaaaaaaaaaaaaaaaaaaaaaaaaaaaaaaaagaauu

SEQ ID NO: 36688 - RNA, 1714 nt, Artificial Sequence
  mRNA product Design a-1 (hSL-A64-N5) comprising derived and/or modified sequence from LASV(Lassa virus/H.sapiens-wt/NGA/2016/ISTH_0009;Clade II)__AVO03571__GPCmut10 (opt1)
aggagagucccgcagucggcguccagcggcucugcuuguucgugugugugucguugcaggccuuauucaagcuuaccaugggccagaucaucaccuucuuccaggaggugccccacgucaucgaggaggugaugaacaucgugcugaucgcccucagccugcuggccauccucaaggggaucuacaacgucgcgaccugcggccugcuggggcucguguccuuccugcugcucugcggccgcagcugcuccacgaccuacaaggggguguacgagcugcagacccuggagcucgacauggccagccugaacaugugcaugccgcuguccugcacgaagaacaacagccaccacuacaucauggucggcaacgagaccggccucgagcugacccugaccaacacguccaucaucaaccacaaguucugcaaccucagcgacgcccacaagaagaaccuguacgaccacgcccugauguccaucaucagcaccuuccaccucuccauccccaacuucaaccaguacgaggccaugagcugcgacuucaacgggggccggaucuccgugcaguacaaccugagccacuccuacgcgguggacgccgccaaccacugcgggaccaucgccaacggcguccugcagaccuucaugcgcauggcguggggcgggagcuacaucgcccucgacuccggcaaggggagcugggacugcaucaugacguccuaccaguaccugaucauccagaacaccaccugggaggaccacugccaguucagccggcccagccccaucggcuaccuggggcuccugucccagcgcacccgggacaucuacaucagccgccggcugcucggcacguucaccuggacccuguccgacagcgagggcaacgagacccccgggggcuacugccugacgcgcuggaugcucaucgaggccgagcugaagugcuucgggaacaccgccguggccaagugcaacgagaagcacgacgaggaguucugcgacaugcugcggcuguucgacuucugcaagcaggcgauccgccggcugaagaccgaggcccagauguccauccagcugaucaacaaggccgugaacgcccucaucaacgaccagcugaucaugaagaaccaccuccgcgacaucaugggcaucccguacugcaacuacagcaaguacugguaccucaaccacaccgucacggggaagaccucccugccccggugcuggcuggugagcaacggcuccuaccucaacgagacccacuucagcgacgacaucgagcagcaggccgacaacaugaucaccgagcugcugcagaaggaguacaucgaccgccagggcaagacgccccucgggcugguggaccuguucgucuucuccaccagcuucuaccugaucuccaucuuccuccaccuggugaagaucccgacccaccggcacaucaccggcaagcccugccccaagccccaccgccugaaccacauggggaucugcagcugcggccucuacaaccacccgggggugcccgucaaguggaagcggugaggacuagucccuguucccagagcccacuuuuuuuucuuuuuuugaaauaaaauagccugucuuucagaucucaaaggcucuuuucagagccaccaaaaaaaaaaaaaaaaaaaaaaaaaaaaaaaaaaaaaaaaaaaaaaaaaaaaaaaaaaaaaaaaagaauu

SEQ ID NO: 36689 - RNA, 1714 nt, Artificial Sequence
  mRNA product Design a-1 (hSL-A64-N5) comprising derived and/or modified sequence from LASV(Lassa virus/H.sapiens-wt/NGA/2016/ISTH_0017;Clade II)__AVO03567__GPCmut10 (opt1)
aggagagucccgcagucggcguccagcggcucugcuuguucgugugugugucguugcaggccuuauucaagcuuaccaugggccagaucaucaccuucuuccaggaggugccccacgucaucgaggaggugaugaacaucgugcugaucgcccucagccugcuggccauccucaaggggaucuacaacgucgcgaccugcggccuguucgggcugguguccuuccuccugcugugcggccgcagcugcuccacgaccuacaaggggguguacgagcuccagacccuggagcuggacauggccagccucaacaugugcaugccgcuguccugcacgaagaacaacagccaccacuacaucauggucggcaacgagaccggccuggagcucacccugaccaacacguccaucaucaaccacaaguucugcaaccugagcgacgcccacaagaagaaccucuacgaccacgcccugauguccaucaucagcaccuuccaccuguccauccccaacuucaaccaguacgaggccaugagcugcgacuucaacgggggcaagaucuccgugcaguacaaccucagccacaccuacgcgaucgacgccgccaaccacugcgggaccaucgccaacggcgugcugcagacguucaugcggauggcguggggcggguccuacaucgcccuggacagcggcaagggguccugggacugcaucaugaccagcuaccaguaccucaucauccagaacaccaccugggaggaccacugccaguucucccgccccagccccaucggcuaccuggggcugcucagccagcggacgcgcgacaucuacaucucccggcgccugcugggcaccuucaccuggacccucagcgacuccgagggcaacgagacgcccgggggcuacugccugacccgguggaugcugaucgaggccgagcucaagugcuucgggaacaccgccgucgccaagugcaacgagaagcacgacgaggaguucugcgacaugcugcgccuguucgacuucugcaagcaggcgauccggcgccucaagaccgaggcccagaugagcauccagcugaucaacaaggccgugaacgcccugaucaacgaccagcucaucaugaagaaccaccuccgggacaucaugggcauccccuacugcaacuacuccaaguacugguaccugaaccacacggugaccgggaagaccagccugccccgcugcuggcuggucuccaacggcagcuaccugaacgagacccacuucuccgacgacaucgagcagcaggccgacaacaugaucacggagcuccugcagaaggaguacauggaccggcagggcaagaccccgcuggggcucguggaccuguucguguucagcaccuccuucuaccugaucagcaucuuccugcaccucguccgcaucccgacccaccggcacgugaucggcaagcccugccccaagccccaccgccugaaccacauggggaucugcuccugcggccuguacaagcacccgggggugcccgucaaguggaagcggugaggacuagucccuguucccagagcccacuuuuuuuucuuuuuuugaaauaaaauagccugucuuucagaucucaaaggcucuuuucagagccaccaaaaaaaaaaaaaaaaaaaaaaaaaaaaaaaaaaaaaaaaaaaaaaaaaaaaaaaaaaaaaaaaagaauu

SEQ ID NO: 36690 - RNA, 1714 nt, Artificial Sequence
  mRNA product Design a-1 (hSL-A64-N5) comprising derived and/or modified sequence from LASV(Lassa virus/H.sapiens-wt/NGA/2018/ISTH_0959;Clade II)__AVV65099__GPCmut10 (opt1)
aggagagucccgcagucggcguccagcggcucugcuuguucgugugugugucguugcaggccuuauucaagcuuaccaugggccagaucaucaccuucuuccaggaggugccccacgucaucgaggaggugaugaacaucgugcugaucgcccucagccugcuggccauccucaaggggaucuacaacgucgugaccugcggccuguucgggcugguguccuuccuccugcugugcggccgcagcugcuccacgaccuacaagggggucuacgagcuccagacccuggagcuggacauggcgagccucaacaugugcaugccgcuguccugcacgaagaacaacagccaccacuacaucauggugggcaacgagaccggccuggagcucacccugaccaacacguccaucaucaaccacaaguucugcaaccugagcgacgcccacaagaagaaccucuacgaccacgcccugauguccaucaucagcaccuuccaccuguccauccccaacuucaaccaguacgaggccaugagcugcgacuucaacgggggcaagaucuccgugcaguacaaccucagccacgccuacgcgaucgacgccgccaaccacugcgggaccaucgccaacggcguccugcagaccuucaugcggauggcguggggcggguccuacaucgcccuggacagcggcaagggguccugggacugcaucaugacgagcuaccaguaccucaucauccagaacaccaccugggaggaccacugccaguucucccgccccagccccaucggcuaccuggggcugcucagccagcggacccgcgacaucuacaucucccggcgccugcugggcacguucaccuggacccucagcgacuccgagggcaacgagacccccgggggcuacugccugacgcgguggaugcugaucgaggccgagcucaagugcuucgggaacaccgccguggccaagugcaacgagaagcacgacgaggaguucugcgacaugcugcgccuguucgacuucugcaagcaggcgauccggcgccucaagaccgaggcccagaugagcauccagcugaucaacaaggccgugaacgcccugaucaacgaccagcucaucaugaagaaccaccuccgggacaucaugggcaucccguacugcaacuacuccaaguacugguaccugaaccacaccgucacggggaagaccagccugccccgcugcuggcugguguccaacggcagcuaccugaacgagacccacuucuccgacgacaucgagcagcaggccgacaacaugaucaccgagcuccugcagaaggaguacaucgaccggcagggcaagacgccccuggggcucguggaccuguucgucuucagcaccuccuucuaccugaucagcaucuuccugcaccucgugaagaucccgacccaccgccacgugaucggcaagcccugccccaagccccaccggcugaaccacauggggaucugcuccugcggccuguacaagcacccggggguccccgugaaguggaagcgcugaggacuagucccuguucccagagcccacuuuuuuuucuuuuuuugaaauaaaauagccugucuuucagaucucaaaggcucuuuucagagccaccaaaaaaaaaaaaaaaaaaaaaaaaaaaaaaaaaaaaaaaaaaaaaaaaaaaaaaaaaaaaaaaaagaauu

SEQ ID NO: 36691 - RNA, 1714 nt, Artificial Sequence
  mRNA product Design a-1 (hSL-A64-N5) comprising derived and/or modified sequence from LASV(LASV003-NIG-2008;Clade II)__AIT17580__GPCmut10 (opt1)
aggagagucccgcagucggcguccagcggcucugcuuguucgugugugugucguugcaggccuuauucaagcuuaccaugggccagaucaucaccuucuuccaggaggugccccacgucaucgaggaggugaugaacaucgugcugaucgcccucagccugcuggccauccucaaggggaucuacaacgucgcgaccugcggccuguucgggcugguguccuuccuccugcugugcggccgcagcugcuccacgaccuacaaggggguguacgagcuccagacccuggagcuggacauggccagccucaacaugugcaugccgcuguccugcacgaagaacaacagccaccacuacaucauggucggcaacgagaccggccuggagcucacccugaccaacacguccaucaucaaccacaaguucugcaaccugagcgacgcccacaagaagaaccucuacgaccacgcccugauguccaucaucagcaccuuccaccuguccauccccaacuucaaccaguacgaggccaugagcugcgacuucaacgggggcaagaucuccgugcaguacaaccucagccacaccuacgcgguggacgccgccaaccacugcgggaccaucgccaacggcguccugcagacguucaugcggauggcguggggcggguccuacaucgcccuggacagcggcaagggguccugggacugcaucaugaccagcuaccaguaccucaucauccagaacaccaccugggaggaccacugccaguucucccgccccagccccaucggcuaccuggggcugcucagccagcggacgcgcgacaucuacaucucccggcgccugcugggcaccuucaccuggacccucagcgacuccgagagcaacgagacgccgggcggguacugccugacccgguggaugcugaucgaggccgagcucaagugcuucggcaacaccgccguggccaagugcaacgagaagcacgacgaggaguucugcgacaugcugcgccuguucgacuucugcaagcaggcgauccggcgccucaaggccgaggcccagauguccauccagcugaucaacaaggccgugaacgcccugaucaacgaccagcucaucaugaagaaccaccuccgggacaucauggggauccccuacugcaacuacagcaaguacugguaccugaaccacaccgucacgggccgcaccucccugccccggugcuggcuggugagcaacggguccuaccugaacgagacccacuucagcgacgacaucgagcagcaggcggacaacaugaucaccgagcuccugcagaaggaguacauggaccgccagggcaagacgccccugggccucguggaccuguucgucuucuccaccagcuucuaccugaucuccaucuuccugcaccucgugaagaucccgacccaccggcacgugaucgggaagcccugccccaagccccaccgccugaaccacaugggcaucugcagcugcgggcuguacaagcacccgggcguccccgugaaguggaagcggugaggacuagucccuguucccagagcccacuuuuuuuucuuuuuuugaaauaaaauagccugucuuucagaucucaaaggcucuuuucagagccaccaaaaaaaaaaaaaaaaaaaaaaaaaaaaaaaaaaaaaaaaaaaaaaaaaaaaaaaaaaaaaaaaagaauu

SEQ ID NO: 36692 - RNA, 1714 nt, Artificial Sequence
  mRNA product Design a-1 (hSL-A64-N5) comprising derived and/or modified sequence from LASV(LASV035-NIG-2009;Clade II)__AIT17588__GPCmut10 (opt1)
aggagagucccgcagucggcguccagcggcucugcuuguucgugugugugucguugcaggccuuauucaagcuuaccaugggccagaucaucaccuucuuccaggaggugccccacgucaucgaggaggugaugaacaucgugcugaucgcccucagccugcuggccauccucaaggggaucuacaacgucgcgaccugcggccuguucgggcugguguccuuccuccugcugugcggccgcagcugcuccacgaccuacaaggggguguacgagcuccagacccuggagcuggacauggccagccucaacaugugcaugccgcuguccugcacgaagaacaacagccaccacuacaucauggucggcaacgagaccggccuggagcucacccugaccaacacguccaucaucaaccacaaguucugcaaccugagcgacgcccacaagaagaaccucuacgaccacgcccugauguccaucaucagcaccuuccaccuguccauccccaacuucaaccaguacgaggccaugagcugcgacuucaacgggggcaagaucuccgugcaguacaaccucagccacgcguacgccguggacgccgccaaccacugcgggaccaucgcgaacggcguccugcagaccuucaugcggauggccuggggcggguccuacaucgcccuggacagcggcaagggguccugggacugcaucaugacgagcuaccaguaccucaucauccagaacaccaccugggaggaccacugccaguucucccgccccagccccaucggcuaccuggggcugcucagccagcggacccgcgacaucuacaucucccggcgccugcugggcacguucaccuggacccucagcgacuccgagggcaacgagacccccgggggcuacugccugacgcgguggaugcugaucgaggccgagcucaagugcuucgggaacaccgccguggcgaagugcaacgagaagcacgacgaggaguucugcgacaugcugcgccuguucgacuucugcaagcaggccauccggcgccucaaggccgaggcccagaugagcauccagcugaucaacaaggccgugaacgcgcugaucaacgaccagcucaucaugaagaaccaccuccgggacaucaugggcauccccuacugcaacuacuccaaguacugguaccugaaccacaccgucaccgggaagacgagccugccccgcugcuggcugguguccaacggcagcuaccugaacgagacccacuucuccgacgacaucgagcagcaggccgacaacaugaucaccgagcuccugcagaaggaguacaucgaccggcagggcaagaccccgcuggggcucguggaccuguucgucuucagcacguccuucuaccugaucagcaucuuccugcaccucgugaagaucccgacccaccgccacgugaucggcaagcccugccccaagccccaccggcugaaccacauggggaucugcuccugcggccuguacaagcacccggggguccccgugaaguggaagcgcugaggacuagucccuguucccagagcccacuuuuuuuucuuuuuuugaaauaaaauagccugucuuucagaucucaaaggcucuuuucagagccaccaaaaaaaaaaaaaaaaaaaaaaaaaaaaaaaaaaaaaaaaaaaaaaaaaaaaaaaaaaaaaaaaagaauu

SEQ ID NO: 36693 - RNA, 1714 nt, Artificial Sequence
  mRNA product Design a-1 (hSL-A64-N5) comprising derived and/or modified sequence from LASV(LASV1000-NIG-2009;Clade II)__AIT17782__GPCmut10 (opt1)
aggagagucccgcagucggcguccagcggcucugcuuguucgugugugugucguugcaggccuuauucaagcuuaccaugggccagaucaucaccuucuuccaggaggugccccacgucaucgaggaggugaugaacaucgugcugaucgcccucagccugcuggccauccucaaggggaucuacaacgucgcgaccugcggccuguucgggcugguguccuuccuccugcugugcggccgcagcugcuccacgaccuacaaggggguguacgagcuccagacccuggagcuggacauggccagccucaacaugugcaugccgcuguccugcacgaagaacaacagccaccacuacaucauggucggcaacgagaccggccuggagcucacccugaccaacacguccaucaucaaccacaaguucugcaaccugagcgacgcccacaagaagaaccucuacgaccacgcccugauguccaucaucagcaccuuccaccuguccauccccaacuucaaccaguacgaggccaugagcugcgacuucaacgggggcaagaucuccgugcaguacaaccucagccacaccuacgcgguggacgccgccaaccacugcgggaccaucgccaacggcguccugcagacguucaugcggauggcguggggcggguccuacaucgcccuggacagcggcaagggguccugggacugcaucaugaccagcuaccaguaccucaucauccagaacaccaccugggaggaccacugccaguucucccgccccagccccaucggcuaccuggggcugcucagccagcggacgcgcgacaucuacaucucccggcgccugcugggcaccuucaccuggacccucagcgacuccgagggcaacgagacgcccgggggcuacugccugacccgguggaugcugaucgaggccgagcucaagugcuucgggaacaccgccguggccaagugcaacgagaagcacgacgaggaguucugcgacaugcugcgccuguucgacuucugcaagcaggcgaucaagcggcucaagaccgaggcccagaugagcauccagcugaucaacaaggccgugaacgcccugaucaacgaccagcucaucaugaagaaccaccuccgcgacaucaugggcauccccuacugcaacuacuccaaguacugguaccugaaccacacggucaccgggaagaccagccugccccggugcuggcugguguccaacggcagcuaccugaacgagacccacuucuccgacgacaucgagcagcaggccgacaacaugaucacggagcuccugcagaaggaguacaucgaccgccagggcaagaccccgcuggggcucguggaccuguucgucuucagcaccuccuucuaccugaucagcaucuuccugcaccucgugaagaucccgacccaccggcacguggucggcaagcccugccccaagccccaccgccugaaccacauggggaucugcuccugcggccuguacaagcacccgggggugcccgugaaguggaagcggugaggacuagucccuguucccagagcccacuuuuuuuucuuuuuuugaaauaaaauagccugucuuucagaucucaaaggcucuuuucagagccaccaaaaaaaaaaaaaaaaaaaaaaaaaaaaaaaaaaaaaaaaaaaaaaaaaaaaaaaaaaaaaaaaagaauu

SEQ ID NO: 36694 - RNA, 1714 nt, Artificial Sequence
  mRNA product Design a-1 (hSL-A64-N5) comprising derived and/or modified sequence from LASV(LASV221-NIG-2010;Clade II)__AIT17624__GPCmut10 (opt1)
aggagagucccgcagucggcguccagcggcucugcuuguucgugugugugucguugcaggccuuauucaagcuuaccaugggccagaucaucaccuucuuccaggaggugccccacgucaucgaggaggugaugaacaucgugcugaucgcccucagccugcuggccauccucaaggggaucuacaacgucgcgaccugcggccuguucgggcugguguccuuccuccugcugugcggccgcagcugcuccacgaccuacaaggggguguacgagcuccagacccuggagcuggacauggccagccucaacaugugcaugccgcuguccugcacgaagaacaacagccaccacuacaucauggucggcaacgagaccggccuggagcucacccugaccaacacguccaucaucaaccacaaguucugcaaccugagcgacgcccacaagaagaaccucuacgaccacgcccugauguccaucaucagcaccuuccaccuguccauccccaacuucaaccaguacgaggccaugagcugcgacuucaacgggggcaagaucuccgugcaguacaaccucagccacaccuacgcgaucgacgccgccaaccacugcgggaccaucgccaacggcgugcugcagacguucaugcggauggcguggggcggguccuacaucgcccuggacagcggcaagggguccugggacugcaucaugaccagcuaccaguaccucaucauccagaacaccaccugggaggaccacugccaguucucccgccccagccccaucggcuaccuggggcugcucagccagcggacgcgcgacaucuacaucucccggcgccugcugggcaccuucaccuggacccucagcgacuccgagggcaacgagacgcccgggggcuacugccugacccgguggaugcugaucgaggccgagcucaagugcuucgggaacaccgccgucgccaagugcaacgagaagcacgacgaggaguucugcgacaugcugcgccuguucgacuucugcaagcaggcgauccggcgccucaagaccgaggcccagaugagcauccagcugaucaacaaggccgugaacgcccugaucaacgaccagcucaucaugaagaaccaccuccgggacaucaugggcauccccuacugcaacuacuccaaguacugguaccugaaccacacggugaccgggaagaccagccugccccgcugcuggcuggucuccaacggcagcuaccugaacgagacccacuucuccgacgacaucgagcagcaggccgacaacaugaucacggagaugcuccagaaggaguacauggaccggcagggcaagaccccgcuggggcugguggaccucuucguguucagcaccuccuucuaccugaucagcaucuuccugcaccuggucaagaucccgacccaccgccacgugaucggcaagcccugccccaagccccaccggcucaaccacauggggaucugcuccugcggccuguacaagcacccgggggugcccgucaaguggaagcgcugaggacuagucccuguucccagagcccacuuuuuuuucuuuuuuugaaauaaaauagccugucuuucagaucucaaaggcucuuuucagagccaccaaaaaaaaaaaaaaaaaaaaaaaaaaaaaaaaaaaaaaaaaaaaaaaaaaaaaaaaaaaaaaaaagaauu

SEQ ID NO: 36695 - RNA, 1714 nt, Artificial Sequence
  mRNA product Design a-1 (hSL-A64-N5) comprising derived and/or modified sequence from LASV(LASV237-NIG-2010;Clade II)__AIT17638__GPCmut10 (opt1)
aggagagucccgcagucggcguccagcggcucugcuuguucgugugugugucguugcaggccuuauucaagcuuaccaugggccagaucaucaccuucuuccaggaggugccccacgucaucgaggaggugaugaacaucgugcugaucgcccucagccugcuggccauccucaaggggaucuacaacgucgcgaccugcggccuguucgggcugguguccuuccuccugcugugcggccgcagcugcuccacgaccuacaaggggguguacgagcuccagacccuggagcuggacauggccagccucaacaugugcaugccgcuguccugcacgaagaacaacagccaccacuacaucauggucggcaacgagaccggccuggagcucacccugaccaacacguccaucaucaaccacaaguucugcaaccugagcgacgcccacaagaaggaccucuacgaccacgcccugauguccaucaucagcaccuuccaccuguccauccccaacuucaaccaguacgaggccaugagcugcgacuucaacgggggcaagaucuccgugcaguacaaccucagccacaccuacgcgguggacgccgccaaccacugcgggaccaucgccaacggcguccugcagacguucaugcggauggcguggggcggguccuacaucgcccuggacagcggcaagggguccugggacugcaucaugaccagcuaccaguaccucaucauccagaacaccaccugggaggaccacugccaguucucccgccccagccccaucggcuaccuggggcugcucagccagcggacgcgcgacaucuacaucucccggcgccugcugggcaccuucaccuggacccucagcgacuccgagggcaacgagacgcccgggggcuacugccugacccgguggaugcugaucgaggccgagcucaagugcuucgggaacaccgccguggccaagugcaacgagaagcacgacgaggaguucugcgacaugcugcgccuguucgacuucugcaagcaggcgauccggcgccucaagaccgaggcccagaugagcauccagcugaucaacaaggccgugaacgcccugaucaacgaccagcucaucaugaagaaccaccuccgggacaucaugggcauccccuacugcaacuacuccaaguacugguaccugaaccacacggucaccgggaagaccagccugccccgcugcuggcugguguccaacggcagcuaccugaacgagacccacuucuccgacgacaucgagcagcaggccgacaacaugaucacggagcuccugcagaaggaguacauggaccggcagggcaagaccccgcuggggcucguggaccuguucgucuucagcaccuccuucuaccugaucagcaucuuccugcaccucaucaagaucccgacccaccgccacaucacgggcaagcccugccccaagccccaccggcugaaccacauggggaucugcuccugcggccuguacaagcacccgggggugcccgugaaguggaagcgcugaggacuagucccuguucccagagcccacuuuuuuuucuuuuuuugaaauaaaauagccugucuuucagaucucaaaggcucuuuucagagccaccaaaaaaaaaaaaaaaaaaaaaaaaaaaaaaaaaaaaaaaaaaaaaaaaaaaaaaaaaaaaaaaaagaauu

SEQ ID NO: 36696 - RNA, 1714 nt, Artificial Sequence
  mRNA product Design a-1 (hSL-A64-N5) comprising derived and/or modified sequence from LASV(LASV253-NIG-2011;Clade II)__AIT17670__GPCmut10 (opt1)
aggagagucccgcagucggcguccagcggcucugcuuguucgugugugugucguugcaggccuuauucaagcuuaccaugggccagaucaucaccuucuuccaggaggugccccacgucaucgaggaggugaugaacaucgugcugaucgcccucagccugcuggccauccucaaggggaucuacaacgucgcgaccugcggccuguucgggcugguguccuuccuccugcugugcggccgcagcugcuccacgaccuacaaggggguguacgagcuccagacccuggagcuggacauggccagccucaacaugugcaugccgcuguccugcacgaagaacaacagccaccacuacaucauggucggcaacgagaccggccuggagcucacccugaccaacacguccaucaucaaccacaaguucugcaaccugagcgacgcccacaagaagaaccucuacgaccacgcccugauguccaucaucagcaccuuccaccuguccauccccaacuucaaccaguacgaggccaugagcugcgacuucaacgggggcaagaucuccgugcaguacaaccucagccacaccuacgcgguggacgccgccaaccacugcgggaccaucgccaacggcguccugcagacguucaugcggauggcguggggcggguccuacaucgcccuggacagcggcaagggguccugggacugcaucaugaccagcuaccaguaccucaucauccagaacaccaccugggaggaccacugccaguucucccgccccagccccaucggcuaccuggggcugcucagccagcggacgcgcgacaucuacaucucccggcgccugcugggcaccuucaccuggacccucagcgacuccgagggcaacgagacgcccgggggcuacugccugacccgguggaugcugaucgaggccgagcucaagugcuucgggaacaccgccguggccaagugcaacgagaagcacgacgaggaguucugcgacaugcugcgccuguucgacuucugcaagcaggcgauccggcgccucaaggccgaggcccagaugagcauccagcugaucaacaaggccgugaacgcccugaucaacgaccagcucaucaugaagaaccaccuccgggacaucaugggcaucccguacugcaacuacuccaaguacugguaccugaaccacaccgucacggggcgcaccagccugccccggugcuggcugguguccaacggcagcuaccugaacgagacccacuucuccgacgacaucgagcagcaggcggacaacaugaucaccgagcuccugcagaaggaguacaucgaccgccagggcaagacgccccuggggcucguggaccuguucgucuucagcaccuccuucuaccugaucagcaucuuccugcaccucgugaagaucccgacccaccggcacaucaucggcaagcccugccccaagccccaccgccugaaccacauggggaucugcuccugcggccuguacaagcacccgggggugcccgucaaguggaagcggugaggacuagucccuguucccagagcccacuuuuuuuucuuuuuuugaaauaaaauagccugucuuucagaucucaaaggcucuuuucagagccaccaaaaaaaaaaaaaaaaaaaaaaaaaaaaaaaaaaaaaaaaaaaaaaaaaaaaaaaaaaaaaaaaagaauu

SEQ ID NO: 36697 - RNA, 1714 nt, Artificial Sequence
  mRNA product Design a-1 (hSL-A64-N5) comprising derived and/or modified sequence from LASV(LASV254-NIG-2011;Clade II)__AIT17674__GPCmut10 (opt1)
aggagagucccgcagucggcguccagcggcucugcuuguucgugugugugucguugcaggccuuauucaagcuuaccaugggccagaucaucaccuucuuccaggaggugccccacgucaucgaggaggugaugaacaucgugcugaucgcccucagccugcuggccauccucaaggggaucuacaacgucgcgaccugcggccuguucgggcugguguccuuccuccugcugugcggccgcagcugcuccacgaccuacaaggggguguacgagcuccagacccuggagcuggacaugaccaaccucaacaugugcaugccgcugagcugcaccaagaacaacucccaccacuacaucauggucggcaacgagaccggccuggagcucacccugacgaacaccagcaucaucaaccacaaguucugcaaccuguccgacgcccacaagaagaaccucuacaaccacgcccugaugagcaucaucuccaccuuccaccugagcauccccaacuucaaccaguacgaggccauguccugcgacuucaacgggggcaagaucagcgugcaguacaaccucucccacagcuacgccguggacgcggccaaccacugcgggaccaucgccaacggcguccugcagacguucaugcggauggccuggggcggguccuacaucgcgcuggacagcggcaaggggaacugggacugcaucaugaccuccuaccaguaccucaucauccagaacaccaccugggaggaccacugccaguucagccgccccucccccaucggcuaccuggggcugcucagccagcggacgcgcgacaucuacaucagccggcgccugcugggcaccuucaccuggacccucuccgacagcgagggcaacgagacgcccgggggcuacugccugacccgguggaugcugaucgaggccgagcucaagugcuucgggaacaccgccguggccaagugcaacgagaagcacgacgaggaguucugcgacaugcugcgccuguucgacuucugcaagcaggccauccggcgccucaagaccgaggcgcaggccaacauccagcugaucaacaaggccgugaacgcccugaucaacgaccagcucaucaugaagaaccaccuccgggacaucaugggcauccccuacugcaacuacuccaaguacugguaccugaaccacacggucaccgggaagaccagccugccccgcugcuggcugguguccaacggcagcuaccugaacgagacccacuucuccgacgacaucgagcagcaggccgacaacaugaucacggagcuccugcagaaggaguacauggaccggcagggcaagaccccgcuggggcucguggaccuguucgucuucagcaccuccuucuaccugaucagcaucuuccugcaccucgugaagaucccgacccaccgccacgugaucggcaagcccugccccaagccccaccggcugaaccacauggggaucugcuccugcggccuguacaagcacccggggguccccgugaaguggaagcgcugaggacuagucccuguucccagagcccacuuuuuuuucuuuuuuugaaauaaaauagccugucuuucagaucucaaaggcucuuuucagagccaccaaaaaaaaaaaaaaaaaaaaaaaaaaaaaaaaaaaaaaaaaaaaaaaaaaaaaaaaaaaaaaaaagaauu

SEQ ID NO: 36698 - RNA, 1714 nt, Artificial Sequence
  mRNA product Design a-1 (hSL-A64-N5) comprising derived and/or modified sequence from LASV(Nig08-A19;Clade III)__ADU56618__GPCmut10 (opt1)
aggagagucccgcagucggcguccagcggcucugcuuguucgugugugugucguugcaggccuuauucaagcuuaccaugggccagaucgugaccuucuuccaggaggucccccacgugaucgaggaggugaugaacaucguccugaucgcccucagcauccuggccauccugaaggggcucuacaacaucgcgaccugcggccugaucgggcuggugacguuccuccugcuguccggccgcagcugcuccaugaccuacaaggggguguacgagcuccagacccuggagcugaacaugaacacccucaacaugugcaugccgcugagcugcaccaagaacaacucccaccacuacaucauggucggcaacgagaccggccuggagcucacccugacgaacaccagccugcuccaccacaaguucugcaaccuguccgacgcccacaagaagaaccuguacgaccacacccucaugagcaucaucuccaccuuccaccugagcauccccaacuucaaccaguacgaggccauguccugcgacuucaacgggggcaagaucacggugcaguacaaccugagccacuccuacgccaucgacgccgcgaaccacugcgggaccguggccaacggcguccuccagaccuucaugcggauggccuggggcgggagcuacaucgcccuggacuccggccgcgggaagugggacugcaucaugaccagcuaccaguaccugaucauccagaacacgaccugggaggaccacugccaguucucccggcccagccccaucggcuaccucgggcugcugucccagcgcacccgggacaucuacaucagccgccggcuccugggcaccuucacguggacccugagcgacuccgagggcaacgagacccccgggggcuacugccucacccgcuggaugcugaucgaggcggagcugaagugcuucgggaacacggccguggccaagugcaacgagaagcacgacgaggaguucugcgacaugcuccggcuguucgacuucugcaagcaggccauccgccggcugaaggccgaggcgcagaugagcauccagcucaucaacaaggccgugaacgcccugaucaacgaccagcugaucaugaagaaccaccuccgcgacaucaugggcauccccuacugcaacuacuccaaguacugguaccugaaccacaccagcaccgggcggaccucccugccccgcugcuggcucgucagcaacggcuccuaccugaacgagacgcacuucagcgacgacaucgagcagcaggccgacaacaugaucaccgagaugcugcagaaggaguaccucgaccggcagggcaagaccccgcuggggcugguggaccuguucguguucuccaccagcuucuaccucaucuccaucuuccugcaccuggucaagaucccgacgcaccgccacaucgugggcaagcccugccccaagccccaccggcucaaccacauggggaucugcagcugcggccuguacaagcagccgggggugcccguccgcuggaagcggugaggacuagucccuguucccagagcccacuuuuuuuucuuuuuuugaaauaaaauagccugucuuucagaucucaaaggcucuuuucagagccaccaaaaaaaaaaaaaaaaaaaaaaaaaaaaaaaaaaaaaaaaaaaaaaaaaaaaaaaaaaaaaaaaagaauu

SEQ ID NO: 36699 - RNA, 1717 nt, Artificial Sequence
  mRNA product Design a-1 (hSL-A64-N5) comprising derived and/or modified sequence from LASV(G1180-SLE-2010;Clade IV)__AIT17168__GPCmut10 (opt1)
aggagagucccgcagucggcguccagcggcucugcuuguucgugugugugucguugcaggccuuauucaagcuuaccaugggccagaucgugaccuucuuccaggaggucccccacgugaucgaggaggugaugaacaucguccugaucgcccucagcauccuggccgugcugaaggggcucuacaacuucgcgaccugcggccugguggggcugcucaccuuccugcugcucugcggccgcuccugcaccgccagccgguacaagggggucuacgagcugcagacccuggagcucaacauggagacccugaacaugugcaugccgcuguccugcaccaagaacaacagccaccacuacaucauggugggcaacgagaccggccucgagcugacccugacgaacaccuccaucaucaaccacaaguucugcaaccucagcgacgcccacaagaagaaccuguacgaccacgcccugauguccaucaucagcaccuuccaccucuccauccccaacuucaaccaguacgaggccaugagcugcgacuucaacgggggcaagaucuccgugcaguacaaccugagccacuccuacgcgggggacgccgccaaccacugcggcaccgucgccaacggggugcugcagacguucaugcgcauggcguggggcggcagcuacaucgcccucgacuccgggcacggcagcugggacugcaucaugaccuccuaccaguaccugaucauccagaacaccaccugggaggaccacugccaguucagccggcccucccccaucggguaccugggccuccugagccagcgcacgcgggacaucuacaucagccgccggcugcucggcaccuucaccuggacccuguccgacagcgaggggaaggacacgccgggcggguacugccugacccgcuggaugcucaucgaggccgagcugaagugcuucggcaacaccgccguggccaagugcaacgagaagcacgacgaggaguucugcgacaugcugcggcuguucgacuucugcaagcaggcgauccagcgccugaaggccgaggcccagauguccauccagcugaucaacaaggccgucaacgcccucaucaacgaccagcugaucaugaagaaccaccuccgggacaucauggggauccccuacugcaacuacagcaaguacugguaccucaaccacaccacgaccggcaagaccucccugcccaagugcuggcuggugagcaacggcuccuaccucaacgagacccacuucagcgacgacaucgagcagcaggcggacaacaugaucacggagaugcugcagaaggaguacauggagcgccaggggaagacgccccugggccucguggaccuguucgucuucuccaccagcuucuaccugaucuccaucuuccugcaccucgugaagaucccgacccaccggcacaucgugggcaagagcugccccaagccccaccgccugaaccacauggggaucugcuccugcgggcuguacaagcagcccggcgucccggugaaguggaagcggugaggacuagucccuguucccagagcccacuuuuuuuucuuuuuuugaaauaaaauagccugucuuucagaucucaaaggcucuuuucagagccaccaaaaaaaaaaaaaaaaaaaaaaaaaaaaaaaaaaaaaaaaaaaaaaaaaaaaaaaaaaaaaaaaagaauu

SEQ ID NO: 36700 - RNA, 1717 nt, Artificial Sequence
  mRNA product Design a-1 (hSL-A64-N5) comprising derived and/or modified sequence from LASV(G1442-SLE-2011;Clade IV)__AIT17180__GPCmut10 (opt1)
aggagagucccgcagucggcguccagcggcucugcuuguucgugugugugucguugcaggccuuauucaagcuuaccaugggccagaucgugaccuucuuccaggaggucccccacgugaucgaggaggugaugaacaucguccugaucgcccucagcauccuggccgugcugaaggggcucuacaacguggcgaccugcggccugaucgggcuggucacguuccuccugcugugcggccgcuccugcaccaccacccucuacaaggggguguacgagcugcagacgcuggagcucaacauggagacccugaacaugugcaugccgcugagcugcaccaagaacaacucccaccacuacauccgggugggcaacgagacgggccucgagcugacccugaccaacaccagcaucaucaaccacaaguucugcaaccucuccgacgcccacaagaagaaccuguacgaccacgcccugaugagcaucaucuccacguuccaccucagcauccccaacuucaaccaguacgaggccauguccugcgacuucaacgggggcaagaucagcguccaguacaaccugucccacagcuacgccggggacgcggccaaccacugcggcaccguggccaacggggugcugcagaccuucaugcgcauggccuggggcggcuccuacaucgcgcucgacagcgggcggggcaacugggacugcaucaugaccuccuaccaguaccugaucauccagaacacgaccugggacgaccacugccaguucagccgccccucccccaucggguaccugggccuccugagccagcggacccgcgacgucuacaucucccggcgccugcucggcaccuucacguggacccugagcgacagcgaggggaaggacaccccgggcggguacugccugacccgguggaugcucaucgaggccgagcugaagugcuucggcaacacggccguggccaagugcaacgagaagcacgacgaggaguucugcgacaugcugcgccucuucgacuucugcaagcaggccauccagcggcugaaggcggaggcccagauguccauccagcugaucaacaaggccgugaacgcccucaucaacgaccagcugaucaugaagaaccaccuccgcgacaucauggggauccccuacugcaacuacagcaaguacugguaccugaacaacaccgccaccggcaagaccucccugcccaagugcuggcugaucagcaacggcuccuaccucaacgagacgcacuucagcgacgacaucgagcaggaggcggacaacaugaucaccgagaugcugcagaaggaguacauggagcggcaggggaagacgccccugggccucgucgaccuguucguguucuccaccagcuucuaccugaucuccaucuuccugcaccucgugaagaucccgacccaccgccacaucgucggcaagagcugccccaagccccaccggcugaaccacauggggaucugcuccugcgggcuguacaagcagcccggcgugccggugcgcuggaagcggugaggacuagucccuguucccagagcccacuuuuuuuucuuuuuuugaaauaaaauagccugucuuucagaucucaaaggcucuuuucagagccaccaaaaaaaaaaaaaaaaaaaaaaaaaaaaaaaaaaaaaaaaaaaaaaaaaaaaaaaaaaaaaaaaagaauu

SEQ ID NO: 36701 - RNA, 1717 nt, Artificial Sequence
  mRNA product Design a-1 (hSL-A64-N5) comprising derived and/or modified sequence from LASV(G3010-SLE-2013;Clade IV)__AIT17344__GPCmut10 (opt1)
aggagagucccgcagucggcguccagcggcucugcuuguucgugugugugucguugcaggccuuauucaagcuuaccaugggccagaucgugaccuucuuccaggaggucccccacgugaucgaggaggugaugaacaucguccugaucgcccucagcauccuggccgugcugaaggggcucuacaacuucgcgaccugcggccugguggggcuggucacguuccuccugcugugcggccgcuccugcaccaccagccucuacaaggggguguacgagcugcagacccuggagcucaacauggagacgcugaacaugugcaugccgcuguccugcaccaagaacaacagccaccacuacaucauggugggcaacgagaccggccucgagcugacgcugaccaacaccuccaucaucaaccacaaguucugcaaccucagcgacgcccacaagaagaaccuguacaaccacgcccugauguccaucaucagcaccuuccaccucuccauccccaacuucaaccaguacgaggccaugagcugcgacuucaacgggggcaagaucuccguccaguacaaccugagccacuccuacgccggggacgcggccagccacugcggcacgguggccaacggggugcugcagaccuucaugcggauggccuggggcggcuccuacaucgcgcucgacagcggguacggcaagugggacugcaucaugaccuccuaccaguaccugaucauccagaacaccacgugggaggaccacugccaguucagccgccccucccccaucggguaccugggccuccugagccagcggacccgcgacaucuacaucagccggcgccugcucggcaccuucaccuggacgcuguccgacagcgaggggaaggacaccccgggcggguacugccugacccgguggaugcucaucgaggccgagcugaagugcuucggcaacaccgccgucgccaagugcaacgagaagcacgacgaggaguucugcgacaugcugcgccucuucgacuucugcaagcaggccauccagcggcugaagacggaggcgcagauguccauccagcugaucaacaaggccgugaacgcccucaucaacgaccagcugaucaugaagaaccaccuccgcgacaucauggggauccccuacugcaacuacagcaaguacugguaccugaaccacaccaccaccggcaagacgucccugcccaagugcuggcuggugagcaacggcuccuaccucaacgagacccacuucagcgacgacaucgagcagcaggccgacaacaugaucaccgagaugcugcagaaggaguacauggagcggcaggggaagacgccccugggccucgucgaccuguucguguucuccaccagcuucuaccugaucuccaucuuccugcaccucgugaagaucccgacccaccgccacaucgucggcaagagcugccccaagccccaccggcugaaccacauggggaucugcuccugcgggcuguacaagcagcccggcgugccggugcgcuggaagcggugaggacuagucccuguucccagagcccacuuuuuuuucuuuuuuugaaauaaaauagccugucuuucagaucucaaaggcucuuuucagagccaccaaaaaaaaaaaaaaaaaaaaaaaaaaaaaaaaaaaaaaaaaaaaaaaaaaaaaaaaaaaaaaaaagaauu

SEQ ID NO: 36702 - RNA, 1717 nt, Artificial Sequence
  mRNA product Design a-1 (hSL-A64-N5) comprising derived and/or modified sequence from LASV(G502-SLE-2009;Clade IV)__AIT17126__GPCmut10 (opt1)
aggagagucccgcagucggcguccagcggcucugcuuguucgugugugugucguugcaggccuuauucaagcuuaccaugggccagaucgugaccuucuuccaggaggucccccacgugaucgaggaggugaugaacaucguccugaucgcccucagcauccuggccgugcugaaggggcucuacaacuucgcgaccugcggccugguggggcugcucacguuccugcugcucugcggccgcuccugcaccaccgggcuguacaagggcgucuacgagcugcagacccucgagcugaacauggagacgcugaacaugugcaugccgcucagcugcaccaagaacaacucccaccacuacaucauggugggcaacgagaccgggcuggagcugacgcucaccaacaccagcaucaucaaccacaaguucugcaaccuguccgacgcccacaagaagaaccuguacgaccacgcccucaugagcaucaucuccaccuuccaccugagcauccccaacuucaaccaguacgaggccauguccugcgacuucaacggcgggaagaucagcgugcaguacaaccugucccacagcuacgccggcgacgcggccgaccacugcgggacggucgccaacggcgugcuccagaccuucaugcggauggccuggggcggguccuacaucgcgcuggacagcggccgcgggcggugggacugcaucaugaccuccuaccaguaccugaucauccagaacaccacgugggaggaccacugccaguucagccgccccucccccaucggcuaccucggccugcugagccagcggacccgcgacaucuacaucucccggcgccuccuggggaccuucaccuggacgcugagcgacagcgagggcaaggacacccccgggggcuacugccucacccgguggaugcugaucgaggccgagcugaagugcuucgggaacaccgccguggccaagugcaacgagaagcacgacgaggaguucugcgacaugcuccgccuguucgacuucugcaagcaggccauccagcggcugaaggcggaggcccagauguccauccagcucaucaacaaggccgucaacgcccugaucaacgaccagcuggugaugaagaaccaccuccgcgacaucaugggcauccccuacugcaacuacagccgguacugguaccugaaccacacgaccaccggccgcaccucccugcccaagugcuggcucgugagcaacggguccuaccugaacgagacgcacuucagcgacgacaucgagcagcaggccgacaacaugaucaccgagaugcugcagaaggaguacauggagcggcagggcaagaccccgcucgggcuggucgaccuguucguguucuccaccagcuucuaccugaucuccaucuuccuccaccuggugaagaucccgacgcaccgccacaucgucggcaagagcugccccaagccccaccggcugaaccacauggggaucugcuccugcggccucuacaagcagcccggcgugccggugaaguggaagcgcugaggacuagucccuguucccagagcccacuuuuuuuucuuuuuuugaaauaaaauagccugucuuucagaucucaaaggcucuuuucagagccaccaaaaaaaaaaaaaaaaaaaaaaaaaaaaaaaaaaaaaaaaaaaaaaaaaaaaaaaaaaaaaaaaagaauu

SEQ ID NO: 36703 - RNA, 1717 nt, Artificial Sequence
  mRNA product Design a-1 (hSL-A64-N5) comprising derived and/or modified sequence from LASV(G733-SLE-2010;Clade IV)__AIT17154__GPCmut10 (opt1)
aggagagucccgcagucggcguccagcggcucugcuuguucgugugugugucguugcaggccuuauucaagcuuaccaugggccagaucgugaccuucuuccaggaggucccccacgugaucgaggaggugaugaacaucguccugaucgcccucagcauccuggccgugcugaaggggcucuacaacuucgcgaccugcggcaucguggggcuggucuccuuccugcuccugugcggccgcagcugcacgaccucccuguacaaggggguguacgagcuccagacccuggagcugaacauggagacccucaacaugugcaugccgcugagcugcaccaagaacaacucccaccacuacaucauggugggcaacgagaccggccuggagcucacccugacgaacaccagcaucaucaaccacaaguucugcaaccuguccgacgcccacaagaagaaccucuacgaccacgcccugaugagcaucaucuccaccuuccaccugagcauccccaacuucaaccaguacgaggccauguccugcgacuucaacgggggcaagaucagcguccaguacaaccucucccacagcuacgccggggacgcggccaaccacugcggcaccaucgccaacggggugcugcagacguucaugcggauggccuggggcggcuccuacaucgcgcuggacagcgggcgcgaccggugggacugcaucaugaccuccuaccaguaccucaucauccagaacaccaccugggaggaccacugccaguucagccgccccucccccaucggcuaccuggggcugcucagccagcggacgcgcgacaucuacaucagccggcgccugcugggcaccuucaccuggacccucuccgacagcgagggcaaggacacgcccgggggcuacugccugacccgguggaugcugaucgaggccgagcucaagugcuucgggaacaccgccguggccaagugcaacgagaagcacgacgaggaguucugcgacaugcugcgccuguucgacuucugcaagcaggccauccagcggcucaaggcggaggcccagauguccauccagcugaucaacaaggccgucaacgcccugaucaacgaccagcucaucaugaagaaccaccuccgcgacaucaugggcauccccuacugcaacuacagcaaguacugguaccugaaccacaccacgaccgggaagaccucccugcccaagugcuggcuggugagcaacggcuccuaccugaacgagacccacuucagcgacgacaucgagcagcaggccgacaacaugaucacggagaugcuccagaaggaguacauggagcggcagggcaagaccccgcuggggcugguggaccucuucgucuucuccaccagcuucuaccugaucuccaucuuccugcaccuggugaagaucccgacccaccgccacguggucggcaagagcugccccaagccccaccggcucaaccacauggggaucugcuccugcggccuguacgggcagcccggcgugccggugaaguggaagcgcugaggacuagucccuguucccagagcccacuuuuuuuucuuuuuuugaaauaaaauagccugucuuucagaucucaaaggcucuuuucagagccaccaaaaaaaaaaaaaaaaaaaaaaaaaaaaaaaaaaaaaaaaaaaaaaaaaaaaaaaaaaaaaaaaagaauu

SEQ ID NO: 36704 - RNA, 1717 nt, Artificial Sequence
  mRNA product Design a-1 (hSL-A64-N5) comprising derived and/or modified sequence from MOPV/LASV reassortant(IGS-1;Clade IV)__AFY05576__GPCmut10 (opt1)
aggagagucccgcagucggcguccagcggcucugcuuguucgugugugugucguugcaggccuuauucaagcuuaccaugggccagaucgugaccuucuuccaggaggucccccacgugaucgaggaggugaugaacaucguccugaucgcccucagcgugcuggccgugcugaaggggcucuacaacuucgcgaccugcggccuggucgggcuggugacguuccuccugcugugcggccgcuccugcaccaccagccucuacaaggggguguacgagcugcagacccuggagcucaacauggagacgcugaacaugugcaugccgcuguccugcaccaagaacaacagccaccacuacaucauggucggcaacgagaccggccucgagcugacgcugaccaacaccuccaucaucaaccacaaguucugcaaccucagcgacgcccacaagaagaaccuguacgaccacgcccugauguccaucaucagcaccuuccaccucuccauccccaacuucaaccaguacgaggccaugagcugcgacuucaacgggggcaagaucuccgugcaguacaaccugagccacuccuacgccggggacgcggccaaccacugcggcacgguggccaacgggguccugcagaccuucaugcggauggccuggggcggcagcuacaucgcgcucgacuccgggcgcggcaacugggacugcaucaugaccagcuaccaguaccugaucauccagaacaccacgugggaggaccacugccaguucucccggcccagccccaucggguaccugggccuccugucccagcgcacccgggacaucuacaucagccgccggcugcucggcaccuucaccuggacgcugagcgacuccgagggggaggacaccccgggcggguacugccugacccgcuggaugcucaucgaggccgagcugaagugcuucggcaacaccgccguggccaagugcaacgagaagcacgacgaggaguucugcgacaugcugcggcuguucgacuucugcaagcaggccauccagcgccugaaggcggaggcccagaugagcauccagcugaucaacaaggccgugaacgcccucaucaacgaccagcugaucaugaagaaccaccuccgggacaucauggggauccccuacugcaacuacuccaaguacugguaccucaaccacacgaccaccggccgcaccagccugcccaagugcuggcuggucuccaacggcagcuaccucaacgagacgcacuucuccgacgacaucgagcagcaggccgacaacaugaucaccgagaugcugcagaaggaguacauggagcggcaggggaagacgccccugggccucguggaccuguucguguucagcaccuccuucuaccugaucagcaucuuccugcaccucgucaagaucccgacccaccgccacaucguggggaaguccugccccaagccccaccggcugaaccacaugggcaucugcagcugcgggcuguacaagcagcccggcgugccggucaaguggaagcgcugaggacuagucccuguucccagagcccacuuuuuuuucuuuuuuugaaauaaaauagccugucuuucagaucucaaaggcucuuuucagagccaccaaaaaaaaaaaaaaaaaaaaaaaaaaaaaaaaaaaaaaaaaaaaaaaaaaaaaaaaaaaaaaaaagaauu

SEQ ID NO: 36705 - RNA, 1717 nt, Artificial Sequence
  mRNA product Design a-1 (hSL-A64-N5) comprising derived and/or modified sequence from LASV(LM765-SLE-2012;Clade IV)__AIT17814__GPCmut10 (opt1)
aggagagucccgcagucggcguccagcggcucugcuuguucgugugugugucguugcaggccuuauucaagcuuaccaugggccagaucgugaccuucuuccaggaggucccccacgugaucgaggaggugaugaacaucguccugaucgcccucagcauccuggccgugcugaaggggcucuacaacuucgcgaccugcggccugguggggcuggucacguuccuccugcugugcggccgcuccugcaccaccagccucuacaaggggguguacgagcugcagacccuggagcucaacauggagacgcugaacaugugcaugccgcuguccugcaccaagaacaacagccaccacuacaucauggugggcaacgagaccggccucgagcugacgcugaccaacaccuccaucaucgaccacaaguucugcaaccucagcgacgcccaccggaagaaccuguacgaccacgcccugauguccaucaucagcaccuuccaccucuccauccccaacuucaaccaguacgaggccaugagcugcgacuucaacgggggcaagaucuccguccaguacaaccugagccacuccuacgccaaggacgcggccgaccacugcgggacgguggccaacggcgugcugcagaccuucaugcgcauggccuggggcgggagcuacaucgcgcucgacuccggccgggggcgcugggacugcaucaugaccagcuaccaguaccugaucauccagaacaccacgugggaggaccacugccaguucucccggcccagccccaucggcuaccuggggcuccugucccagcgcacccgggacaucuacaucagccgccggcugcucggcaccuucaccuggacgcugagcgacuccgagggcaaggacacccccgggggcuacugccugacccgcuggaugcucaucgaggccgagcugaagugcuucgggaacaccgccgucgccaagugcaacgagaagcacgacgaggaguucugcgacaugcugcggcuguucgacuucugcaagcaggccauccagcgccugaaggcggaggcccagaugagcauccagcugaucaacaaggccgugaacgcccucaucaacgaccagcugaucaugaagaaccaccuccgggacaucaugggcauccccuacugcaacuacuccaaguacugguaccucaaccacacgaccaccgggaagaccagccugcccaagugcuggcugguguccaacggcagcuaccucaacgagacgcacuucuccgacgacaucgagcagcaggccgacaacaugaucaccgagaugcugcagaaggaguacauggagcgccagggcaagaccccgcuggggcucgucgaccuguucguguucagcaccuccuucuaccugaucagcaucuuccugcaccucgugaagaucccgacgcaccggcacaucgucggcaagcccugccccaagccccaccgccugaaccacauggggaucugcuccugcggccuguacaagcagccgggggugcccgugaaguggaagcggugaggacuagucccuguucccagagcccacuuuuuuuucuuuuuuugaaauaaaauagccugucuuucagaucucaaaggcucuuuucagagccaccaaaaaaaaaaaaaaaaaaaaaaaaaaaaaaaaaaaaaaaaaaaaaaaaaaaaaaaaaaaaaaaaagaauu

SEQ ID NO: 36706 - RNA, 1717 nt, Artificial Sequence
  mRNA product Design a-1 (hSL-A64-N5) comprising derived and/or modified sequence from LASV(LM776-SLE-2012;Clade IV)__AIT17824__GPCmut10 (opt1)
aggagagucccgcagucggcguccagcggcucugcuuguucgugugugugucguugcaggccuuauucaagcuuaccaugggccagaucgugaccuucuuccaggaggucccccacgugaucgaggaggugaugaacaucguccugaucgcccucagcauccuggccgugcugaaggggcucuacaacuucgcgaccugcggccugguggggcuggucacguuccuccugcugugcggccgcuccugcaccaccagcguguacaaggggguguacgagcuccagacccuggagcugaacauggagacgcucaacaugugcaugccgcuguccugcaccaagaacaacagccaccacuacaucauggucggcaacgagaccggccuggagcucacgcugaccaacaccuccaucaucaaccacaaguucugcaaccugagcgacgcccacaagaagaaccucuacgaccacgcccugauguccaucaucagcaccuuccaccuguccauccccaacuucaaccaguacgaggccaugagcugcgacuucaacgggggcaagaucuccgugcaguacaaccucagccacuccuacgccggggacgcggccaaccacugcggcacgguggccaacgggguccugcagaccuucaugcggauggccuggggcggcagcuacaucgcgcuggacuccgggcacggcaagugggacugcaucaugaccagcuaccaguaccucaucauccagaacaccacgugggaggaccacugccaguucucccgccccagccccaucggguaccugggccugcucucccagcggacccgcgacaucuacaucagccggcgccugcugggcaccuucaccuggacgcucagcgacuccgaggggaaggacaccccgggcggguacugccugacccgguggaugcugaucgaggccgagcucaagugcuucggcaacaccgccguggccaagugcaacgagaagcacgacgaggaguucugcgacaugcugcgccuguucgacuucugcaagcaggccauccagcggcucaaggcggaggcccagaugagcauccagcugaucaacaaggccgugaacgcccugaucaacgaccagcucaucaugaagaaccaccuccgcgacaucauggggauccccuacugcaacuacuccaaguacugguaccugaaccacacgaccaccggcaagaccagccugcccaagugcuggcuggucuccaacggcagcuaccugaacgagacgcacuucuccgacgacaucgagcagcaggccgacaacaugaucaccgagaugcuccagaaggaguacauggagcggcaggggaagacgccccugggccugguggaccucuucguguucagcaccuccuucuaccugaucagcaucuuccugcaccuggucaagaucccgacccaccgccacaucguggggaaguccugccccaagccccaccggcucaaccacaugggcaucugcagcugcgggcuguacaagcagcccggcgugccgguccgcuggaagcggugaggacuagucccuguucccagagcccacuuuuuuuucuuuuuuugaaauaaaauagccugucuuucagaucucaaaggcucuuuucagagccaccaaaaaaaaaaaaaaaaaaaaaaaaaaaaaaaaaaaaaaaaaaaaaaaaaaaaaaaaaaaaaaaaagaauu

SEQ ID NO: 36707 - RNA, 1717 nt, Artificial Sequence
  mRNA product Design a-1 (hSL-A64-N5) comprising derived and/or modified sequence from LASV(Mad39;Clade IV)__ANH09722__GPCmut10 (opt1)
aggagagucccgcagucggcguccagcggcucugcuuguucgugugugugucguugcaggccuuauucaagcuuaccaugggccagaucgugaccuucuuccaggaggucccccacgugaucgaggaggugaugaacaucguccugaucgcccucagcauccuggccgugcugaaggggcucuacaacguggcgaccugcggccugaucgggcuggucacguuccuccugcugugcggccgcuccugcaccaccacccucuacaaggggguguacgagcugcaggcccuggagcucaacauggagacgcugaacaugugcaugccgcugagcugcaccaagaacaacucccaccacuacauccgggugggcaacgagaccggccucgagcugacgcugaccaacaccagccucaucaaccacaaguucugcaaccuguccgacgcccacaagaagaaccuguacgaccacgcccucaugagcaucaucuccaccuuccaccugagcauccccaacuucaaccaguacgaggccauguccugcgacuucaacgacgggaagaucagcguccaguacaaccugucccacacguacgcgggcgacaccgccaaccacugcgggaccguggccaacggcgugcuccagaccuucaugcgcauggccuggggcgggagcuacaucgcgcuggacuccggccgcgggggcugggacugcaucaugacgagcuaccaguaccugaucauccagaacaccaccugggaggaccacugccaguucucccggcccagccccaucggguaccucggccugcugucccagcggacccgcgacaucuacaucagccggcgccuccugggcacguucaccuggacccuguccgacagcgaggggaaggacaccccgggcggguacugccucacgcgguggaugcugaucgaggccgagcugaagugcuucggcaacaccgccgucgccaagugcaacgagaagcacgacgaggaguucugcgacaugcuccgccuguucgacuucugcaagcaggccauccagcggcugaaggcggaggcccagaugagcauccagcucaucaacaaggccgugaacgcccugaucaacgaccagcugaucaugaagaaccaccuccgcgacaucauggggauccccuacugcaacuacuccaaguacugguaccugaaccacaccgugaccggcaagacgagccugcccaagugcuggcucgucuccaacggcagcuaccugaacgagacccacuucuccgacgacaucgagcagcaggccgacaacaugaucaccgagaugcugcagaaggaguacauggagcggcaggggaagacgccccucggccugguggaccuguucguguucagcaccuccuucuaccugaucagcaucuuccuccaccuggucaagaucccgacccaccgccacgugguggggaagcccugccccaagccccaccggcugaaccacaugggcaucugcuccugcggguucuacaagcagccgggcguccccgugcgcuggaagcggugaggacuagucccuguucccagagcccacuuuuuuuucuuuuuuugaaauaaaauagccugucuuucagaucucaaaggcucuuuucagagccaccaaaaaaaaaaaaaaaaaaaaaaaaaaaaaaaaaaaaaaaaaaaaaaaaaaaaaaaaaaaaaaaaagaauu

SEQ ID NO: 36708 - RNA, 1717 nt, Artificial Sequence
  mRNA product Design a-1 (hSL-A64-N5) comprising derived and/or modified sequence from LASV(Z0947-SLE-2011;Clade IV)__AIT17840__GPCmut10 (opt1)
aggagagucccgcagucggcguccagcggcucugcuuguucgugugugugucguugcaggccuuauucaagcuuaccaugggccagaucgugaccuucuuccaggaggucccccacgugaucgaggaggugaugaacaucguccugaucgcccucagcauccuggccgugcugaaggggcucuacaacuucgcgaccugcggccugguggggcuggucacguuccuccugcugugcggccgcuccugcaccaucagccucuacaaggggguguacgagcugcagacccuggagcucaacauggagacccugaacaugugcaugccgcuguccugcaccaagaacaacagccaccacuacaucauggugggcaacgagaccggccucgagcugacccugacgaacaccuccaucaucaaccacaaguucugcaaccucagcgacgcccacaagaagaaccuguacgaccacgcccugauguccaucaucagcaccuuccaccucuccauccccaacuucaaccaguacgaggccaugagcugcgacuucaacgggggcaagaucuccguccaguacaaccugagccacuccuacgccggggacgcggccaaccacugcggcaccguggccaacggggugcugcagacguucaugcggauggccuggggcggcagcuacaucgcgcucgacuccgggcgcgaccggugggacugcaucaugaccagcuaccaguaccugaucauccagaacaccaccugggaggaccacugccaguucucccgccccagccccaucggcuaccuggggcuccugucccagcggacgcgcgacaucuacaucagccggcgccugcucggcaccuucaccuggacccugagcgacuccgagggcaaggacacgcccgggggcuacugccugacccgguggaugcucaucgaggccgagcugaagugcuucgggaacaccgccgucgccaagugcaacgagaagcacgacgaggaguucugcgacaugcugcgccucuucgacuucugcaagcaggccauccagcggcugaaggcggaggcccagaugagcauccagcugaucaacaaggccgugaacgcccucaucaacgaccagcugaucaugaagaaccaccuccgcgacaucaugggcauccccuacugcaacuacuccaaguacugguaccugaaccacaccacgaccgggaagaccagccugcccaagugcuggcugguguccaacggcagcuaccucaacgagacccacuucuccgacgacaucgagcagcaggccgacaacaugaucacggagaugcugcagaaggaguacauggagcggcagggcaagaccccgcuggggcucgucgaccuguucguguucagcaccuccuucuaccugaucagcaucuuccugcaccucgugaagaucccgacccaccgccacaucgucggcaagcccugccccaagccccaccggcugaaccacauggggaucugcuccugcggccuguacaagcagccgggggugcccgugaaguggaagcgcugaggacuagucccuguucccagagcccacuuuuuuuucuuuuuuugaaauaaaauagccugucuuucagaucucaaaggcucuuuucagagccaccaaaaaaaaaaaaaaaaaaaaaaaaaaaaaaaaaaaaaaaaaaaaaaaaaaaaaaaaaaaaaaaaagaauu

SEQ ID NO: 36709 - RNA, 1717 nt, Artificial Sequence
  mRNA product Design a-1 (hSL-A64-N5) comprising derived and/or modified sequence from LASV(Josiah;Clade IV)__NP_694870__GPCmut10 (opt1)
aggagagucccgcagucggcguccagcggcucugcuuguucgugugugugucguugcaggccuuauucaagcuuaccaugggccagaucgugaccuucuuccaggaggucccccacgugaucgaggaggugaugaacaucguccugaucgcccucagcgugcuggccgugcugaaggggcucuacaacuucgcgaccugcggccuggucgggcuggugaccuuccuccugcugugcggccgcuccugcaccaccagccucuacaaggggguguacgagcugcagacccuggagcucaacauggagacgcugaacaugugcaugccgcuguccugcaccaagaacaacagccaccacuacaucauggucggcaacgagaccggccucgagcugacccugacgaacaccuccaucaucaaccacaaguucugcaaccucagcgacgcccacaagaagaaccuguacgaccacgcccugauguccaucaucagcaccuuccaccucuccauccccaacuucaaccaguacgaggccaugagcugcgacuucaacgggggcaagaucuccgugcaguacaaccugagccacuccuacgccggggacgcggccaaccacugcggcaccguggccaacgggguccugcagacguucaugcggauggccuggggcggcagcuacaucgcgcucgacuccgggcgcggcaacugggacugcaucaugaccagcuaccaguaccugaucauccagaacaccaccugggaggaccacugccaguucucccggcccagccccaucggguaccugggccuccugucccagcgcacgcgggacaucuacaucagccgccggcugcucggcaccuucaccuggacccugagcgacuccgaggggaaggacacgccgggcggguacugccugacccgcuggaugcucaucgaggccgagcugaagugcuucggcaacaccgccguggccaagugcaacgagaagcacgacgaggaguucugcgacaugcugcggcuguucgacuucugcaagcaggccauccagcgccugaaggcggaggcccagaugagcauccagcugaucaacaaggccgugaacgcccucaucaacgaccagcugaucaugaagaaccaccuccgggacaucauggggauccccuacugcaacuacuccaaguacugguaccucaaccacaccacgaccggccgcaccagccugcccaagugcuggcuggucuccaacggcagcuaccucaacgagacccacuucuccgacgacaucgagcagcaggccgacaacaugaucacggagaugcugcagaaggaguacauggagcggcaggggaagacgccccugggccugguggaccucuucguguucagcaccuccuucuaccugaucagcaucuuccugcaccucgucaagaucccgacccaccgccacaucguggggaaguccugccccaagccccaccggcugaaccacaugggcaucugcagcugcgggcuguacaagcagcccggcgugccggucaaguggaagcgcugaggacuagucccuguucccagagcccacuuuuuuuucuuuuuuugaaauaaaauagccugucuuucagaucucaaaggcucuuuucagagccaccaaaaaaaaaaaaaaaaaaaaaaaaaaaaaaaaaaaaaaaaaaaaaaaaaaaaaaaaaaaaaaaaagaauu

SEQ ID NO: 36710 - RNA, 1714 nt, Artificial Sequence
  mRNA product Design a-1 (hSL-A64-N5) comprising derived and/or modified sequence from LASV(LP;Clade I)__AAF86701__GPCmut10 (opt1)
aggagagucccgcagucggcguccagcggcucugcuuguucgugugugugucguugcaggccuuauucaagcuuaccaugggccagaucaucaccuucuuccaggaggugccccacgucaucgaggaggugaugaacaucgugcugaucgcccucagccugcuggccauccucaaggggcuguacaacaucgcgaccugcggcaucaucgggcuggucgccuuccucuuccugugcggcaaguccugcagccugacgcucaagggcggguacgagcugcagacccuggagcucaacauggagacccugaacaugugcaugccgcuguccugcaccaagaacagcucccaccacuacauccgcgugggcaacgagacggggcucgagcugacccugaccaacaccagcaucaucaaccacaaguucugcaaccucuccgacgcccacaagaagaaccuguacgaccacgcccugaugagcaucaucuccacguuccaccucagcauccccaacuucaaccaguacgaggccauguccugcgacuucaacggcgggaagaucagcgugcaguacaaccugucccacagcuacgcgggcgacgccgccgagcacugcgggaccgucgccaacggcgugcugcagaccuucaugcggauggcguggggcgggcgcuacaucgcccucgacuccggcaaggggaacugggacugcaucaugaccagcuaccaguaccugaucauccagaacacgaccugggaggaccacugccaguucucccggcccagccccaucggcuaccugggccuccugucccagcgcacccgggacaucuacaucagccgccggcugcucgggaccuucacguggacccugagcgacuccgagggcaacgagacccccgggggcuacugccugacccgcuggaugcucaucgaggccgagcugaagugcuucgggaacacggccguggccaagugcaacgagaagcacgacgaggaguucugcgacaugcugcggcuguucgacuucugcaagcaggcgauccgccggcugaaggccgaggcccagaugagcauccagcugaucaacaaggccgucaacgcccucaucaacgaccagcugaucaugaagaaccaccuccgcgacaucaugggcauccccuacugcaacuacuccaaguacugguaccucaaccacaccagcuccggccggaccagccugcccaagugcuggcugaucuccaacgggagcuaccucaacgagacccaguucuccgacgacaucgagcagcaggcggacaacaugaucacggagaugcugcagaaggaguacaucgagcgccagggcaagaccccgcuggggcugguggacaucuucaucuucagcaccuccuucuaccucaucagcaucuuccugcaccugaucaagaucccgacccaccggcacaucgugggcaagcccugccccaagccccaccgccucaaccacaugggggucugcuccugcggccuguacaagcacccgggcgugcccacgaaguggaagcggugaggacuagucccuguucccagagcccacuuuuuuuucuuuuuuugaaauaaaauagccugucuuucagaucucaaaggcucuuuucagagccaccaaaaaaaaaaaaaaaaaaaaaaaaaaaaaaaaaaaaaaaaaaaaaaaaaaaaaaaaaaaaaaaaagaauu

SEQ ID NO: 36711 - RNA, 1714 nt, Artificial Sequence
  mRNA product Design a-1 (hSL-A64-N5) comprising derived and/or modified sequence from LASV(803213;Clade II)__AAF86703__GPCmut10 (opt1)
aggagagucccgcagucggcguccagcggcucugcuuguucgugugugugucguugcaggccuuauucaagcuuaccaugggccagaucaucaccuucuuccaggaggugccccacgucaucgaggaggugaugaacaucgugcugaucgcccucagccugcuggccauccucaaggggaucuacaacgucgcgaccugcggccuguucgggcugaucuccuuccuccugcugugcggccgcagcugcuccgugacguacaaggggguguacgagcuccagacccuggagcugaacauggccaaccucaacaugugcaugccgcugagcugcaccaagaacaacucccaccacuacaucauggucggcaacgagaccggccuggagcucacgcugaccaacaccagcaucaucaaccacaaguucugcaaccuguccgacgcccacaagaagaaccucuacgaccacgcccugaugagcaucaucuccaccuuccaccugagcauccccaacuucaaccaguacgaggccauguccugcgacuucaacgggggcaagaucagcgugcaguacaaccucucccacagcuucgcgguggacgccgccaaccacugcgggacgaucgccaacggcguccugcagaccuucaugcggauggcguggggcggguccuacaucgcccuggacagcggcaaggggaacugggacugcaucaugaccuccuaccaguaccucaucauccagaacaccacgugggaggaccacugccaguucagccgccccucccccaucggcuaccuggggcugcucagccagcggacccgcgacaucuacaucagccggcgccugcugggcaccuucaccuggacgcucuccgacagcgagggcaacgaggcccccgggggcuacugccugacccgguggaugcugaucgaggccgagcucaagugcuucgggaacaccgccguggcgaagugcaacgagaagcacgacgaggaguucugcgacaugcugcgccuguucgacuucugcaagcaggccaucaagcggcucaagaccgaggcccagauguccauccagcugaucaacaaggccgugaacgcccugaucaacgaccagcucaucaugaagaaccaccuccgcgacaucaugggcauccccuacugcaacuacagccgguacugguaccugaaccacacggucaccgggaagaccucccugccccgcugcuggcuggugagcaacggcuccuaccugaacgagacccacuucagcgacgacaucgagcagcaggcggacaacaugaucacggagaugcuccagaaggaguacauggaccggcagggcaagaccccgcuggggcugguggaccuguucgucuucuccaccagcuucuaccucaucuccaucuuccugcaccuggugaagaucccgacccaccgccacaucgugggcaagcccugccccaagccccaccggcucaaccacauggggaucugcagcugcggccuguacaagcacccggggguccccgugaaguggaagcgcugaggacuagucccuguucccagagcccacuuuuuuuucuuuuuuugaaauaaaauagccugucuuucagaucucaaaggcucuuuucagagccaccaaaaaaaaaaaaaaaaaaaaaaaaaaaaaaaaaaaaaaaaaaaaaaaaaaaaaaaaaaaaaaaaagaauu

SEQ ID NO: 36712 - RNA, 1714 nt, Artificial Sequence
  mRNA product Design a-1 (hSL-A64-N5) comprising derived and/or modified sequence from LASV(GA391;Clade III)__CAA36645__GPCmut10 (opt1)
aggagagucccgcagucggcguccagcggcucugcuuguucgugugugugucguugcaggccuuauucaagcuuaccaugggccagaucgugaccuucuuccaggaggucccccacgugaucgaggaggugaugaacaucguccugaucgcccucagcauccuggccauccugaaggggcucuacaacguggcgaccugcggccugaucgggcuggugaccuuccuccugcuguccggccgcagcugcucccucaucuacaaggggaccuacgagcugcagacccuggagcucaacauggagacccugaacaugugcaugccgcugagcugcacgaagaacaacucccaccacuacauccgggucggcaacgagaccggccucgagcugacccugaccaacacgagcauccucaaccacaaguucugcaaccuguccgacgcccacaagcgcaaccuguacgaccacagccucauguccaucaucagcaccuuccaccuguccauccccaacuucaaccaguacgaggccaugagcugcgacuucaacgggggcaagaucaccgugcaguacaaccugucccacagcuucgccguggacgccgcggggcacugcggcacccucgccaacgggguccugcagacguucaugcggauggccuggggcggcuccuacaucgcccuggacagcgggcgcggcaacugggacugcaucaugaccuccuaccaguaccucaucauccagaacaccaccugggacgaccacugccaguucagccggcccucccccaucggguaccugggccugcucagccagcgcacgcgggacaucuacaucagccgccggcugcugggcaccuucaccuggacccucuccgacagcgaggggaacgagacgccgggcggguacugccugacccgcuggaugcugaucgaggcggagcucaagugcuucggcaacaccgccguggccaagugcaacgagaagcacgacgaggaguucugcgacaugcugcggcuguucgacuucugcaagcaggccauccgccggcucaagaccgaggcccagauguccauccagcugaucaacaaggcggugaacgcccugaucaacgaccagcucaucaugaagaaccaccuccgcgacaucauggggauccccuacugcaacuacagccgguacugguaccugaaccacacguccaccggcaagaccagccugccccgcugcuggcugaucuccaacggcagcuaccugaacgagaccaaguucuccgacgacaucgagcagcaggccgacaacaugaucacggagaugcugcagaaggaguacaucgaccggcaggggaagacgccccucggccuggucgaccuguucguguucagcaccuccuucuaccucaucagcaucuuccugcaccuggugaagaucccgacccaccgccacaucgucgggaagcccugccccaagccccaccggcucaaccacaugggcaucugcuccugcgggcuguacaagcagccgggcgugcccgugcgcuggaagcggugaggacuagucccuguucccagagcccacuuuuuuuucuuuuuuugaaauaaaauagccugucuuucagaucucaaaggcucuuuucagagccaccaaaaaaaaaaaaaaaaaaaaaaaaaaaaaaaaaaaaaaaaaaaaaaaaaaaaaaaaaaaaaaaaagaauu

SEQ ID NO: 36713 - RNA, 1717 nt, Artificial Sequence
  mRNA product Design a-1 (hSL-A64-N5) comprising derived and/or modified sequence from LASV(AV;Clade V)__CCA30314__GPCmut10 (opt1)
aggagagucccgcagucggcguccagcggcucugcuuguucgugugugugucguugcaggccuuauucaagcuuaccaugggccagaucgugaccuucuuccaggaggucccccacgugaucgaggaggugaugaacaucguccugaucgcccucagcauccuggccgugcugaaggggcucuacaacaucgcgaccugcggccugaucgggcugaucacguuccuccugcugugcggccgcuccugcagcuccaaccucuacaaggggguguacgagcugcagagccuggaccucaacauggagacccugaacaugugcaugccgcuguccugcaccaagaacaacagccaccacuacauccgggucggcaacgacaccggccucgagcugacgcugaccaacaccuccauccucaaccacaaguucugcaaccugagcgacgcccacaagaaggaccuguacgaccacgcccucauguccaucaucagcaccuuccaccuguccauccccaacuucaaccaguacgaggccaugagcugcgacuucaacgggggcaagaucuccgugcaguacaaccugagccacuccuacgccaucgacgcggccaaccacugcgggacgguggccaacggcauccuccagaccuucaugcgcauggccuggggcgggagcuacaucgcgcuggacuccggccgggggaacugggacugcaucaugaccagcuaccaguaccugaucauccagaacaccacgugggagaaccacugccaguucucccgccccagccccaucggcuaccucgggcugcugagccagcggacccgcgacaucuacaucucccggcgccuccugggcaccuucaccuggacgcugagcgacuccgagggcaacgccacccccgggggcuacugccucacccgguggaugcugaucgaggccgagcugaagugcuucgggaacaccgccgucgccaagugcaacgagaagcacgacgaggaguucugcgacaugcuccgccuguucgacuucugcaagcaggcgaucagccggcugaaguccgaggcccagaugagcauccagcucaucaacaaggccgugaacgcccugaucaacgaccagcugaucaugaagaaccaccuccgcgacaucaugggcauccccuacugcaacuacuccaaguacugguaccugaaccacacgaucaccgggaagaccagccugcccaagugcuggcucguguccaacggcagcuaccugaacgagacccacuucuccgacgacaucgagcagcaggccgacaacaugaucacggagaugcugcagaaggaguacauggagcggcagggcaagaccccgcuggggcucgucgaccuguucguguucagcaccuccuucuaccugaucagcaucuuccuccgccuggugaagaucccgacccaccggcacaucgucggcaagcccugccccaagccccaccgccugaaccacauggggaucugcuccugcggccucuacaagcagccgggggugcccgugcgguggaagcgcugaggacuagucccuguucccagagcccacuuuuuuuucuuuuuuugaaauaaaauagccugucuuucagaucucaaaggcucuuuucagagccaccaaaaaaaaaaaaaaaaaaaaaaaaaaaaaaaaaaaaaaaaaaaaaaaaaaaaaaaaaaaaaaaaagaauu

SEQ ID NO: 36714 - RNA, 1714 nt, Artificial Sequence
  mRNA product Design a-1 (hSL-A64-N5) comprising derived and/or modified sequence from LASV(Togo/2016/7082;Clade VI)__AMR44577__GPCmut10 (opt1)
aggagagucccgcagucggcguccagcggcucugcuuguucgugugugugucguugcaggccuuauucaagcuuaccaugggccagaucaucaccuucuuccaggaggugccccacgucaucgaggaggugaugaacaucgugcugaucgcccucagccugcuggccauccucaagggggucuacaacguggcgaccugcggcaucaucgggcuggugacguuccuguuccucugcggccgcuccugcagccugaucuacaagggguccuacgagcugcagacccucgagcugaacauggagacccugaacaugugcaugccgcucagcugcaccaagaacuccagccaccacuacauccgggucggcaacgagacgggccuggagcugacccucaccaacaccuccaucaucaaccacaaguucugcaaccugagcgacgcccacaagcgcaaccuguacgaccacgcccucauguccauccugagcacguuccaccuguccauccccaacuucaaccaguacgaggccaugagcugcgacuucaacgggggcaagaucuccgugcaguacaaccucagccacgccuacgcgguggacgccgccgagcacugcgggaccgucgccaacggcgugcugcagaccuucaugcggauggcguggggcggguccuacaucgcccuggacagcggccgcgggaacugggacugcaucaugaccuccuaccaguaccucaucauccagaacacgaccugggaggaccacugccaguucagccggcccucccccaucggcuaccuggggcugcucagccagcgcacccgggacaucuacaucagccgccggcugcugggcaccuucacguggacccucuccgacagcgagggcaacgagacccccgggggcuacugccugacccgcuggaugcugaucgaggccgagcucaagugcuucgggaacacggccguggccaagugcaacgagaagcacgacgaggaguucugcgacaugcugcggcuguucgacuucugcaagcaggcgauccagcgccucaaguccgaggcccagaugagcauccagcugaucaacaaggccgucaacgcccugaucaacgaccagcucaucaugaagaaccaccuccgggacaugaugggcauccccuacugcaacuacuccaaguacugguaccugaaccacaccagcuccgggcgcaccagccugcccaagugcuggcugguguccaacggcagcuaccugaacgagacccacuucuccgacgacaucgagcagcaggccgacaacaugaucacggagaugcuccagaaggaguacaucgaccggcagggcaagaccccgcuggggcugguggaccuguucgucuucagcaccuccuucuaccucaucagcaucuuccugcaccugaucaagaucccgacccaccgccacaucgugggcaagcccugccccaagccccaccggcucaaccacauggggaucugcuccugcggccuguacaagcagccgggggugcccacgcgcuggaagcggugaggacuagucccuguucccagagcccacuuuuuuuucuuuuuuugaaauaaaauagccugucuuucagaucucaaaggcucuuuucagagccaccaaaaaaaaaaaaaaaaaaaaaaaaaaaaaaaaaaaaaaaaaaaaaaaaaaaaaaaaaaaaaaaaagaauu

SEQ ID NO: 36715 - RNA, 1714 nt, Artificial Sequence
  mRNA product Design a-1 (hSL-A64-N5) comprising derived and/or modified sequence from LASV(KAK-428;Clade n.d. (VII))__ANH09740__GPCmut10 (opt1)
aggagagucccgcagucggcguccagcggcucugcuuguucgugugugugucguugcaggccuuauucaagcuuaccaugggccagaucgugaccuucuuccaggaggucccccacgugaucgaggaggugaugaacaucguccugaucgcccucagccugcuggccauccucaaggggcuguacaacuucgcgaccugcggcgugaucgggcugaucacguuccuccugcugugcggccgcuccugcagcgccaccuacaaggggcaguacgagcuccagacccuggagcugaacauggagucccucaacaugugcaugccgcugagcugcaccaagaacaacucccaccacuacauccgggccggcaacaacacgggccuggagcucacccugaccaacaccagcaucaucucccacaaguucugcaaccugagcgacgcccacaagaagaaccucuacgaccacacgcugauguccaucaucaccaccuuccaccugagcauccccaacuucaaccaguacgaggccauguccugcgacuucaacgggggcaagaucagcauccaguacaaccucucccacagcuacgcgggggacgccgcccagcacugcggcaccguggccaacgggguccugcagacguucaugcgcauggcguggggcggcuccuaccuggcccucgacagcgggcggcgcggcugggacugcaucaucuccagcuaccaguaccugaucauccagaacaccaccugggacgaccacugccaguucucccggcccagccccaucggguaccugggcuucgugagccagaagacccgcgacaucuacaucucccggcgccuccugggcacguucaccuggacccugagcgacuccgaggggcacgacaugccgggcggguacugccucacccgguggaugcugaucgaggccgaccugaagugcuucggcaacacggccguggccaagugcaacgagaagcacgacgaggaguucugcgacauguggcgccucuucgacuucugcaagcaggcgauccagcggcugaaggccgaggcccagaugaacauccagcugaucaacaaggccgucaacgcccucaucaacgaccagcugaugaugaagaaccaccuccgcgacaucauggggauccccuacugcaacuacagcaaguucugguaccugaacaacaccaccaccggccggacgucccugccccgcugcuggcugaucagcaacggcuccuaccucaacgagacccacuucagcgacgacaucgagcagcaggcggacaacaugaucaccgagaugcugcagaaggaguacauggaccggcaggggaagacgccccugggccucguggaccuguucguguucuccaccagcuucuaccugaucaccaucuuccugcaccucgucaagaucccgacccaccgccacaucguggggaagcccugccccaagccccaccggcugaaccacaugggcaucugcuccugcgggcuguacaagcagccgggcgugcccguccgcuggaagcggugaggacuagucccuguucccagagcccacuuuuuuuucuuuuuuugaaauaaaauagccugucuuucagaucucaaaggcucuuuucagagccaccaaaaaaaaaaaaaaaaaaaaaaaaaaaaaaaaaaaaaaaaaaaaaaaaaaaaaaaaaaaaaaaaagaauu

SEQ ID NO: 36716 - RNA, 1714 nt, Artificial Sequence; identical to SEQ ID NO: 36710
  mRNA product Design a-1 (hSL-A64-N5) comprising derived and/or modified sequence from LASV(Pinneo-NIG-1969;Clade I)__AIT17836__GPCmut10 (opt1)

SEQ ID NO: 36717 - RNA, 1714 nt, Artificial Sequence
  mRNA product Design a-1 (hSL-A64-N5) comprising derived and/or modified sequence from LASV(ISTH0009-NIG-2011;Clade II)__AIT17404__GPCmut10 (opt1)
aggagagucccgcagucggcguccagcggcucugcuuguucgugugugugucguugcaggccuuauucaagcuuaccaugggccagaucaucaccuucuuccaggaggugccccacgucaucgaggaggugaugaacaucgugcugaucgcccucagccugcuggccauccucaaggggaucuacaacgucgcgaccugcggccuguucgggcugguguccuuccuccugcugugcggccgcagcugcuccacgaccuacaaggggguguacgagcuccagacccuggagcuggacauggccagccucaacaugugcaugccgcuguccugcaccaagaacaacagccaccacuacaucauggucggcaacgagacgggccuggagcucacccugaccaacaccuccaucaucaaccacaaguucugcaaccugagcgacgcccacaagaagaaccucuacgaccacgcccugauguccaucaucagcacguuccaccuguccauccccaacuucaaccaguacgaggccaugagcugcgacuucaacgggggcaagaucuccgugcaguacaaccucagccacgcguacgccguggacgccgccaaccacugcgggaccaucgcgaacggcguccugcagaccuucaugcggauggccuggggcggguccuacaucgcccuggacagcggcaagggguccugggacugcaucaugaccagcuaccaguaccucaucauccagaacacgaccugggaggaccacugccaguucucccgccccagccccaucggcuaccuggggcugcucagccagcggacccgcgacaucuacaucucccggcgccugcugggcaccuucacguggacccucagcgacuccgagggcaacgagacccccgggggcuacugccugacccgguggaugcugaucgaggccgagcucaagugcuucgggaacacggccguggcgaagugcaacgagaagcacgacgaggaguucugcgacaugcugcgccuguucgacuucugcaagcaggccauccggcgccucaagaccgaggcccagaugagcauccagcugaucaacaaggccgugaacgcccugaucaacgaccagcucaucaugaagaaccaccuccgggacaucaugggcauccccuacugcaacuacuccaaguacugguaccugaaccacaccgucaccgggaagacgagccugccccgcugcuggcugguguccaacggcagcuaccugaacgagacccacuucuccgacgacaucgagcagcaggcggacaacaugaucaccgagcuccugcagaaggaguacauggaccggcagggcaagaccccgcuggggcugguggaccucuucgucuucagcacguccuucuaccugaucagcaucuuccugcaccucaucaagaucccgacccaccgccacaucaccggcaagcccugccccaagccccaccggcugaaccacauggggaucugcuccugcggccuguacaagcacccgggggugcccgugaaguggaagcgcugaggacuagucccuguucccagagcccacuuuuuuuucuuuuuuugaaauaaaauagccugucuuucagaucucaaaggcucuuuucagagccaccaaaaaaaaaaaaaaaaaaaaaaaaaaaaaaaaaaaaaaaaaaaaaaaaaaaaaaaaaaaaaaaaagaauu

SEQ ID NO: 36718 - RNA, 1714 nt, Artificial Sequence
  mRNA product Design a-1 (hSL-A64-N5) comprising derived and/or modified sequence from LASV(ISTH2010-NIG-2012;Clade II)__AIT17482__GPCmut10 (opt1)
aggagagucccgcagucggcguccagcggcucugcuuguucgugugugugucguugcaggccuuauucaagcuuaccaugggccagaucaucaccuucuuccaggaggugccccacgucaucgaggaggugaugaacaucgugcugaucgcccucagccugcuggccauccucaaggggaucuacaacgucgcgaccugcggccuguucgggcugguguccuuccuccugcugugcggccgcagcugcuccacgaccuacaaggggguguacgagcuccagacccuggagcuggacauggccagccucaacaugugcaugccgcuguccugcaccaagaacaacagccaccacuacaucauggucggcaacgagacgggccuggagcucacccugaccaacaccuccaucaucaaccacaaguucugcaaccugagcgacgcccacaagaagaaccucuacgaccacgcccugauguccaucaucagcacguuccaccuguccauccccaacuucaaccaguacgaggccaugagcugcgacuucaacgggggcaagaucuccgugcaguacaaccucagccacgcguacgccguggacgccgccaaccacugcgggaccaucgcgaacggcguccugcagaccuucaugcggauggccuggggcggguccuacaucgcccuggacagcggcaagggguccugggacugcaucaugaccagcuaccaguaccucaucauccagaacaucacgugggaggaccacugccaguucucccgccccagccccaucggcuaccuggggcugcucagccagcggacccgcgacaucuacaucucccggcgccugcugggcaccuucaccuggacgcucagcgacuccgagggcaacgagacccccgggggcuacugccugacccgguggaugcugaucgaggccgagcucaagugcuucgggaacaccgccguggcgaagugcaacgagaagcacgacgaggaguucugcgacaugcugcgccuguucgacuucugcaagcaggccauccggcgccucaagacggaggcccagaugagcauccagcugaucaacaaggccgugaacgcccugaucaacgaccagcucaucaugaagaaccaccuccgggacaucaugggcauccccuacugcaacuacuccaaguacugguaccugaaccacaccgucaccgggaagaccagccugccccgcugcuggcugguguccaacggcagcuaccugaacgagacgcacuucuccgacgacaucgagcagcaggcggacaacaugaucaccgagcuccugcagaaggaguacaucgaccggcagggcaagaccccgcuggggcugguggaccucuucgucuucagcaccuccuucuaccugaucagcaucuuccugcaccucgugaagaucccgacgcaccgccacguggucggcaagcccugccccaagccccaccggcugaaccacauggggaucugcuccugcggccuguacaagcacccgggggugcccgugaaguggaagcgcugaggacuagucccuguucccagagcccacuuuuuuuucuuuuuuugaaauaaaauagccugucuuucagaucucaaaggcucuuuucagagccaccaaaaaaaaaaaaaaaaaaaaaaaaaaaaaaaaaaaaaaaaaaaaaaaaaaaaaaaaaaaaaaaaagaauu

SEQ ID NO: 36719 - RNA, 1714 nt, Artificial Sequence
  mRNA product Design a-1 (hSL-A64-N5) comprising derived and/or modified sequence from LASV(Lassa virus/H.sapiens-wt/NGA/2015/ISTH_0543;Clade II)__AVO03639__GPCmut10 (opt1)
aggagagucccgcagucggcguccagcggcucugcuuguucgugugugugucguugcaggccuuauucaagcuuaccaugggccagaucaucaccuucuuccaggaggugccccacgucaucgaggaggugaugaacaucgugcugaucgcccucagccugcuggccauccucaaggggaucuacaacgucgcgaccugcggccuguucgggcugguguccuuccuccugcugugcggccgcagcugcuccacgaccuacaaggggguguacgagcuccagacccuggagcuggacauggccaaccucaacaugugcaugccgcugagcugcaccaagaacaacucccaccacuacaucauggucggcaacgagacgggccuggagcucacccugaccaacaccagcaucaucaaccacaaguucugcaaccuguccgacgcccacaagaagaaccucuacgaccacgcccugaugagcaucaucuccacguuccaccugagcauccccaacuucaaccaguacgaggccauguccugcgacuucaacgggggcaagaucagcgugcaguacaaccucucccacaccuacgcgguggacgccgccaaccacugcgggaccaucgccaacggcguccugcagaccuucaugcggauggcguggggcgggagcuacaucgcccuggacuccggcaaggggagcugggacugcaucaugacguccuaccaguaccucgugauccagaacaccaccugggaggaccacugccaguucagccgccccucccccaucggcuaccuggggcugcucagccagcggacccgcgacaucuacaucagccggcgccugcugggcacguucaccuggacccucuccgacagcgagggcaacgagacccccgggggcuacugccugacgcgguggaugcugaucgaggccgagcucaagugcuucgggaacaccgccguggccaagugcaacgagaagcacgacgaggaguucugcgacaugcugcgccuguucgacuucugcaagcaggcgauccggcgccucaagaccgaggcccagauguccauccagcugaucaacaaggccgucaacgcccugaucaacgaccagcucaucaugaagaaccaccuccgggacaucaugggcaucccguacugcaacuacagcaaguacugguaccugaaccacaccgugacggggaagaccucccugccccgcugcuggcuggugagcaacggcuccuaccugaacgagacccacuucagcgacgacaucgagcagcaggccgacaacaugaucaccgagcuccugcagaaggaguacaucgaccggcagggcaagacgccccuggggcuggucgaccucuucguguucuccaccagcuucuaccugaucuccaucuuccugcaccucgugaagaucccgacccaccgccacaucaccggcaagcccugccccaagccccaccggcugaaccacauggggaucugcagcugcggccuguacaagcacccggggguccccgugaaguggaagcgcugaggacuagucccuguucccagagcccacuuuuuuuucuuuuuuugaaauaaaauagccugucuuucagaucucaaaggcucuuuucagagccaccaaaaaaaaaaaaaaaaaaaaaaaaaaaaaaaaaaaaaaaaaaaaaaaaaaaaaaaaaaaaaaaaagaauu

SEQ ID NO: 36720 - RNA, 1714 nt, Artificial Sequence
  mRNA product Design a-1 (hSL-A64-N5) comprising derived and/or modified sequence from LASV(Lassa virus/H.sapiens-wt/NGA/2016/ISTH_0009;Clade II)__AVO03571__GPCmut10 (opt1)
aggagagucccgcagucggcguccagcggcucugcuuguucgugugugugucguugcaggccuuauucaagcuuaccaugggccagaucaucaccuucuuccaggaggugccccacgucaucgaggaggugaugaacaucgugcugaucgcccucagccugcuggccauccucaaggggaucuacaacgucgcgaccugcggccugcuggggcucguguccuuccugcugcucugcggccgcagcugcuccacgaccuacaaggggguguacgagcugcagacccuggagcucgacauggccagccugaacaugugcaugccgcuguccugcaccaagaacaacagccaccacuacaucauggucggcaacgagacgggccucgagcugacccugaccaacaccuccaucaucaaccacaaguucugcaaccucagcgacgcccacaagaagaaccuguacgaccacgcccugauguccaucaucagcacguuccaccucuccauccccaacuucaaccaguacgaggccaugagcugcgacuucaacgggggccggaucuccgugcaguacaaccugagccacuccuacgcgguggacgccgccaaccacugcgggaccaucgccaacggcguccugcagaccuucaugcgcauggcguggggcgggagcuacaucgcccucgacuccggcaaggggagcugggacugcaucaugaccuccuaccaguaccugaucauccagaacacgaccugggaggaccacugccaguucagccggcccagccccaucggcuaccuggggcuccugucccagcgcacccgggacaucuacaucagccgccggcugcucggcaccuucacguggacccuguccgacagcgagggcaacgagacccccgggggcuacugccugacccgcuggaugcucaucgaggccgagcugaagugcuucgggaacacggccguggccaagugcaacgagaagcacgacgaggaguucugcgacaugcugcggcuguucgacuucugcaagcaggcgauccgccggcugaagaccgaggcccagauguccauccagcugaucaacaaggccgugaacgcccucaucaacgaccagcugaucaugaagaaccaccuccgcgacaucaugggcauccccuacugcaacuacagcaaguacugguaccucaaccacaccgucaccgggaagacgucccugccccggugcuggcuggugagcaacggcuccuaccucaacgagacccacuucagcgacgacaucgagcagcaggccgacaacaugaucaccgagcugcugcagaaggaguacaucgaccgccagggcaagaccccgcuggggcucguggaccuguucgucuucuccacgagcuucuaccugaucuccaucuuccuccaccuggugaagaucccgacccaccggcacaucaccggcaagcccugccccaagccccaccgccugaaccacauggggaucugcagcugcggccucuacaaccacccgggggugcccgucaaguggaagcggugaggacuagucccuguucccagagcccacuuuuuuuucuuuuuuugaaauaaaauagccugucuuucagaucucaaaggcucuuuucagagccaccaaaaaaaaaaaaaaaaaaaaaaaaaaaaaaaaaaaaaaaaaaaaaaaaaaaaaaaaaaaaaaaaagaauu

SEQ ID NO: 36721 - RNA, 1714 nt, Artificial Sequence
  mRNA product Design a-1 (hSL-A64-N5) comprising derived and/or modified sequence from LASV(Lassa virus/H.sapiens-wt/NGA/2016/ISTH_0017;Clade II)__AVO03567__GPCmut10 (opt1)
aggagagucccgcagucggcguccagcggcucugcuuguucgugugugugucguugcaggccuuauucaagcuuaccaugggccagaucaucaccuucuuccaggaggugccccacgucaucgaggaggugaugaacaucgugcugaucgcccucagccugcuggccauccucaaggggaucuacaacgucgcgaccugcggccuguucgggcugguguccuuccuccugcugugcggccgcagcugcuccacgaccuacaaggggguguacgagcuccagacccuggagcuggacauggccagccucaacaugugcaugccgcuguccugcaccaagaacaacagccaccacuacaucauggucggcaacgagacgggccuggagcucacccugaccaacaccuccaucaucaaccacaaguucugcaaccugagcgacgcccacaagaagaaccucuacgaccacgcccugauguccaucaucagcacguuccaccuguccauccccaacuucaaccaguacgaggccaugagcugcgacuucaacgggggcaagaucuccgugcaguacaaccucagccacaccuacgcgaucgacgccgccaaccacugcgggaccaucgccaacggcgugcugcagaccuucaugcggauggcguggggcggguccuacaucgcccuggacagcggcaagggguccugggacugcaucaugacgagcuaccaguaccucaucauccagaacaccaccugggaggaccacugccaguucucccgccccagccccaucggcuaccuggggcugcucagccagcggacccgcgacaucuacaucucccggcgccugcugggcacguucaccuggacccucagcgacuccgagggcaacgagacccccgggggcuacugccugacgcgguggaugcugaucgaggccgagcucaagugcuucgggaacaccgccgucgccaagugcaacgagaagcacgacgaggaguucugcgacaugcugcgccuguucgacuucugcaagcaggcgauccggcgccucaagaccgaggcccagaugagcauccagcugaucaacaaggccgugaacgcccugaucaacgaccagcucaucaugaagaaccaccuccgggacaucaugggcaucccguacugcaacuacuccaaguacugguaccugaaccacaccgugacggggaagaccagccugccccgcugcuggcuggucuccaacggcagcuaccugaacgagacccacuucuccgacgacaucgagcagcaggccgacaacaugaucaccgagcuccugcagaaggaguacauggaccggcagggcaagacgccccuggggcugguggaccucuucguguucagcaccuccuucuaccugaucagcaucuuccugcaccucguccgcaucccgacccaccggcacgugaucggcaagcccugccccaagccccaccgccugaaccacauggggaucugcuccugcggccuguacaagcacccgggggugcccgucaaguggaagcggugaggacuagucccuguucccagagcccacuuuuuuuucuuuuuuugaaauaaaauagccugucuuucagaucucaaaggcucuuuucagagccaccaaaaaaaaaaaaaaaaaaaaaaaaaaaaaaaaaaaaaaaaaaaaaaaaaaaaaaaaaaaaaaaaagaauu

SEQ ID NO: 36722 - RNA, 1714 nt, Artificial Sequence
  mRNA product Design a-1 (hSL-A64-N5) comprising derived and/or modified sequence from LASV(Lassa virus/H.sapiens-wt/NGA/2018/ISTH_0959;Clade II)__AVV65099__GPCmut10 (opt1)
aggagagucccgcagucggcguccagcggcucugcuuguucgugugugugucguugcaggccuuauucaagcuuaccaugggccagaucaucaccuucuuccaggaggugccccacgucaucgaggaggugaugaacaucgugcugaucgcccucagccugcuggccauccucaaggggaucuacaacgucgugaccugcggccuguucgggcugguguccuuccuccugcugugcggccgcagcugcuccacgaccuacaagggggucuacgagcuccagacccuggagcuggacauggcgagccucaacaugugcaugccgcuguccugcaccaagaacaacagccaccacuacaucauggugggcaacgagacgggccuggagcucacccugaccaacaccuccaucaucaaccacaaguucugcaaccugagcgacgcccacaagaagaaccucuacgaccacgcccugauguccaucaucagcacguuccaccuguccauccccaacuucaaccaguacgaggccaugagcugcgacuucaacgggggcaagaucuccgugcaguacaaccucagccacgccuacgcgaucgacgccgccaaccacugcgggaccaucgccaacggcguccugcagaccuucaugcggauggcguggggcggguccuacaucgcccuggacagcggcaagggguccugggacugcaucaugaccagcuaccaguaccucaucauccagaacacgaccugggaggaccacugccaguucucccgccccagccccaucggcuaccuggggcugcucagccagcggacccgcgacaucuacaucucccggcgccugcugggcaccuucacguggacccucagcgacuccgagggcaacgagacccccgggggcuacugccugacccgguggaugcugaucgaggccgagcucaagugcuucgggaacacggccguggccaagugcaacgagaagcacgacgaggaguucugcgacaugcugcgccuguucgacuucugcaagcaggcgauccggcgccucaagaccgaggcccagaugagcauccagcugaucaacaaggccgugaacgcccugaucaacgaccagcucaucaugaagaaccaccuccgggacaucaugggcauccccuacugcaacuacuccaaguacugguaccugaaccacaccgucaccgggaagacgagccugccccgcugcuggcugguguccaacggcagcuaccugaacgagacccacuucuccgacgacaucgagcagcaggccgacaacaugaucaccgagcuccugcagaaggaguacaucgaccggcagggcaagaccccgcuggggcugguggaccucuucgucuucagcacguccuucuaccugaucagcaucuuccugcaccucgugaagaucccgacccaccgccacgugaucggcaagcccugccccaagccccaccggcugaaccacauggggaucugcuccugcggccuguacaagcacccggggguccccgugaaguggaagcgcugaggacuagucccuguucccagagcccacuuuuuuuucuuuuuuugaaauaaaauagccugucuuucagaucucaaaggcucuuuucagagccaccaaaaaaaaaaaaaaaaaaaaaaaaaaaaaaaaaaaaaaaaaaaaaaaaaaaaaaaaaaaaaaaaagaauu

SEQ ID NO: 36723 - RNA, 1714 nt, Artificial Sequence
  mRNA product Design a-1 (hSL-A64-N5) comprising derived and/or modified sequence from LASV(LASV003-NIG-2008;Clade II)__AIT17580__GPCmut10 (opt1)
aggagagucccgcagucggcguccagcggcucugcuuguucgugugugugucguugcaggccuuauucaagcuuaccaugggccagaucaucaccuucuuccaggaggugccccacgucaucgaggaggugaugaacaucgugcugaucgcccucagccugcuggccauccucaaggggaucuacaacgucgcgaccugcggccuguucgggcugguguccuuccuccugcugugcggccgcagcugcuccacgaccuacaaggggguguacgagcuccagacccuggagcuggacauggccagccucaacaugugcaugccgcuguccugcaccaagaacaacagccaccacuacaucauggucggcaacgagacgggccuggagcucacccugaccaacaccuccaucaucaaccacaaguucugcaaccugagcgacgcccacaagaagaaccucuacgaccacgcccugauguccaucaucagcacguuccaccuguccauccccaacuucaaccaguacgaggccaugagcugcgacuucaacgggggcaagaucuccgugcaguacaaccucagccacaccuacgcgguggacgccgccaaccacugcgggaccaucgccaacggcguccugcagaccuucaugcggauggcguggggcggguccuacaucgcccuggacagcggcaagggguccugggacugcaucaugacgagcuaccaguaccucaucauccagaacaccaccugggaggaccacugccaguucucccgccccagccccaucggcuaccuggggcugcucagccagcggacccgcgacaucuacaucucccggcgccugcugggcacguucaccuggacccucagcgacuccgagagcaacgagaccccgggcggguacugccugacgcgguggaugcugaucgaggccgagcucaagugcuucggcaacaccgccguggccaagugcaacgagaagcacgacgaggaguucugcgacaugcugcgccuguucgacuucugcaagcaggcgauccggcgccucaaggccgaggcccagauguccauccagcugaucaacaaggccgugaacgcccugaucaacgaccagcucaucaugaagaaccaccuccgggacaucauggggauccccuacugcaacuacagcaaguacugguaccugaaccacaccgucaccggccgcacgucccugccccggugcuggcuggugagcaacggguccuaccugaacgagacccacuucagcgacgacaucgagcagcaggcggacaacaugaucaccgagcuccugcagaaggaguacauggaccgccagggcaagacgccccugggccugguggaccucuucgucuucuccaccagcuucuaccugaucuccaucuuccugcaccucgugaagaucccgacccaccggcacgugaucgggaagcccugccccaagccccaccgccugaaccacaugggcaucugcagcugcgggcuguacaagcacccgggcguccccgugaaguggaagcggugaggacuagucccuguucccagagcccacuuuuuuuucuuuuuuugaaauaaaauagccugucuuucagaucucaaaggcucuuuucagagccaccaaaaaaaaaaaaaaaaaaaaaaaaaaaaaaaaaaaaaaaaaaaaaaaaaaaaaaaaaaaaaaaaagaauu

SEQ ID NO: 36724 - RNA, 1714 nt, Artificial Sequence
  mRNA product Design a-1 (hSL-A64-N5) comprising derived and/or modified sequence from LASV(LASV035-NIG-2009;Clade II)__AIT17588__GPCmut10 (opt1)
aggagagucccgcagucggcguccagcggcucugcuuguucgugugugugucguugcaggccuuauucaagcuuaccaugggccagaucaucaccuucuuccaggaggugccccacgucaucgaggaggugaugaacaucgugcugaucgcccucagccugcuggccauccucaaggggaucuacaacgucgcgaccugcggccuguucgggcugguguccuuccuccugcugugcggccgcagcugcuccacgaccuacaaggggguguacgagcuccagacccuggagcuggacauggccagccucaacaugugcaugccgcuguccugcaccaagaacaacagccaccacuacaucauggucggcaacgagacgggccuggagcucacccugaccaacaccuccaucaucaaccacaaguucugcaaccugagcgacgcccacaagaagaaccucuacgaccacgcccugauguccaucaucagcacguuccaccuguccauccccaacuucaaccaguacgaggccaugagcugcgacuucaacgggggcaagaucuccgugcaguacaaccucagccacgcguacgccguggacgccgccaaccacugcgggaccaucgcgaacggcguccugcagaccuucaugcggauggccuggggcggguccuacaucgcccuggacagcggcaagggguccugggacugcaucaugaccagcuaccaguaccucaucauccagaacacgaccugggaggaccacugccaguucucccgccccagccccaucggcuaccuggggcugcucagccagcggacccgcgacaucuacaucucccggcgccugcugggcaccuucacguggacccucagcgacuccgagggcaacgagacccccgggggcuacugccugacccgguggaugcugaucgaggccgagcucaagugcuucgggaacacggccguggcgaagugcaacgagaagcacgacgaggaguucugcgacaugcugcgccuguucgacuucugcaagcaggccauccggcgccucaaggccgaggcccagaugagcauccagcugaucaacaaggccgugaacgcgcugaucaacgaccagcucaucaugaagaaccaccuccgggacaucaugggcauccccuacugcaacuacuccaaguacugguaccugaaccacaccgucaccgggaagaccagccugccccgcugcuggcugguguccaacggcagcuaccugaacgagacgcacuucuccgacgacaucgagcagcaggccgacaacaugaucaccgagcuccugcagaaggaguacaucgaccggcagggcaagaccccgcuggggcugguggaccucuucgucuucagcaccuccuucuaccugaucagcaucuuccugcaccucgugaagaucccgacgcaccgccacgugaucggcaagcccugccccaagccccaccggcugaaccacauggggaucugcuccugcggccuguacaagcacccggggguccccgugaaguggaagcgcugaggacuagucccuguucccagagcccacuuuuuuuucuuuuuuugaaauaaaauagccugucuuucagaucucaaaggcucuuuucagagccaccaaaaaaaaaaaaaaaaaaaaaaaaaaaaaaaaaaaaaaaaaaaaaaaaaaaaaaaaaaaaaaaaagaauu

SEQ ID NO: 36725 - RNA, 1714 nt, Artificial Sequence
  mRNA product Design a-1 (hSL-A64-N5) comprising derived and/or modified sequence from LASV(LASV1000-NIG-2009;Clade II)__AIT17782__GPCmut10 (opt1)
aggagagucccgcagucggcguccagcggcucugcuuguucgugugugugucguugcaggccuuauucaagcuuaccaugggccagaucaucaccuucuuccaggaggugccccacgucaucgaggaggugaugaacaucgugcugaucgcccucagccugcuggccauccucaaggggaucuacaacgucgcgaccugcggccuguucgggcugguguccuuccuccugcugugcggccgcagcugcuccacgaccuacaaggggguguacgagcuccagacccuggagcuggacauggccagccucaacaugugcaugccgcuguccugcaccaagaacaacagccaccacuacaucauggucggcaacgagacgggccuggagcucacccugaccaacaccuccaucaucaaccacaaguucugcaaccugagcgacgcccacaagaagaaccucuacgaccacgcccugauguccaucaucagcacguuccaccuguccauccccaacuucaaccaguacgaggccaugagcugcgacuucaacgggggcaagaucuccgugcaguacaaccucagccacaccuacgcgguggacgccgccaaccacugcgggaccaucgccaacggcguccugcagaccuucaugcggauggcguggggcggguccuacaucgcccuggacagcggcaagggguccugggacugcaucaugacgagcuaccaguaccucaucauccagaacaccaccugggaggaccacugccaguucucccgccccagccccaucggcuaccuggggcugcucagccagcggacccgcgacaucuacaucucccggcgccugcugggcacguucaccuggacccucagcgacuccgagggcaacgagacccccgggggcuacugccugacgcgguggaugcugaucgaggccgagcucaagugcuucgggaacaccgccguggccaagugcaacgagaagcacgacgaggaguucugcgacaugcugcgccuguucgacuucugcaagcaggcgaucaagcggcucaagaccgaggcccagaugagcauccagcugaucaacaaggccgugaacgcccugaucaacgaccagcucaucaugaagaaccaccuccgcgacaucaugggcaucccguacugcaacuacuccaaguacugguaccugaaccacaccgucacggggaagaccagccugccccggugcuggcugguguccaacggcagcuaccugaacgagacccacuucuccgacgacaucgagcagcaggccgacaacaugaucaccgagcuccugcagaaggaguacaucgaccgccagggcaagacgccccuggggcugguggaccucuucgucuucagcaccuccuucuaccugaucagcaucuuccugcaccucgugaagaucccgacccaccggcacguggucggcaagcccugccccaagccccaccgccugaaccacauggggaucugcuccugcggccuguacaagcacccgggggugcccgugaaguggaagcggugaggacuagucccuguucccagagcccacuuuuuuuucuuuuuuugaaauaaaauagccugucuuucagaucucaaaggcucuuuucagagccaccaaaaaaaaaaaaaaaaaaaaaaaaaaaaaaaaaaaaaaaaaaaaaaaaaaaaaaaaaaaaaaaaagaauu

SEQ ID NO: 36726 - RNA, 1714 nt, Artificial Sequence
  mRNA product Design a-1 (hSL-A64-N5) comprising derived and/or modified sequence from LASV(LASV221-NIG-2010;Clade II)__AIT17624__GPCmut10 (opt1)
aggagagucccgcagucggcguccagcggcucugcuuguucgugugugugucguugcaggccuuauucaagcuuaccaugggccagaucaucaccuucuuccaggaggugccccacgucaucgaggaggugaugaacaucgugcugaucgcccucagccugcuggccauccucaaggggaucuacaacgucgcgaccugcggccuguucgggcugguguccuuccuccugcugugcggccgcagcugcuccacgaccuacaaggggguguacgagcuccagacccuggagcuggacauggccagccucaacaugugcaugccgcuguccugcaccaagaacaacagccaccacuacaucauggucggcaacgagacgggccuggagcucacccugaccaacaccuccaucaucaaccacaaguucugcaaccugagcgacgcccacaagaagaaccucuacgaccacgcccugauguccaucaucagcacguuccaccuguccauccccaacuucaaccaguacgaggccaugagcugcgacuucaacgggggcaagaucuccgugcaguacaaccucagccacaccuacgcgaucgacgccgccaaccacugcgggaccaucgccaacggcgugcugcagaccuucaugcggauggcguggggcggguccuacaucgcccuggacagcggcaagggguccugggacugcaucaugacgagcuaccaguaccucaucauccagaacaccaccugggaggaccacugccaguucucccgccccagccccaucggcuaccuggggcugcucagccagcggacccgcgacaucuacaucucccggcgccugcugggcacguucaccuggacccucagcgacuccgagggcaacgagacccccgggggcuacugccugacgcgguggaugcugaucgaggccgagcucaagugcuucgggaacaccgccgucgccaagugcaacgagaagcacgacgaggaguucugcgacaugcugcgccuguucgacuucugcaagcaggcgauccggcgccucaagaccgaggcccagaugagcauccagcugaucaacaaggccgugaacgcccugaucaacgaccagcucaucaugaagaaccaccuccgggacaucaugggcaucccguacugcaacuacuccaaguacugguaccugaaccacaccgugacggggaagaccagccugccccgcugcuggcuggucuccaacggcagcuaccugaacgagacccacuucuccgacgacaucgagcagcaggccgacaacaugaucaccgagaugcuccagaaggaguacauggaccggcagggcaagacgccccuggggcugguggaccuguucguguucagcaccuccuucuaccucaucagcaucuuccugcaccuggucaagaucccgacccaccgccacgugaucggcaagcccugccccaagccccaccggcucaaccacauggggaucugcuccugcggccuguacaagcacccgggggugcccgucaaguggaagcgcugaggacuagucccuguucccagagcccacuuuuuuuucuuuuuuugaaauaaaauagccugucuuucagaucucaaaggcucuuuucagagccaccaaaaaaaaaaaaaaaaaaaaaaaaaaaaaaaaaaaaaaaaaaaaaaaaaaaaaaaaaaaaaaaaagaauu

SEQ ID NO: 36727 - RNA, 1714 nt, Artificial Sequence
  mRNA product Design a-1 (hSL-A64-N5) comprising derived and/or modified sequence from LASV(LASV237-NIG-2010;Clade II)__AIT17638__GPCmut10 (opt1)
aggagagucccgcagucggcguccagcggcucugcuuguucgugugugugucguugcaggccuuauucaagcuuaccaugggccagaucaucaccuucuuccaggaggugccccacgucaucgaggaggugaugaacaucgugcugaucgcccucagccugcuggccauccucaaggggaucuacaacgucgcgaccugcggccuguucgggcugguguccuuccuccugcugugcggccgcagcugcuccacgaccuacaaggggguguacgagcuccagacccuggagcuggacauggccagccucaacaugugcaugccgcuguccugcaccaagaacaacagccaccacuacaucauggucggcaacgagacgggccuggagcucacccugaccaacaccuccaucaucaaccacaaguucugcaaccugagcgacgcccacaagaaggaccucuacgaccacgcccugauguccaucaucagcacguuccaccuguccauccccaacuucaaccaguacgaggccaugagcugcgacuucaacgggggcaagaucuccgugcaguacaaccucagccacaccuacgcgguggacgccgccaaccacugcgggaccaucgccaacggcguccugcagaccuucaugcggauggcguggggcggguccuacaucgcccuggacagcggcaagggguccugggacugcaucaugacgagcuaccaguaccucaucauccagaacaccaccugggaggaccacugccaguucucccgccccagccccaucggcuaccuggggcugcucagccagcggacccgcgacaucuacaucucccggcgccugcugggcacguucaccuggacccucagcgacuccgagggcaacgagacccccgggggcuacugccugacgcgguggaugcugaucgaggccgagcucaagugcuucgggaacaccgccguggccaagugcaacgagaagcacgacgaggaguucugcgacaugcugcgccuguucgacuucugcaagcaggcgauccggcgccucaagaccgaggcccagaugagcauccagcugaucaacaaggccgugaacgcccugaucaacgaccagcucaucaugaagaaccaccuccgggacaucaugggcaucccguacugcaacuacuccaaguacugguaccugaaccacaccgucacggggaagaccagccugccccgcugcuggcugguguccaacggcagcuaccugaacgagacccacuucuccgacgacaucgagcagcaggccgacaacaugaucaccgagcuccugcagaaggaguacauggaccggcagggcaagacgccccuggggcugguggaccucuucgucuucagcaccuccuucuaccugaucagcaucuuccugcaccucaucaagaucccgacccaccgccacaucaccggcaagcccugccccaagccccaccggcugaaccacauggggaucugcuccugcggccuguacaagcacccgggggugcccgugaaguggaagcgcugaggacuagucccuguucccagagcccacuuuuuuuucuuuuuuugaaauaaaauagccugucuuucagaucucaaaggcucuuuucagagccaccaaaaaaaaaaaaaaaaaaaaaaaaaaaaaaaaaaaaaaaaaaaaaaaaaaaaaaaaaaaaaaaaagaauu

SEQ ID NO: 36728 - RNA, 1714 nt, Artificial Sequence
  mRNA product Design a-1 (hSL-A64-N5) comprising derived and/or modified sequence from LASV(LASV253-NIG-2011;Clade II)__AIT17670__GPCmut10 (opt1)
aggagagucccgcagucggcguccagcggcucugcuuguucgugugugugucguugcaggccuuauucaagcuuaccaugggccagaucaucaccuucuuccaggaggugccccacgucaucgaggaggugaugaacaucgugcugaucgcccucagccugcuggccauccucaaggggaucuacaacgucgcgaccugcggccuguucgggcugguguccuuccuccugcugugcggccgcagcugcuccacgaccuacaaggggguguacgagcuccagacccuggagcuggacauggccagccucaacaugugcaugccgcuguccugcaccaagaacaacagccaccacuacaucauggucggcaacgagacgggccuggagcucacccugaccaacaccuccaucaucaaccacaaguucugcaaccugagcgacgcccacaagaagaaccucuacgaccacgcccugauguccaucaucagcacguuccaccuguccauccccaacuucaaccaguacgaggccaugagcugcgacuucaacgggggcaagaucuccgugcaguacaaccucagccacaccuacgcgguggacgccgccaaccacugcgggaccaucgccaacggcguccugcagaccuucaugcggauggcguggggcggguccuacaucgcccuggacagcggcaagggguccugggacugcaucaugacgagcuaccaguaccucaucauccagaacaccaccugggaggaccacugccaguucucccgccccagccccaucggcuaccuggggcugcucagccagcggacccgcgacaucuacaucucccggcgccugcugggcacguucaccuggacccucagcgacuccgagggcaacgagacccccgggggcuacugccugacgcgguggaugcugaucgaggccgagcucaagugcuucgggaacaccgccguggccaagugcaacgagaagcacgacgaggaguucugcgacaugcugcgccuguucgacuucugcaagcaggcgauccggcgccucaaggccgaggcccagaugagcauccagcugaucaacaaggccgugaacgcccugaucaacgaccagcucaucaugaagaaccaccuccgggacaucaugggcauccccuacugcaacuacuccaaguacugguaccugaaccacaccgucaccgggcgcacgagccugccccggugcuggcugguguccaacggcagcuaccugaacgagacccacuucuccgacgacaucgagcagcaggcggacaacaugaucaccgagcuccugcagaaggaguacaucgaccgccagggcaagaccccgcuggggcugguggaccucuucgucuucagcacguccuucuaccugaucagcaucuuccugcaccucgugaagaucccgacccaccggcacaucaucggcaagcccugccccaagccccaccgccugaaccacauggggaucugcuccugcggccuguacaagcacccgggggugcccgucaaguggaagcggugaggacuagucccuguucccagagcccacuuuuuuuucuuuuuuugaaauaaaauagccugucuuucagaucucaaaggcucuuuucagagccaccaaaaaaaaaaaaaaaaaaaaaaaaaaaaaaaaaaaaaaaaaaaaaaaaaaaaaaaaaaaaaaaaagaauu

SEQ ID NO: 36729 - RNA, 1714 nt, Artificial Sequence
  mRNA product Design a-1 (hSL-A64-N5) comprising derived and/or modified sequence from LASV(LASV254-NIG-2011;Clade II)__AIT17674__GPCmut10 (opt1)
aggagagucccgcagucggcguccagcggcucugcuuguucgugugugugucguugcaggccuuauucaagcuuaccaugggccagaucaucaccuucuuccaggaggugccccacgucaucgaggaggugaugaacaucgugcugaucgcccucagccugcuggccauccucaaggggaucuacaacgucgcgaccugcggccuguucgggcugguguccuuccuccugcugugcggccgcagcugcuccacgaccuacaaggggguguacgagcuccagacccuggagcuggacaugaccaaccucaacaugugcaugccgcugagcugcacgaagaacaacucccaccacuacaucauggucggcaacgagaccggccuggagcucacccugaccaacacgagcaucaucaaccacaaguucugcaaccuguccgacgcccacaagaagaaccucuacaaccacgcccugaugagcaucaucuccaccuuccaccugagcauccccaacuucaaccaguacgaggccauguccugcgacuucaacgggggcaagaucagcgugcaguacaaccucucccacagcuacgccguggacgcggccaaccacugcgggaccaucgccaacggcguccugcagaccuucaugcggauggccuggggcggguccuacaucgcgcuggacagcggcaaggggaacugggacugcaucaugacguccuaccaguaccucaucauccagaacaccaccugggaggaccacugccaguucagccgccccucccccaucggcuaccuggggcugcucagccagcggacccgcgacaucuacaucagccggcgccugcugggcacguucaccuggacccucuccgacagcgagggcaacgagacccccgggggcuacugccugacgcgguggaugcugaucgaggccgagcucaagugcuucgggaacaccgccguggccaagugcaacgagaagcacgacgaggaguucugcgacaugcugcgccuguucgacuucugcaagcaggccauccggcgccucaagaccgaggcgcaggccaacauccagcugaucaacaaggccgugaacgcccugaucaacgaccagcucaucaugaagaaccaccuccgggacaucaugggcaucccguacugcaacuacuccaaguacugguaccugaaccacaccgucacggggaagaccagccugccccgcugcuggcugguguccaacggcagcuaccugaacgagacccacuucuccgacgacaucgagcagcaggccgacaacaugaucaccgagcuccugcagaaggaguacauggaccggcagggcaagacgccccuggggcugguggaccucuucgucuucagcaccuccuucuaccugaucagcaucuuccugcaccucgugaagaucccgacccaccgccacgugaucggcaagcccugccccaagccccaccggcugaaccacauggggaucugcuccugcggccuguacaagcacccggggguccccgugaaguggaagcgcugaggacuagucccuguucccagagcccacuuuuuuuucuuuuuuugaaauaaaauagccugucuuucagaucucaaaggcucuuuucagagccaccaaaaaaaaaaaaaaaaaaaaaaaaaaaaaaaaaaaaaaaaaaaaaaaaaaaaaaaaaaaaaaaaagaauu

SEQ ID NO: 36730 - RNA, 1714 nt, Artificial Sequence
  mRNA product Design a-1 (hSL-A64-N5) comprising derived and/or modified sequence from LASV(Nig08-A19;Clade III)__ADU56618__GPCmut10 (opt1)
aggagagucccgcagucggcguccagcggcucugcuuguucgugugugugucguugcaggccuuauucaagcuuaccaugggccagaucgugaccuucuuccaggaggucccccacgugaucgaggaggugaugaacaucguccugaucgcccucagcauccuggccauccugaaggggcucuacaacaucgcgaccugcggccugaucgggcuggugacguuccuccugcuguccggccgcagcugcuccaugaccuacaaggggguguacgagcuccagacccuggagcugaacaugaacacccucaacaugugcaugccgcugagcugcacgaagaacaacucccaccacuacaucauggucggcaacgagaccggccuggagcucacccugaccaacacgagccugcuccaccacaaguucugcaaccuguccgacgcccacaagaagaaccuguacgaccacacccucaugagcaucaucuccaccuuccaccugagcauccccaacuucaaccaguacgaggccauguccugcgacuucaacgggggcaagaucaccgugcaguacaaccugagccacuccuacgccaucgacgccgcgaaccacugcgggacgguggccaacggcguccuccagaccuucaugcggauggccuggggcgggagcuacaucgcccuggacuccggccgcgggaagugggacugcaucaugaccagcuaccaguaccugaucauccagaacaccacgugggaggaccacugccaguucucccggcccagccccaucggcuaccucgggcugcugucccagcgcacccgggacaucuacaucagccgccggcuccugggcaccuucaccuggacgcugagcgacuccgagggcaacgagacccccgggggcuacugccucacccgcuggaugcugaucgaggcggagcugaagugcuucgggaacaccgccguggccaagugcaacgagaagcacgacgaggaguucugcgacaugcuccggcuguucgacuucugcaagcaggccauccgccggcugaaggccgaggcgcagaugagcauccagcucaucaacaaggccgugaacgcccugaucaacgaccagcugaucaugaagaaccaccuccgcgacaucaugggcauccccuacugcaacuacuccaaguacugguaccugaaccacacgagcaccgggcggaccucccugccccgcugcuggcucgucagcaacggcuccuaccugaacgagacccacuucagcgacgacaucgagcagcaggccgacaacaugaucacggagaugcugcagaaggaguaccuggaccggcagggcaagaccccgcucgggcugguggaccuguucguguucuccaccagcuucuaccucaucuccaucuuccugcaccuggucaagaucccgacccaccgccacaucgugggcaagcccugccccaagccccaccggcucaaccacauggggaucugcagcugcggccuguacaagcagccgggggugcccguccgcuggaagcggugaggacuagucccuguucccagagcccacuuuuuuuucuuuuuuugaaauaaaauagccugucuuucagaucucaaaggcucuuuucagagccaccaaaaaaaaaaaaaaaaaaaaaaaaaaaaaaaaaaaaaaaaaaaaaaaaaaaaaaaaaaaaaaaaagaauu

SEQ ID NO: 36731 - RNA, 1717 nt, Artificial Sequence
  mRNA product Design a-1 (hSL-A64-N5) comprising derived and/or modified sequence from LASV(G1180-SLE-2010;Clade IV)__AIT17168__GPCmut10 (opt1)
aggagagucccgcagucggcguccagcggcucugcuuguucgugugugugucguugcaggccuuauucaagcuuaccaugggccagaucgugaccuucuuccaggaggucccccacgugaucgaggaggugaugaacaucguccugaucgcccucagcauccuggccgugcugaaggggcucuacaacuucgcgaccugcggccugguggggcugcucacguuccugcugcucugcggccgcuccugcaccgccagccgguacaagggggucuacgagcugcagacccuggagcucaacauggagacccugaacaugugcaugccgcuguccugcacgaagaacaacagccaccacuacaucauggugggcaacgagaccggccucgagcugacccugaccaacacguccaucaucaaccacaaguucugcaaccucagcgacgcccacaagaagaaccuguacgaccacgcccugauguccaucaucagcaccuuccaccucuccauccccaacuucaaccaguacgaggccaugagcugcgacuucaacgggggcaagaucuccgugcaguacaaccugagccacuccuacgcgggggacgccgccaaccacugcggcaccgucgccaacggggugcugcagaccuucaugcgcauggcguggggcggcagcuacaucgcccucgacuccgggcacggcagcugggacugcaucaugacguccuaccaguaccugaucauccagaacaccaccugggaggaccacugccaguucagccggcccucccccaucggguaccugggccuccugagccagcgcacccgggacaucuacaucagccgccggcugcucggcacguucaccuggacccuguccgacagcgaggggaaggacaccccgggcggguacugccugacgcgcuggaugcucaucgaggccgagcugaagugcuucggcaacaccgccguggccaagugcaacgagaagcacgacgaggaguucugcgacaugcugcggcuguucgacuucugcaagcaggcgauccagcgccugaaggccgaggcccagauguccauccagcugaucaacaaggccgucaacgcccucaucaacgaccagcugaucaugaagaaccaccuccgggacaucauggggauccccuacugcaacuacagcaaguacugguaccucaaccacaccaccacgggcaagaccucccugcccaagugcuggcuggugagcaacggcuccuaccucaacgagacccacuucagcgacgacaucgagcagcaggcggacaacaugaucaccgagaugcugcagaaggaguacauggagcgccaggggaagacgccccugggccugguggaccucuucgucuucuccaccagcuucuaccugaucuccaucuuccugcaccucgugaagaucccgacccaccggcacaucgugggcaagagcugccccaagccccaccgccugaaccacauggggaucugcuccugcgggcuguacaagcagcccggcgucccggugaaguggaagcggugaggacuagucccuguucccagagcccacuuuuuuuucuuuuuuugaaauaaaauagccugucuuucagaucucaaaggcucuuuucagagccaccaaaaaaaaaaaaaaaaaaaaaaaaaaaaaaaaaaaaaaaaaaaaaaaaaaaaaaaaaaaaaaaaagaauu

SEQ ID NO: 36732 - RNA, 1717 nt, Artificial Sequence
  mRNA product Design a-1 (hSL-A64-N5) comprising derived and/or modified sequence from LASV(G1442-SLE-2011;Clade IV)__AIT17180__GPCmut10 (opt1)
aggagagucccgcagucggcguccagcggcucugcuuguucgugugugugucguugcaggccuuauucaagcuuaccaugggccagaucgugaccuucuuccaggaggucccccacgugaucgaggaggugaugaacaucguccugaucgcccucagcauccuggccgugcugaaggggcucuacaacguggcgaccugcggccugaucgggcuggucaccuuccuccugcugugcggccgcuccugcaccaccacccucuacaaggggguguacgagcugcagacgcuggagcucaacauggagacccugaacaugugcaugccgcugagcugcaccaagaacaacucccaccacuacauccgggugggcaacgagaccggccucgagcugacgcugaccaacaccagcaucaucaaccacaaguucugcaaccucuccgacgcccacaagaagaaccuguacgaccacgcccugaugagcaucaucuccaccuuccaccucagcauccccaacuucaaccaguacgaggccauguccugcgacuucaacgggggcaagaucagcguccaguacaaccugucccacagcuacgccggggacgcggccaaccacugcggcacgguggccaacggggugcugcagaccuucaugcgcauggccuggggcggcuccuacaucgcgcucgacagcgggcggggcaacugggacugcaucaugaccuccuaccaguaccugaucauccagaacaccacgugggacgaccacugccaguucagccgccccucccccaucggguaccugggccuccugagccagcggacccgcgacgucuacaucucccggcgccugcucggcaccuucaccuggacgcugagcgacagcgaggggaaggacaccccgggcggguacugccugacccgguggaugcucaucgaggccgagcugaagugcuucggcaacaccgccguggccaagugcaacgagaagcacgacgaggaguucugcgacaugcugcgccucuucgacuucugcaagcaggccauccagcggcugaaggcggaggcccagauguccauccagcugaucaacaaggccgugaacgcccucaucaacgaccagcugaucaugaagaaccaccuccgcgacaucauggggauccccuacugcaacuacagcaaguacugguaccugaacaacacggccaccggcaagaccucccugcccaagugcuggcugaucagcaacggcuccuaccucaacgagacccacuucagcgacgacaucgagcaggaggcggacaacaugaucacggagaugcugcagaaggaguacauggagcggcaggggaagacgccccugggccuggucgaccucuucguguucuccaccagcuucuaccugaucuccaucuuccugcaccucgugaagaucccgacccaccgccacaucgucggcaagagcugccccaagccccaccggcugaaccacauggggaucugcuccugcgggcuguacaagcagcccggcgugccggugcgcuggaagcggugaggacuagucccuguucccagagcccacuuuuuuuucuuuuuuugaaauaaaauagccugucuuucagaucucaaaggcucuuuucagagccaccaaaaaaaaaaaaaaaaaaaaaaaaaaaaaaaaaaaaaaaaaaaaaaaaaaaaaaaaaaaaaaaaagaauu

SEQ ID NO: 36733 - RNA, 1717 nt, Artificial Sequence
  mRNA product Design a-1 (hSL-A64-N5) comprising derived and/or modified sequence from LASV(G3010-SLE-2013;Clade IV)__AIT17344__GPCmut10 (opt1)
aggagagucccgcagucggcguccagcggcucugcuuguucgugugugugucguugcaggccuuauucaagcuuaccaugggccagaucgugaccuucuuccaggaggucccccacgugaucgaggaggugaugaacaucguccugaucgcccucagcauccuggccgugcugaaggggcucuacaacuucgcgaccugcggccugguggggcuggucacguuccuccugcugugcggccgcuccugcaccaccagccucuacaaggggguguacgagcugcagacccuggagcucaacauggagacgcugaacaugugcaugccgcuguccugcaccaagaacaacagccaccacuacaucauggugggcaacgagaccggccucgagcugacccugacgaacaccuccaucaucaaccacaaguucugcaaccucagcgacgcccacaagaagaaccuguacaaccacgcccugauguccaucaucagcaccuuccaccucuccauccccaacuucaaccaguacgaggccaugagcugcgacuucaacgggggcaagaucuccguccaguacaaccugagccacuccuacgccggggacgcggccagccacugcggcaccguggccaacggggugcugcagacguucaugcggauggccuggggcggcuccuacaucgcgcucgacagcggguacggcaagugggacugcaucaugaccuccuaccaguaccugaucauccagaacaccaccugggaggaccacugccaguucagccgccccucccccaucggguaccugggccuccugagccagcggacgcgcgacaucuacaucagccggcgccugcucggcaccuucaccuggacccuguccgacagcgaggggaaggacacgccgggcggguacugccugacccgguggaugcucaucgaggccgagcugaagugcuucggcaacaccgccgucgccaagugcaacgagaagcacgacgaggaguucugcgacaugcugcgccucuucgacuucugcaagcaggccauccagcggcugaagaccgaggcgcagauguccauccagcugaucaacaaggccgugaacgcccucaucaacgaccagcugaucaugaagaaccaccuccgcgacaucauggggauccccuacugcaacuacagcaaguacugguaccugaaccacacgaccaccggcaagaccucccugcccaagugcuggcuggugagcaacggcuccuaccucaacgagacgcacuucagcgacgacaucgagcagcaggccgacaacaugaucaccgagaugcugcagaaggaguacauggagcggcaggggaagacgccccugggccuggucgaccucuucguguucuccaccagcuucuaccugaucuccaucuuccugcaccucgugaagaucccgacccaccgccacaucgucggcaagagcugccccaagccccaccggcugaaccacauggggaucugcuccugcgggcuguacaagcagcccggcgugccggugcgcuggaagcggugaggacuagucccuguucccagagcccacuuuuuuuucuuuuuuugaaauaaaauagccugucuuucagaucucaaaggcucuuuucagagccaccaaaaaaaaaaaaaaaaaaaaaaaaaaaaaaaaaaaaaaaaaaaaaaaaaaaaaaaaaaaaaaaaagaauu

SEQ ID NO: 36734 - RNA, 1717 nt, Artificial Sequence
  mRNA product Design a-1 (hSL-A64-N5) comprising derived and/or modified sequence from LASV(G502-SLE-2009;Clade IV)__AIT17126__GPCmut10 (opt1)
aggagagucccgcagucggcguccagcggcucugcuuguucgugugugugucguugcaggccuuauucaagcuuaccaugggccagaucgugaccuucuuccaggaggucccccacgugaucgaggaggugaugaacaucguccugaucgcccucagcauccuggccgugcugaaggggcucuacaacuucgcgaccugcggccugguggggcugcucacguuccugcugcucugcggccgcuccugcaccaccgggcuguacaagggcgucuacgagcugcagacccucgagcugaacauggagacgcugaacaugugcaugccgcucagcugcaccaagaacaacucccaccacuacaucauggugggcaacgagaccgggcuggagcugacccucacgaacaccagcaucaucaaccacaaguucugcaaccuguccgacgcccacaagaagaaccuguacgaccacgcccucaugagcaucaucuccaccuuccaccugagcauccccaacuucaaccaguacgaggccauguccugcgacuucaacggcgggaagaucagcgugcaguacaaccugucccacagcuacgccggcgacgcggccgaccacugcgggaccgucgccaacggcgugcuccagacguucaugcggauggccuggggcggguccuacaucgcgcuggacagcggccgcgggcggugggacugcaucaugaccuccuaccaguaccugaucauccagaacaccaccugggaggaccacugccaguucagccgccccucccccaucggcuaccucggccugcugagccagcggacgcgcgacaucuacaucucccggcgccuccuggggaccuucaccuggacccugagcgacagcgagggcaaggacacgcccgggggcuacugccucacccgguggaugcugaucgaggccgagcugaagugcuucgggaacaccgccguggccaagugcaacgagaagcacgacgaggaguucugcgacaugcuccgccuguucgacuucugcaagcaggccauccagcggcugaaggcggaggcccagauguccauccagcucaucaacaaggccgucaacgcccugaucaacgaccagcuggugaugaagaaccaccuccgcgacaucaugggcauccccuacugcaacuacagccgguacugguaccugaaccacaccacgaccggccgcaccucccugcccaagugcuggcucgugagcaacggguccuaccugaacgagacccacuucagcgacgacaucgagcagcaggccgacaacaugaucacggagaugcugcagaaggaguacauggagcggcagggcaagaccccgcuggggcucgucgaccuguucguguucuccaccagcuucuaccugaucuccaucuuccuccaccuggugaagaucccgacccaccgccacaucgucggcaagagcugccccaagccccaccggcugaaccacauggggaucugcuccugcggccucuacaagcagcccggcgugccggugaaguggaagcgcugaggacuagucccuguucccagagcccacuuuuuuuucuuuuuuugaaauaaaauagccugucuuucagaucucaaaggcucuuuucagagccaccaaaaaaaaaaaaaaaaaaaaaaaaaaaaaaaaaaaaaaaaaaaaaaaaaaaaaaaaaaaaaaaaagaauu

SEQ ID NO: 36735 - RNA, 1717 nt, Artificial Sequence
  mRNA product Design a-1 (hSL-A64-N5) comprising derived and/or modified sequence from LASV(G733-SLE-2010;Clade IV)__AIT17154__GPCmut10 (opt1)
aggagagucccgcagucggcguccagcggcucugcuuguucgugugugugucguugcaggccuuauucaagcuuaccaugggccagaucgugaccuucuuccaggaggucccccacgugaucgaggaggugaugaacaucguccugaucgcccucagcauccuggccgugcugaaggggcucuacaacuucgcgaccugcggcaucguggggcuggucuccuuccugcuccugugcggccgcagcugcacgaccucccuguacaaggggguguacgagcuccagacccuggagcugaacauggagacccucaacaugugcaugccgcugagcugcacgaagaacaacucccaccacuacaucauggugggcaacgagaccggccuggagcucacccugaccaacacgagcaucaucaaccacaaguucugcaaccuguccgacgcccacaagaagaaccucuacgaccacgcccugaugagcaucaucuccaccuuccaccugagcauccccaacuucaaccaguacgaggccauguccugcgacuucaacgggggcaagaucagcguccaguacaaccucucccacagcuacgccggggacgcggccaaccacugcggcaccaucgccaacggggugcugcagaccuucaugcggauggccuggggcggcuccuacaucgcgcuggacagcgggcgcgaccggugggacugcaucaugacguccuaccaguaccucaucauccagaacaccaccugggaggaccacugccaguucagccgccccucccccaucggcuaccuggggcugcucagccagcggacccgcgacaucuacaucagccggcgccugcugggcacguucaccuggacccucuccgacagcgagggcaaggacacccccgggggcuacugccugacgcgguggaugcugaucgaggccgagcucaagugcuucgggaacaccgccguggccaagugcaacgagaagcacgacgaggaguucugcgacaugcugcgccuguucgacuucugcaagcaggccauccagcggcucaaggcggaggcccagauguccauccagcugaucaacaaggccgucaacgcccugaucaacgaccagcucaucaugaagaaccaccuccgcgacaucaugggcaucccguacugcaacuacagcaaguacugguaccugaaccacaccaccacggggaagaccucccugcccaagugcuggcuggugagcaacggcuccuaccugaacgagacccacuucagcgacgacaucgagcagcaggccgacaacaugaucaccgagaugcuccagaaggaguacauggagcggcagggcaagacgccccuggggcugguggaccuguucgucuucuccaccagcuucuaccucaucuccaucuuccugcaccuggugaagaucccgacccaccgccacguggucggcaagagcugccccaagccccaccggcucaaccacauggggaucugcuccugcggccuguacgggcagcccggcgugccggugaaguggaagcgcugaggacuagucccuguucccagagcccacuuuuuuuucuuuuuuugaaauaaaauagccugucuuucagaucucaaaggcucuuuucagagccaccaaaaaaaaaaaaaaaaaaaaaaaaaaaaaaaaaaaaaaaaaaaaaaaaaaaaaaaaaaaaaaaaagaauu

SEQ ID NO: 36736 - RNA, 1717 nt, Artificial Sequence
  mRNA product Design a-1 (hSL-A64-N5) comprising derived and/or modified sequence from MOPV/LASV reassortant(IGS-1;Clade IV)__AFY05576__GPCmut10 (opt1)
aggagagucccgcagucggcguccagcggcucugcuuguucgugugugugucguugcaggccuuauucaagcuuaccaugggccagaucgugaccuucuuccaggaggucccccacgugaucgaggaggugaugaacaucguccugaucgcccucagcgugcuggccgugcugaaggggcucuacaacuucgcgaccugcggccuggucgggcuggugaccuuccuccugcugugcggccgcuccugcaccaccagccucuacaaggggguguacgagcugcagacccuggagcucaacauggagacgcugaacaugugcaugccgcuguccugcaccaagaacaacagccaccacuacaucauggucggcaacgagaccggccucgagcugacccugacgaacaccuccaucaucaaccacaaguucugcaaccucagcgacgcccacaagaagaaccuguacgaccacgcccugauguccaucaucagcaccuuccaccucuccauccccaacuucaaccaguacgaggccaugagcugcgacuucaacgggggcaagaucuccgugcaguacaaccugagccacuccuacgccggggacgcggccaaccacugcggcaccguggccaacgggguccugcagacguucaugcggauggccuggggcggcagcuacaucgcgcucgacuccgggcgcggcaacugggacugcaucaugaccagcuaccaguaccugaucauccagaacaccaccugggaggaccacugccaguucucccggcccagccccaucggguaccugggccuccugucccagcgcacgcgggacaucuacaucagccgccggcugcucggcaccuucaccuggacccugagcgacuccgagggggaggacacgccgggcggguacugccugacccgcuggaugcucaucgaggccgagcugaagugcuucggcaacaccgccguggccaagugcaacgagaagcacgacgaggaguucugcgacaugcugcggcuguucgacuucugcaagcaggccauccagcgccugaaggcggaggcccagaugagcauccagcugaucaacaaggccgugaacgcccucaucaacgaccagcugaucaugaagaaccaccuccgggacaucauggggauccccuacugcaacuacuccaaguacugguaccucaaccacaccacgaccggccgcaccagccugcccaagugcuggcuggucuccaacggcagcuaccucaacgagacccacuucuccgacgacaucgagcagcaggccgacaacaugaucacggagaugcugcagaaggaguacauggagcggcaggggaagacgccccugggccugguggaccucuucguguucagcaccuccuucuaccugaucagcaucuuccugcaccucgucaagaucccgacccaccgccacaucguggggaaguccugccccaagccccaccggcugaaccacaugggcaucugcagcugcgggcuguacaagcagcccggcgugccggucaaguggaagcgcugaggacuagucccuguucccagagcccacuuuuuuuucuuuuuuugaaauaaaauagccugucuuucagaucucaaaggcucuuuucagagccaccaaaaaaaaaaaaaaaaaaaaaaaaaaaaaaaaaaaaaaaaaaaaaaaaaaaaaaaaaaaaaaaaagaauu

SEQ ID NO: 36737 - RNA, 1717 nt, Artificial Sequence
  mRNA product Design a-1 (hSL-A64-N5) comprising derived and/or modified sequence from LASV(LM765-SLE-2012;Clade IV)__AIT17814__GPCmut10 (opt1)
aggagagucccgcagucggcguccagcggcucugcuuguucgugugugugucguugcaggccuuauucaagcuuaccaugggccagaucgugaccuucuuccaggaggucccccacgugaucgaggaggugaugaacaucguccugaucgcccucagcauccuggccgugcugaaggggcucuacaacuucgcgaccugcggccugguggggcuggucacguuccuccugcugugcggccgcuccugcaccaccagccucuacaaggggguguacgagcugcagacccuggagcucaacauggagacgcugaacaugugcaugccgcuguccugcaccaagaacaacagccaccacuacaucauggugggcaacgagaccggccucgagcugacccugacgaacaccuccaucaucgaccacaaguucugcaaccucagcgacgcccaccggaagaaccuguacgaccacgcccugauguccaucaucagcaccuuccaccucuccauccccaacuucaaccaguacgaggccaugagcugcgacuucaacgggggcaagaucuccguccaguacaaccugagccacuccuacgccaaggacgcggccgaccacugcgggaccguggccaacggcgugcugcagacguucaugcgcauggccuggggcgggagcuacaucgcgcucgacuccggccgggggcgcugggacugcaucaugaccagcuaccaguaccugaucauccagaacaccaccugggaggaccacugccaguucucccggcccagccccaucggcuaccuggggcuccugucccagcgcacgcgggacaucuacaucagccgccggcugcucggcaccuucaccuggacccugagcgacuccgagggcaaggacacgcccgggggcuacugccugacccgcuggaugcucaucgaggccgagcugaagugcuucgggaacaccgccgucgccaagugcaacgagaagcacgacgaggaguucugcgacaugcugcggcuguucgacuucugcaagcaggccauccagcgccugaaggcggaggcccagaugagcauccagcugaucaacaaggccgugaacgcccucaucaacgaccagcugaucaugaagaaccaccuccgggacaucaugggcauccccuacugcaacuacuccaaguacugguaccucaaccacaccacgaccgggaagaccagccugcccaagugcuggcugguguccaacggcagcuaccucaacgagacccacuucuccgacgacaucgagcagcaggccgacaacaugaucacggagaugcugcagaaggaguacauggagcgccagggcaagaccccgcuggggcuggucgaccucuucguguucagcaccuccuucuaccugaucagcaucuuccugcaccucgugaagaucccgacccaccggcacaucgucggcaagcccugccccaagccccaccgccugaaccacauggggaucugcuccugcggccuguacaagcagccgggggugcccgugaaguggaagcggugaggacuagucccuguucccagagcccacuuuuuuuucuuuuuuugaaauaaaauagccugucuuucagaucucaaaggcucuuuucagagccaccaaaaaaaaaaaaaaaaaaaaaaaaaaaaaaaaaaaaaaaaaaaaaaaaaaaaaaaaaaaaaaaaagaauu

SEQ ID NO: 36738 - RNA, 1717 nt, Artificial Sequence
  mRNA product Design a-1 (hSL-A64-N5) comprising derived and/or modified sequence from LASV(LM776-SLE-2012;Clade IV)__AIT17824__GPCmut10 (opt1)
aggagagucccgcagucggcguccagcggcucugcuuguucgugugugugucguugcaggccuuauucaagcuuaccaugggccagaucgugaccuucuuccaggaggucccccacgugaucgaggaggugaugaacaucguccugaucgcccucagcauccuggccgugcugaaggggcucuacaacuucgcgaccugcggccugguggggcuggucaccuuccuccugcugugcggccgcuccugcaccaccagcguguacaaggggguguacgagcuccagacccuggagcugaacauggagacgcucaacaugugcaugccgcuguccugcaccaagaacaacagccaccacuacaucauggucggcaacgagaccggccuggagcucacccugacgaacaccuccaucaucaaccacaaguucugcaaccugagcgacgcccacaagaagaaccucuacgaccacgcccugauguccaucaucagcaccuuccaccuguccauccccaacuucaaccaguacgaggccaugagcugcgacuucaacgggggcaagaucuccgugcaguacaaccucagccacuccuacgccggggacgcggccaaccacugcggcaccguggccaacgggguccugcagacguucaugcggauggccuggggcggcagcuacaucgcgcuggacuccgggcacggcaagugggacugcaucaugaccagcuaccaguaccucaucauccagaacaccaccugggaggaccacugccaguucucccgccccagccccaucggguaccugggccugcucucccagcggacgcgcgacaucuacaucagccggcgccugcugggcaccuucaccuggacccucagcgacuccgaggggaaggacacgccgggcggguacugccugacccgguggaugcugaucgaggccgagcucaagugcuucggcaacaccgccguggccaagugcaacgagaagcacgacgaggaguucugcgacaugcugcgccuguucgacuucugcaagcaggccauccagcggcucaaggcggaggcccagaugagcauccagcugaucaacaaggccgugaacgcccugaucaacgaccagcucaucaugaagaaccaccuccgcgacaucauggggauccccuacugcaacuacuccaaguacugguaccugaaccacaccacgaccggcaagaccagccugcccaagugcuggcuggucuccaacggcagcuaccugaacgagacccacuucuccgacgacaucgagcagcaggccgacaacaugaucacggagaugcuccagaaggaguacauggagcggcaggggaagacgccccugggccugguggaccuguucguguucagcaccuccuucuaccucaucagcaucuuccugcaccuggucaagaucccgacccaccgccacaucguggggaaguccugccccaagccccaccggcucaaccacaugggcaucugcagcugcgggcuguacaagcagcccggcgugccgguccgcuggaagcggugaggacuagucccuguucccagagcccacuuuuuuuucuuuuuuugaaauaaaauagccugucuuucagaucucaaaggcucuuuucagagccaccaaaaaaaaaaaaaaaaaaaaaaaaaaaaaaaaaaaaaaaaaaaaaaaaaaaaaaaaaaaaaaaaagaauu

SEQ ID NO: 36739 - RNA, 1717 nt, Artificial Sequence
  mRNA product Design a-1 (hSL-A64-N5) comprising derived and/or modified sequence from LASV(Mad39;Clade IV)__ANH09722__GPCmut10 (opt1)
aggagagucccgcagucggcguccagcggcucugcuuguucgugugugugucguugcaggccuuauucaagcuuaccaugggccagaucgugaccuucuuccaggaggucccccacgugaucgaggaggugaugaacaucguccugaucgcccucagcauccuggccgugcugaaggggcucuacaacguggcgaccugcggccugaucgggcuggucacguuccuccugcugugcggccgcuccugcaccaccacccucuacaaggggguguacgagcugcaggcccuggagcucaacauggagacgcugaacaugugcaugccgcugagcugcaccaagaacaacucccaccacuacauccgggugggcaacgagaccggccucgagcugacccugacgaacaccagccucaucaaccacaaguucugcaaccuguccgacgcccacaagaagaaccuguacgaccacgcccucaugagcaucaucuccaccuuccaccugagcauccccaacuucaaccaguacgaggccauguccugcgacuucaacgacgggaagaucagcguccaguacaaccugucccacaccuacgcgggcgacacggccaaccacugcgggaccguggccaacggcgugcuccagaccuucaugcgcauggccuggggcgggagcuacaucgcgcuggacuccggccgcgggggcugggacugcaucaugaccagcuaccaguaccugaucauccagaacacgaccugggaggaccacugccaguucucccggcccagccccaucggguaccucggccugcugucccagcggacccgcgacaucuacaucagccggcgccuccugggcaccuucacguggacccuguccgacagcgaggggaaggacaccccgggcggguacugccucacccgguggaugcugaucgaggccgagcugaagugcuucggcaacacggccgucgccaagugcaacgagaagcacgacgaggaguucugcgacaugcuccgccuguucgacuucugcaagcaggccauccagcggcugaaggcggaggcccagaugagcauccagcucaucaacaaggccgugaacgcccugaucaacgaccagcugaucaugaagaaccaccuccgcgacaucauggggauccccuacugcaacuacuccaaguacugguaccugaaccacaccgugaccggcaagaccagccugcccaagugcuggcucgucuccaacggcagcuaccugaacgagacgcacuucuccgacgacaucgagcagcaggccgacaacaugaucaccgagaugcugcagaaggaguacauggagcggcaggggaagacgccccugggccucguggaccuguucguguucagcaccuccuucuaccugaucagcaucuuccuccaccuggucaagaucccgacccaccgccacgugguggggaagcccugccccaagccccaccggcugaaccacaugggcaucugcuccugcggguucuacaagcagccgggcguccccgugcgcuggaagcggugaggacuagucccuguucccagagcccacuuuuuuuucuuuuuuugaaauaaaauagccugucuuucagaucucaaaggcucuuuucagagccaccaaaaaaaaaaaaaaaaaaaaaaaaaaaaaaaaaaaaaaaaaaaaaaaaaaaaaaaaaaaaaaaaagaauu

SEQ ID NO: 36740 - RNA, 1717 nt, Artificial Sequence
  mRNA product Design a-1 (hSL-A64-N5) comprising derived and/or modified sequence from LASV(Z0947-SLE-2011;Clade IV)__AIT17840__GPCmut10 (opt1)
aggagagucccgcagucggcguccagcggcucugcuuguucgugugugugucguugcaggccuuauucaagcuuaccaugggccagaucgugaccuucuuccaggaggucccccacgugaucgaggaggugaugaacaucguccugaucgcccucagcauccuggccgugcugaaggggcucuacaacuucgcgaccugcggccugguggggcuggucacguuccuccugcugugcggccgcuccugcaccaucagccucuacaaggggguguacgagcugcagacccuggagcucaacauggagacccugaacaugugcaugccgcuguccugcacgaagaacaacagccaccacuacaucauggugggcaacgagaccggccucgagcugacccugaccaacacguccaucaucaaccacaaguucugcaaccucagcgacgcccacaagaagaaccuguacgaccacgcccugauguccaucaucagcaccuuccaccucuccauccccaacuucaaccaguacgaggccaugagcugcgacuucaacgggggcaagaucuccguccaguacaaccugagccacuccuacgccggggacgcggccaaccacugcggcaccguggccaacggggugcugcagaccuucaugcggauggccuggggcggcagcuacaucgcgcucgacuccgggcgcgaccggugggacugcaucaugacgagcuaccaguaccugaucauccagaacaccaccugggaggaccacugccaguucucccgccccagccccaucggcuaccuggggcuccugucccagcggacccgcgacaucuacaucagccggcgccugcucggcacguucaccuggacccugagcgacuccgagggcaaggacacccccgggggcuacugccugacgcgguggaugcucaucgaggccgagcugaagugcuucgggaacaccgccgucgccaagugcaacgagaagcacgacgaggaguucugcgacaugcugcgccucuucgacuucugcaagcaggccauccagcggcugaaggcggaggcccagaugagcauccagcugaucaacaaggccgugaacgcccucaucaacgaccagcugaucaugaagaaccaccuccgcgacaucaugggcaucccguacugcaacuacuccaaguacugguaccugaaccacaccaccacggggaagaccagccugcccaagugcuggcugguguccaacggcagcuaccucaacgagacccacuucuccgacgacaucgagcagcaggccgacaacaugaucaccgagaugcugcagaaggaguacauggagcggcagggcaagacgccccuggggcuggucgaccucuucguguucagcaccuccuucuaccugaucagcaucuuccugcaccucgugaagaucccgacccaccgccacaucgucggcaagcccugccccaagccccaccggcugaaccacauggggaucugcuccugcggccuguacaagcagccgggggugcccgugaaguggaagcgcugaggacuagucccuguucccagagcccacuuuuuuuucuuuuuuugaaauaaaauagccugucuuucagaucucaaaggcucuuuucagagccaccaaaaaaaaaaaaaaaaaaaaaaaaaaaaaaaaaaaaaaaaaaaaaaaaaaaaaaaaaaaaaaaaagaauu

SEQ ID NO: 36741 - RNA, 1717 nt, Artificial Sequence
  mRNA product Design a-1 (hSL-A64-N5) comprising derived and/or modified sequence from LASV(Josiah;Clade IV)__NP_694870__GPCmut10 (opt4)
aggagagucccgcagucggcguccagcggcucugcuuguucgugugugugucguugcaggccuuauucaagcuuaccaugggccagaucgugaccuucuuccaggaggugccccacgugaucgaggaggugaugaacaucgugcugaucgcccugagcgugcuggccgugcugaagggccuguacaacuucgccaccugcggccuggugggccuggugaccuuccugcugcugugcggcagaagcugcaccaccagccuguacaagggcguguacgagcugcagacccuggagcugaacauggagacccugaacaugugcaugccccugagcugcaccaagaacaacagccaccacuacaucauggugggcaacgagaccggccuggagcugacccugaccaacaccagcaucaucaaccacaaguucugcaaccugagcgacgcccacaagaagaaccuguacgaccacgcccugaugagcaucaucagcaccuuccaccugagcauccccaacuucaaccaguacgaggccaugagcugcgacuucaacggcggcaagaucagcgugcaguacaaccugagccacagcuacgccggcgacgccgccaaccacugcggcaccguggccaacggcgugcugcagaccuucaugagaauggccuggggcggcagcuacaucgcccuggacagcggcagaggcaacugggacugcaucaugaccagcuaccaguaccugaucauccagaacaccaccugggaggaccacugccaguucagcagacccagccccaucggcuaccugggccugcugagccagagaaccagagacaucuacaucagcagaagacugcugggcaccuucaccuggacccugagcgacagcgagggcaaggacacccccggcggcuacugccugaccagauggaugcugaucgaggccgagcugaagugcuucggcaacaccgccguggccaagugcaacgagaagcacgacgaggaguucugcgacaugcugagacuguucgacuucugcaagcaggccauccagagacugaaggccgaggcccagaugagcauccagcugaucaacaaggccgugaacgcccugaucaacgaccagcugaucaugaagaaccaccugagagacaucaugggcauccccuacugcaacuacagcaaguacugguaccugaaccacaccaccaccggcagaaccagccugcccaagugcuggcuggugagcaacggcagcuaccugaacgagacccacuucagcgacgacaucgagcagcaggccgacaacaugaucaccgagaugcugcagaaggaguacauggagagacagggcaagaccccccugggccugguggaccuguucguguucagcaccagcuucuaccugaucagcaucuuccugcaccuggugaagauccccacccacagacacaucgugggcaagagcugccccaagccccacagacugaaccacaugggcaucugcagcugcggccuguacaagcagcccggcgugcccgugaaguggaagagaugaggacuagucccuguucccagagcccacuuuuuuuucuuuuuuugaaauaaaauagccugucuuucagaucucaaaggcucuuuucagagccaccaaaaaaaaaaaaaaaaaaaaaaaaaaaaaaaaaaaaaaaaaaaaaaaaaaaaaaaaaaaaaaaaagaauu

SEQ ID NO: 36742 - RNA, 1714 nt, Artificial Sequence
  mRNA product Design a-1 (hSL-A64-N5) comprising derived and/or modified sequence from LASV(LP;Clade I)__AAF86701__GPCmut10 (opt4)
aggagagucccgcagucggcguccagcggcucugcuuguucgugugugugucguugcaggccuuauucaagcuuaccaugggccagaucaucaccuucuuccaggaggugccccacgugaucgaggaggugaugaacaucgugcugaucgcccugagccugcuggccauccugaagggccuguacaacaucgccaccugcggcaucaucggccugguggccuuccuguuccugugcggcaagagcugcagccugacccugaagggcggcuacgagcugcagacccuggagcugaacauggagacccugaacaugugcaugccccugagcugcaccaagaacagcagccaccacuacaucagagugggcaacgagaccggccuggagcugacccugaccaacaccagcaucaucaaccacaaguucugcaaccugagcgacgcccacaagaagaaccuguacgaccacgcccugaugagcaucaucagcaccuuccaccugagcauccccaacuucaaccaguacgaggccaugagcugcgacuucaacggcggcaagaucagcgugcaguacaaccugagccacagcuacgccggcgacgccgccgagcacugcggcaccguggccaacggcgugcugcagaccuucaugagaauggccuggggcggcagauacaucgcccuggacagcggcaagggcaacugggacugcaucaugaccagcuaccaguaccugaucauccagaacaccaccugggaggaccacugccaguucagcagacccagccccaucggcuaccugggccugcugagccagagaaccagagacaucuacaucagcagaagacugcugggcaccuucaccuggacccugagcgacagcgagggcaacgagacccccggcggcuacugccugaccagauggaugcugaucgaggccgagcugaagugcuucggcaacaccgccguggccaagugcaacgagaagcacgacgaggaguucugcgacaugcugagacuguucgacuucugcaagcaggccaucagaagacugaaggccgaggcccagaugagcauccagcugaucaacaaggccgugaacgcccugaucaacgaccagcugaucaugaagaaccaccugagagacaucaugggcauccccuacugcaacuacagcaaguacugguaccugaaccacaccagcagcggcagaaccagccugcccaagugcuggcugaucagcaacggcagcuaccugaacgagacccaguucagcgacgacaucgagcagcaggccgacaacaugaucaccgagaugcugcagaaggaguacaucgagagacagggcaagaccccccugggccugguggacaucuucaucuucagcaccagcuucuaccugaucagcaucuuccugcaccugaucaagauccccacccacagacacaucgugggcaagcccugccccaagccccacagacugaaccacaugggcgugugcagcugcggccuguacaagcaccccggcgugcccaccaaguggaagagaugaggacuagucccuguucccagagcccacuuuuuuuucuuuuuuugaaauaaaauagccugucuuucagaucucaaaggcucuuuucagagccaccaaaaaaaaaaaaaaaaaaaaaaaaaaaaaaaaaaaaaaaaaaaaaaaaaaaaaaaaaaaaaaaaagaauu

SEQ ID NO: 36743 - RNA, 1714 nt, Artificial Sequence
  mRNA product Design a-1 (hSL-A64-N5) comprising derived and/or modified sequence from LASV(803213;Clade II)__AAF86703__GPCmut10 (opt4)
aggagagucccgcagucggcguccagcggcucugcuuguucgugugugugucguugcaggccuuauucaagcuuaccaugggccagaucaucaccuucuuccaggaggugccccacgugaucgaggaggugaugaacaucgugcugaucgcccugagccugcuggccauccugaagggcaucuacaacguggccaccugcggccuguucggccugaucagcuuccugcugcugugcggcagaagcugcagcgugaccuacaagggcguguacgagcugcagacccuggagcugaacauggccaaccugaacaugugcaugccccugagcugcaccaagaacaacagccaccacuacaucauggugggcaacgagaccggccuggagcugacccugaccaacaccagcaucaucaaccacaaguucugcaaccugagcgacgcccacaagaagaaccuguacgaccacgcccugaugagcaucaucagcaccuuccaccugagcauccccaacuucaaccaguacgaggccaugagcugcgacuucaacggcggcaagaucagcgugcaguacaaccugagccacagcuucgccguggacgccgccaaccacugcggcaccaucgccaacggcgugcugcagaccuucaugagaauggccuggggcggcagcuacaucgcccuggacagcggcaagggcaacugggacugcaucaugaccagcuaccaguaccugaucauccagaacaccaccugggaggaccacugccaguucagcagacccagccccaucggcuaccugggccugcugagccagagaaccagagacaucuacaucagcagaagacugcugggcaccuucaccuggacccugagcgacagcgagggcaacgaggcccccggcggcuacugccugaccagauggaugcugaucgaggccgagcugaagugcuucggcaacaccgccguggccaagugcaacgagaagcacgacgaggaguucugcgacaugcugagacuguucgacuucugcaagcaggccaucaagagacugaagaccgaggcccagaugagcauccagcugaucaacaaggccgugaacgcccugaucaacgaccagcugaucaugaagaaccaccugagagacaucaugggcauccccuacugcaacuacagcagauacugguaccugaaccacaccgugaccggcaagaccagccugcccagaugcuggcuggugagcaacggcagcuaccugaacgagacccacuucagcgacgacaucgagcagcaggccgacaacaugaucaccgagaugcugcagaaggaguacauggacagacagggcaagaccccccugggccugguggaccuguucguguucagcaccagcuucuaccugaucagcaucuuccugcaccuggugaagauccccacccacagacacaucgugggcaagcccugccccaagccccacagacugaaccacaugggcaucugcagcugcggccuguacaagcaccccggcgugcccgugaaguggaagagaugaggacuagucccuguucccagagcccacuuuuuuuucuuuuuuugaaauaaaauagccugucuuucagaucucaaaggcucuuuucagagccaccaaaaaaaaaaaaaaaaaaaaaaaaaaaaaaaaaaaaaaaaaaaaaaaaaaaaaaaaaaaaaaaaagaauu

SEQ ID NO: 36744 - RNA, 1714 nt, Artificial Sequence
  mRNA product Design a-1 (hSL-A64-N5) comprising derived and/or modified sequence from LASV(GA391;Clade III)__CAA36645__GPCmut10 (opt4)
aggagagucccgcagucggcguccagcggcucugcuuguucgugugugugucguugcaggccuuauucaagcuuaccaugggccagaucgugaccuucuuccaggaggugccccacgugaucgaggaggugaugaacaucgugcugaucgcccugagcauccuggccauccugaagggccuguacaacguggccaccugcggccugaucggccuggugaccuuccugcugcugagcggcagaagcugcagccugaucuacaagggcaccuacgagcugcagacccuggagcugaacauggagacccugaacaugugcaugccccugagcugcaccaagaacaacagccaccacuacaucagagugggcaacgagaccggccuggagcugacccugaccaacaccagcauccugaaccacaaguucugcaaccugagcgacgcccacaagagaaaccuguacgaccacagccugaugagcaucaucagcaccuuccaccugagcauccccaacuucaaccaguacgaggccaugagcugcgacuucaacggcggcaagaucaccgugcaguacaaccugagccacagcuucgccguggacgccgccggccacugcggcacccuggccaacggcgugcugcagaccuucaugagaauggccuggggcggcagcuacaucgcccuggacagcggcagaggcaacugggacugcaucaugaccagcuaccaguaccugaucauccagaacaccaccugggacgaccacugccaguucagcagacccagccccaucggcuaccugggccugcugagccagagaaccagagacaucuacaucagcagaagacugcugggcaccuucaccuggacccugagcgacagcgagggcaacgagacccccggcggcuacugccugaccagauggaugcugaucgaggccgagcugaagugcuucggcaacaccgccguggccaagugcaacgagaagcacgacgaggaguucugcgacaugcugagacuguucgacuucugcaagcaggccaucagaagacugaagaccgaggcccagaugagcauccagcugaucaacaaggccgugaacgcccugaucaacgaccagcugaucaugaagaaccaccugagagacaucaugggcauccccuacugcaacuacagcagauacugguaccugaaccacaccagcaccggcaagaccagccugcccagaugcuggcugaucagcaacggcagcuaccugaacgagaccaaguucagcgacgacaucgagcagcaggccgacaacaugaucaccgagaugcugcagaaggaguacaucgacagacagggcaagaccccccugggccugguggaccuguucguguucagcaccagcuucuaccugaucagcaucuuccugcaccuggugaagauccccacccacagacacaucgugggcaagcccugccccaagccccacagacugaaccacaugggcaucugcagcugcggccuguacaagcagcccggcgugcccgugagauggaagagaugaggacuagucccuguucccagagcccacuuuuuuuucuuuuuuugaaauaaaauagccugucuuucagaucucaaaggcucuuuucagagccaccaaaaaaaaaaaaaaaaaaaaaaaaaaaaaaaaaaaaaaaaaaaaaaaaaaaaaaaaaaaaaaaaagaauu

SEQ ID NO: 36745 - RNA, 1717 nt, Artificial Sequence
  mRNA product Design a-1 (hSL-A64-N5) comprising derived and/or modified sequence from LASV(AV;Clade V)__CCA30314__GPCmut10 (opt4)
aggagagucccgcagucggcguccagcggcucugcuuguucgugugugugucguugcaggccuuauucaagcuuaccaugggccagaucgugaccuucuuccaggaggugccccacgugaucgaggaggugaugaacaucgugcugaucgcccugagcauccuggccgugcugaagggccuguacaacaucgccaccugcggccugaucggccugaucaccuuccugcugcugugcggcagaagcugcagcagcaaccuguacaagggcguguacgagcugcagagccuggaccugaacauggagacccugaacaugugcaugccccugagcugcaccaagaacaacagccaccacuacaucagagugggcaacgacaccggccuggagcugacccugaccaacaccagcauccugaaccacaaguucugcaaccugagcgacgcccacaagaaggaccuguacgaccacgcccugaugagcaucaucagcaccuuccaccugagcauccccaacuucaaccaguacgaggccaugagcugcgacuucaacggcggcaagaucagcgugcaguacaaccugagccacagcuacgccaucgacgccgccaaccacugcggcaccguggccaacggcauccugcagaccuucaugagaauggccuggggcggcagcuacaucgcccuggacagcggcagaggcaacugggacugcaucaugaccagcuaccaguaccugaucauccagaacaccaccugggagaaccacugccaguucagcagacccagccccaucggcuaccugggccugcugagccagagaaccagagacaucuacaucagcagaagacugcugggcaccuucaccuggacccugagcgacagcgagggcaacgccacccccggcggcuacugccugaccagauggaugcugaucgaggccgagcugaagugcuucggcaacaccgccguggccaagugcaacgagaagcacgacgaggaguucugcgacaugcugagacuguucgacuucugcaagcaggccaucagcagacugaagagcgaggcccagaugagcauccagcugaucaacaaggccgugaacgcccugaucaacgaccagcugaucaugaagaaccaccugagagacaucaugggcauccccuacugcaacuacagcaaguacugguaccugaaccacaccaucaccggcaagaccagccugcccaagugcuggcuggugagcaacggcagcuaccugaacgagacccacuucagcgacgacaucgagcagcaggccgacaacaugaucaccgagaugcugcagaaggaguacauggagagacagggcaagaccccccugggccugguggaccuguucguguucagcaccagcuucuaccugaucagcaucuuccugagacuggugaagauccccacccacagacacaucgugggcaagcccugccccaagccccacagacugaaccacaugggcaucugcagcugcggccuguacaagcagcccggcgugcccgugagauggaagagaugaggacuagucccuguucccagagcccacuuuuuuuucuuuuuuugaaauaaaauagccugucuuucagaucucaaaggcucuuuucagagccaccaaaaaaaaaaaaaaaaaaaaaaaaaaaaaaaaaaaaaaaaaaaaaaaaaaaaaaaaaaaaaaaaagaauu

SEQ ID NO: 36746 - RNA, 1714 nt, Artificial Sequence
  mRNA product Design a-1 (hSL-A64-N5) comprising derived and/or modified sequence from LASV(Togo/2016/7082;Clade VI)__AMR44577__GPCmut10 (opt4)
aggagagucccgcagucggcguccagcggcucugcuuguucgugugugugucguugcaggccuuauucaagcuuaccaugggccagaucaucaccuucuuccaggaggugccccacgugaucgaggaggugaugaacaucgugcugaucgcccugagccugcuggccauccugaagggcguguacaacguggccaccugcggcaucaucggccuggugaccuuccuguuccugugcggcagaagcugcagccugaucuacaagggcagcuacgagcugcagacccuggagcugaacauggagacccugaacaugugcaugccccugagcugcaccaagaacagcagccaccacuacaucagagugggcaacgagaccggccuggagcugacccugaccaacaccagcaucaucaaccacaaguucugcaaccugagcgacgcccacaagagaaaccuguacgaccacgcccugaugagcauccugagcaccuuccaccugagcauccccaacuucaaccaguacgaggccaugagcugcgacuucaacggcggcaagaucagcgugcaguacaaccugagccacgccuacgccguggacgccgccgagcacugcggcaccguggccaacggcgugcugcagaccuucaugagaauggccuggggcggcagcuacaucgcccuggacagcggcagaggcaacugggacugcaucaugaccagcuaccaguaccugaucauccagaacaccaccugggaggaccacugccaguucagcagacccagccccaucggcuaccugggccugcugagccagagaaccagagacaucuacaucagcagaagacugcugggcaccuucaccuggacccugagcgacagcgagggcaacgagacccccggcggcuacugccugaccagauggaugcugaucgaggccgagcugaagugcuucggcaacaccgccguggccaagugcaacgagaagcacgacgaggaguucugcgacaugcugagacuguucgacuucugcaagcaggccauccagagacugaagagcgaggcccagaugagcauccagcugaucaacaaggccgugaacgcccugaucaacgaccagcugaucaugaagaaccaccugagagacaugaugggcauccccuacugcaacuacagcaaguacugguaccugaaccacaccagcagcggcagaaccagccugcccaagugcuggcuggugagcaacggcagcuaccugaacgagacccacuucagcgacgacaucgagcagcaggccgacaacaugaucaccgagaugcugcagaaggaguacaucgacagacagggcaagaccccccugggccugguggaccuguucguguucagcaccagcuucuaccugaucagcaucuuccugcaccugaucaagauccccacccacagacacaucgugggcaagcccugccccaagccccacagacugaaccacaugggcaucugcagcugcggccuguacaagcagcccggcgugcccaccagauggaagagaugaggacuagucccuguucccagagcccacuuuuuuuucuuuuuuugaaauaaaauagccugucuuucagaucucaaaggcucuuuucagagccaccaaaaaaaaaaaaaaaaaaaaaaaaaaaaaaaaaaaaaaaaaaaaaaaaaaaaaaaaaaaaaaaaagaauu

SEQ ID NO: 36747 - RNA, 1714 nt, Artificial Sequence
  mRNA product Design a-1 (hSL-A64-N5) comprising derived and/or modified sequence from LASV(KAK-428;Clade n.d. (VII))__ANH09740__GPCmut10 (opt4)
aggagagucccgcagucggcguccagcggcucugcuuguucgugugugugucguugcaggccuuauucaagcuuaccaugggccagaucgugaccuucuuccaggaggugccccacgugaucgaggaggugaugaacaucgugcugaucgcccugagccugcuggccauccugaagggccuguacaacuucgccaccugcggcgugaucggccugaucaccuuccugcugcugugcggcagaagcugcagcgccaccuacaagggccaguacgagcugcagacccuggagcugaacauggagagccugaacaugugcaugccccugagcugcaccaagaacaacagccaccacuacaucagagccggcaacaacaccggccuggagcugacccugaccaacaccagcaucaucagccacaaguucugcaaccugagcgacgcccacaagaagaaccuguacgaccacacccugaugagcaucaucaccaccuuccaccugagcauccccaacuucaaccaguacgaggccaugagcugcgacuucaacggcggcaagaucagcauccaguacaaccugagccacagcuacgccggcgacgccgcccagcacugcggcaccguggccaacggcgugcugcagaccuucaugagaauggccuggggcggcagcuaccuggcccuggacagcggcagaagaggcugggacugcaucaucagcagcuaccaguaccugaucauccagaacaccaccugggacgaccacugccaguucagcagacccagccccaucggcuaccugggcuucgugagccagaagaccagagacaucuacaucagcagaagacugcugggcaccuucaccuggacccugagcgacagcgagggccacgacaugcccggcggcuacugccugaccagauggaugcugaucgaggccgaccugaagugcuucggcaacaccgccguggccaagugcaacgagaagcacgacgaggaguucugcgacauguggagacuguucgacuucugcaagcaggccauccagagacugaaggccgaggcccagaugaacauccagcugaucaacaaggccgugaacgcccugaucaacgaccagcugaugaugaagaaccaccugagagacaucaugggcauccccuacugcaacuacagcaaguucugguaccugaacaacaccaccaccggcagaaccagccugcccagaugcuggcugaucagcaacggcagcuaccugaacgagacccacuucagcgacgacaucgagcagcaggccgacaacaugaucaccgagaugcugcagaaggaguacauggacagacagggcaagaccccccugggccugguggaccuguucguguucagcaccagcuucuaccugaucaccaucuuccugcaccuggugaagauccccacccacagacacaucgugggcaagcccugccccaagccccacagacugaaccacaugggcaucugcagcugcggccuguacaagcagcccggcgugcccgugagauggaagagaugaggacuagucccuguucccagagcccacuuuuuuuucuuuuuuugaaauaaaauagccugucuuucagaucucaaaggcucuuuucagagccaccaaaaaaaaaaaaaaaaaaaaaaaaaaaaaaaaaaaaaaaaaaaaaaaaaaaaaaaaaaaaaaaaagaauu

SEQ ID NO: 36748 - RNA, 1714 nt, Artificial Sequence; identical to SEQ ID NO: 36742
  mRNA product Design a-1 (hSL-A64-N5) comprising derived and/or modified sequence from LASV(Pinneo-NIG-1969;Clade I)__AIT17836__GPCmut10 (opt4)

SEQ ID NO: 36749 - RNA, 1714 nt, Artificial Sequence
  mRNA product Design a-1 (hSL-A64-N5) comprising derived and/or modified sequence from LASV(ISTH0009-NIG-2011;Clade II)__AIT17404__GPCmut10 (opt4)
aggagagucccgcagucggcguccagcggcucugcuuguucgugugugugucguugcaggccuuauucaagcuuaccaugggccagaucaucaccuucuuccaggaggugccccacgugaucgaggaggugaugaacaucgugcugaucgcccugagccugcuggccauccugaagggcaucuacaacguggccaccugcggccuguucggccuggugagcuuccugcugcugugcggcagaagcugcagcaccaccuacaagggcguguacgagcugcagacccuggagcuggacauggccagccugaacaugugcaugccccugagcugcaccaagaacaacagccaccacuacaucauggugggcaacgagaccggccuggagcugacccugaccaacaccagcaucaucaaccacaaguucugcaaccugagcgacgcccacaagaagaaccuguacgaccacgcccugaugagcaucaucagcaccuuccaccugagcauccccaacuucaaccaguacgaggccaugagcugcgacuucaacggcggcaagaucagcgugcaguacaaccugagccacgccuacgccguggacgccgccaaccacugcggcaccaucgccaacggcgugcugcagaccuucaugagaauggccuggggcggcagcuacaucgcccuggacagcggcaagggcagcugggacugcaucaugaccagcuaccaguaccugaucauccagaacaccaccugggaggaccacugccaguucagcagacccagccccaucggcuaccugggccugcugagccagagaaccagagacaucuacaucagcagaagacugcugggcaccuucaccuggacccugagcgacagcgagggcaacgagacccccggcggcuacugccugaccagauggaugcugaucgaggccgagcugaagugcuucggcaacaccgccguggccaagugcaacgagaagcacgacgaggaguucugcgacaugcugagacuguucgacuucugcaagcaggccaucagaagacugaagaccgaggcccagaugagcauccagcugaucaacaaggccgugaacgcccugaucaacgaccagcugaucaugaagaaccaccugagagacaucaugggcauccccuacugcaacuacagcaaguacugguaccugaaccacaccgugaccggcaagaccagccugcccagaugcuggcuggugagcaacggcagcuaccugaacgagacccacuucagcgacgacaucgagcagcaggccgacaacaugaucaccgagcugcugcagaaggaguacauggacagacagggcaagaccccccugggccugguggaccuguucguguucagcaccagcuucuaccugaucagcaucuuccugcaccugaucaagauccccacccacagacacaucaccggcaagcccugccccaagccccacagacugaaccacaugggcaucugcagcugcggccuguacaagcaccccggcgugcccgugaaguggaagagaugaggacuagucccuguucccagagcccacuuuuuuuucuuuuuuugaaauaaaauagccugucuuucagaucucaaaggcucuuuucagagccaccaaaaaaaaaaaaaaaaaaaaaaaaaaaaaaaaaaaaaaaaaaaaaaaaaaaaaaaaaaaaaaaaagaauu

SEQ ID NO: 36750 - RNA, 1714 nt, Artificial Sequence
  mRNA product Design a-1 (hSL-A64-N5) comprising derived and/or modified sequence from LASV(ISTH2010-NIG-2012;Clade II)__AIT17482__GPCmut10 (opt4)
aggagagucccgcagucggcguccagcggcucugcuuguucgugugugugucguugcaggccuuauucaagcuuaccaugggccagaucaucaccuucuuccaggaggugccccacgugaucgaggaggugaugaacaucgugcugaucgcccugagccugcuggccauccugaagggcaucuacaacguggccaccugcggccuguucggccuggugagcuuccugcugcugugcggcagaagcugcagcaccaccuacaagggcguguacgagcugcagacccuggagcuggacauggccagccugaacaugugcaugccccugagcugcaccaagaacaacagccaccacuacaucauggugggcaacgagaccggccuggagcugacccugaccaacaccagcaucaucaaccacaaguucugcaaccugagcgacgcccacaagaagaaccuguacgaccacgcccugaugagcaucaucagcaccuuccaccugagcauccccaacuucaaccaguacgaggccaugagcugcgacuucaacggcggcaagaucagcgugcaguacaaccugagccacgccuacgccguggacgccgccaaccacugcggcaccaucgccaacggcgugcugcagaccuucaugagaauggccuggggcggcagcuacaucgcccuggacagcggcaagggcagcugggacugcaucaugaccagcuaccaguaccugaucauccagaacaucaccugggaggaccacugccaguucagcagacccagccccaucggcuaccugggccugcugagccagagaaccagagacaucuacaucagcagaagacugcugggcaccuucaccuggacccugagcgacagcgagggcaacgagacccccggcggcuacugccugaccagauggaugcugaucgaggccgagcugaagugcuucggcaacaccgccguggccaagugcaacgagaagcacgacgaggaguucugcgacaugcugagacuguucgacuucugcaagcaggccaucagaagacugaagaccgaggcccagaugagcauccagcugaucaacaaggccgugaacgcccugaucaacgaccagcugaucaugaagaaccaccugagagacaucaugggcauccccuacugcaacuacagcaaguacugguaccugaaccacaccgugaccggcaagaccagccugcccagaugcuggcuggugagcaacggcagcuaccugaacgagacccacuucagcgacgacaucgagcagcaggccgacaacaugaucaccgagcugcugcagaaggaguacaucgacagacagggcaagaccccccugggccugguggaccuguucguguucagcaccagcuucuaccugaucagcaucuuccugcaccuggugaagauccccacccacagacacguggugggcaagcccugccccaagccccacagacugaaccacaugggcaucugcagcugcggccuguacaagcaccccggcgugcccgugaaguggaagagaugaggacuagucccuguucccagagcccacuuuuuuuucuuuuuuugaaauaaaauagccugucuuucagaucucaaaggcucuuuucagagccaccaaaaaaaaaaaaaaaaaaaaaaaaaaaaaaaaaaaaaaaaaaaaaaaaaaaaaaaaaaaaaaaaagaauu

SEQ ID NO: 36751 - RNA, 1714 nt, Artificial Sequence
  mRNA product Design a-1 (hSL-A64-N5) comprising derived and/or modified sequence from LASV(Lassa virus/H.sapiens-wt/NGA/2015/ISTH_0543;Clade II)__AVO03639__GPCmut10 (opt4)
aggagagucccgcagucggcguccagcggcucugcuuguucgugugugugucguugcaggccuuauucaagcuuaccaugggccagaucaucaccuucuuccaggaggugccccacgugaucgaggaggugaugaacaucgugcugaucgcccugagccugcuggccauccugaagggcaucuacaacguggccaccugcggccuguucggccuggugagcuuccugcugcugugcggcagaagcugcagcaccaccuacaagggcguguacgagcugcagacccuggagcuggacauggccaaccugaacaugugcaugccccugagcugcaccaagaacaacagccaccacuacaucauggugggcaacgagaccggccuggagcugacccugaccaacaccagcaucaucaaccacaaguucugcaaccugagcgacgcccacaagaagaaccuguacgaccacgcccugaugagcaucaucagcaccuuccaccugagcauccccaacuucaaccaguacgaggccaugagcugcgacuucaacggcggcaagaucagcgugcaguacaaccugagccacaccuacgccguggacgccgccaaccacugcggcaccaucgccaacggcgugcugcagaccuucaugagaauggccuggggcggcagcuacaucgcccuggacagcggcaagggcagcugggacugcaucaugaccagcuaccaguaccuggugauccagaacaccaccugggaggaccacugccaguucagcagacccagccccaucggcuaccugggccugcugagccagagaaccagagacaucuacaucagcagaagacugcugggcaccuucaccuggacccugagcgacagcgagggcaacgagacccccggcggcuacugccugaccagauggaugcugaucgaggccgagcugaagugcuucggcaacaccgccguggccaagugcaacgagaagcacgacgaggaguucugcgacaugcugagacuguucgacuucugcaagcaggccaucagaagacugaagaccgaggcccagaugagcauccagcugaucaacaaggccgugaacgcccugaucaacgaccagcugaucaugaagaaccaccugagagacaucaugggcauccccuacugcaacuacagcaaguacugguaccugaaccacaccgugaccggcaagaccagccugcccagaugcuggcuggugagcaacggcagcuaccugaacgagacccacuucagcgacgacaucgagcagcaggccgacaacaugaucaccgagcugcugcagaaggaguacaucgacagacagggcaagaccccccugggccugguggaccuguucguguucagcaccagcuucuaccugaucagcaucuuccugcaccuggugaagauccccacccacagacacaucaccggcaagcccugccccaagccccacagacugaaccacaugggcaucugcagcugcggccuguacaagcaccccggcgugcccgugaaguggaagagaugaggacuagucccuguucccagagcccacuuuuuuuucuuuuuuugaaauaaaauagccugucuuucagaucucaaaggcucuuuucagagccaccaaaaaaaaaaaaaaaaaaaaaaaaaaaaaaaaaaaaaaaaaaaaaaaaaaaaaaaaaaaaaaaaagaauu

SEQ ID NO: 36752 - RNA, 1714 nt, Artificial Sequence
  mRNA product Design a-1 (hSL-A64-N5) comprising derived and/or modified sequence from LASV(Lassa virus/H.sapiens-wt/NGA/2016/ISTH_0009;Clade II)__AVO03571__GPCmut10 (opt4)
aggagagucccgcagucggcguccagcggcucugcuuguucgugugugugucguugcaggccuuauucaagcuuaccaugggccagaucaucaccuucuuccaggaggugccccacgugaucgaggaggugaugaacaucgugcugaucgcccugagccugcuggccauccugaagggcaucuacaacguggccaccugcggccugcugggccuggugagcuuccugcugcugugcggcagaagcugcagcaccaccuacaagggcguguacgagcugcagacccuggagcuggacauggccagccugaacaugugcaugccccugagcugcaccaagaacaacagccaccacuacaucauggugggcaacgagaccggccuggagcugacccugaccaacaccagcaucaucaaccacaaguucugcaaccugagcgacgcccacaagaagaaccuguacgaccacgcccugaugagcaucaucagcaccuuccaccugagcauccccaacuucaaccaguacgaggccaugagcugcgacuucaacggcggcagaaucagcgugcaguacaaccugagccacagcuacgccguggacgccgccaaccacugcggcaccaucgccaacggcgugcugcagaccuucaugagaauggccuggggcggcagcuacaucgcccuggacagcggcaagggcagcugggacugcaucaugaccagcuaccaguaccugaucauccagaacaccaccugggaggaccacugccaguucagcagacccagccccaucggcuaccugggccugcugagccagagaaccagagacaucuacaucagcagaagacugcugggcaccuucaccuggacccugagcgacagcgagggcaacgagacccccggcggcuacugccugaccagauggaugcugaucgaggccgagcugaagugcuucggcaacaccgccguggccaagugcaacgagaagcacgacgaggaguucugcgacaugcugagacuguucgacuucugcaagcaggccaucagaagacugaagaccgaggcccagaugagcauccagcugaucaacaaggccgugaacgcccugaucaacgaccagcugaucaugaagaaccaccugagagacaucaugggcauccccuacugcaacuacagcaaguacugguaccugaaccacaccgugaccggcaagaccagccugcccagaugcuggcuggugagcaacggcagcuaccugaacgagacccacuucagcgacgacaucgagcagcaggccgacaacaugaucaccgagcugcugcagaaggaguacaucgacagacagggcaagaccccccugggccugguggaccuguucguguucagcaccagcuucuaccugaucagcaucuuccugcaccuggugaagauccccacccacagacacaucaccggcaagcccugccccaagccccacagacugaaccacaugggcaucugcagcugcggccuguacaaccaccccggcgugcccgugaaguggaagagaugaggacuagucccuguucccagagcccacuuuuuuuucuuuuuuugaaauaaaauagccugucuuucagaucucaaaggcucuuuucagagccaccaaaaaaaaaaaaaaaaaaaaaaaaaaaaaaaaaaaaaaaaaaaaaaaaaaaaaaaaaaaaaaaaagaauu

SEQ ID NO: 36753 - RNA, 1714 nt, Artificial Sequence
  mRNA product Design a-1 (hSL-A64-N5) comprising derived and/or modified sequence from LASV(Lassa virus/H.sapiens-wt/NGA/2016/ISTH_0017;Clade II)__AVO03567__GPCmut10 (opt4)
aggagagucccgcagucggcguccagcggcucugcuuguucgugugugugucguugcaggccuuauucaagcuuaccaugggccagaucaucaccuucuuccaggaggugccccacgugaucgaggaggugaugaacaucgugcugaucgcccugagccugcuggccauccugaagggcaucuacaacguggccaccugcggccuguucggccuggugagcuuccugcugcugugcggcagaagcugcagcaccaccuacaagggcguguacgagcugcagacccuggagcuggacauggccagccugaacaugugcaugccccugagcugcaccaagaacaacagccaccacuacaucauggugggcaacgagaccggccuggagcugacccugaccaacaccagcaucaucaaccacaaguucugcaaccugagcgacgcccacaagaagaaccuguacgaccacgcccugaugagcaucaucagcaccuuccaccugagcauccccaacuucaaccaguacgaggccaugagcugcgacuucaacggcggcaagaucagcgugcaguacaaccugagccacaccuacgccaucgacgccgccaaccacugcggcaccaucgccaacggcgugcugcagaccuucaugagaauggccuggggcggcagcuacaucgcccuggacagcggcaagggcagcugggacugcaucaugaccagcuaccaguaccugaucauccagaacaccaccugggaggaccacugccaguucagcagacccagccccaucggcuaccugggccugcugagccagagaaccagagacaucuacaucagcagaagacugcugggcaccuucaccuggacccugagcgacagcgagggcaacgagacccccggcggcuacugccugaccagauggaugcugaucgaggccgagcugaagugcuucggcaacaccgccguggccaagugcaacgagaagcacgacgaggaguucugcgacaugcugagacuguucgacuucugcaagcaggccaucagaagacugaagaccgaggcccagaugagcauccagcugaucaacaaggccgugaacgcccugaucaacgaccagcugaucaugaagaaccaccugagagacaucaugggcauccccuacugcaacuacagcaaguacugguaccugaaccacaccgugaccggcaagaccagccugcccagaugcuggcuggugagcaacggcagcuaccugaacgagacccacuucagcgacgacaucgagcagcaggccgacaacaugaucaccgagcugcugcagaaggaguacauggacagacagggcaagaccccccugggccugguggaccuguucguguucagcaccagcuucuaccugaucagcaucuuccugcaccuggugagaauccccacccacagacacgugaucggcaagcccugccccaagccccacagacugaaccacaugggcaucugcagcugcggccuguacaagcaccccggcgugcccgugaaguggaagagaugaggacuagucccuguucccagagcccacuuuuuuuucuuuuuuugaaauaaaauagccugucuuucagaucucaaaggcucuuuucagagccaccaaaaaaaaaaaaaaaaaaaaaaaaaaaaaaaaaaaaaaaaaaaaaaaaaaaaaaaaaaaaaaaaagaauu

SEQ ID NO: 36754 - RNA, 1714 nt, Artificial Sequence
  mRNA product Design a-1 (hSL-A64-N5) comprising derived and/or modified sequence from LASV(Lassa virus/H.sapiens-wt/NGA/2018/ISTH_0959;Clade II)__AVV65099__GPCmut10 (opt4)
aggagagucccgcagucggcguccagcggcucugcuuguucgugugugugucguugcaggccuuauucaagcuuaccaugggccagaucaucaccuucuuccaggaggugccccacgugaucgaggaggugaugaacaucgugcugaucgcccugagccugcuggccauccugaagggcaucuacaacguggugaccugcggccuguucggccuggugagcuuccugcugcugugcggcagaagcugcagcaccaccuacaagggcguguacgagcugcagacccuggagcuggacauggccagccugaacaugugcaugccccugagcugcaccaagaacaacagccaccacuacaucauggugggcaacgagaccggccuggagcugacccugaccaacaccagcaucaucaaccacaaguucugcaaccugagcgacgcccacaagaagaaccuguacgaccacgcccugaugagcaucaucagcaccuuccaccugagcauccccaacuucaaccaguacgaggccaugagcugcgacuucaacggcggcaagaucagcgugcaguacaaccugagccacgccuacgccaucgacgccgccaaccacugcggcaccaucgccaacggcgugcugcagaccuucaugagaauggccuggggcggcagcuacaucgcccuggacagcggcaagggcagcugggacugcaucaugaccagcuaccaguaccugaucauccagaacaccaccugggaggaccacugccaguucagcagacccagccccaucggcuaccugggccugcugagccagagaaccagagacaucuacaucagcagaagacugcugggcaccuucaccuggacccugagcgacagcgagggcaacgagacccccggcggcuacugccugaccagauggaugcugaucgaggccgagcugaagugcuucggcaacaccgccguggccaagugcaacgagaagcacgacgaggaguucugcgacaugcugagacuguucgacuucugcaagcaggccaucagaagacugaagaccgaggcccagaugagcauccagcugaucaacaaggccgugaacgcccugaucaacgaccagcugaucaugaagaaccaccugagagacaucaugggcauccccuacugcaacuacagcaaguacugguaccugaaccacaccgugaccggcaagaccagccugcccagaugcuggcuggugagcaacggcagcuaccugaacgagacccacuucagcgacgacaucgagcagcaggccgacaacaugaucaccgagcugcugcagaaggaguacaucgacagacagggcaagaccccccugggccugguggaccuguucguguucagcaccagcuucuaccugaucagcaucuuccugcaccuggugaagauccccacccacagacacgugaucggcaagcccugccccaagccccacagacugaaccacaugggcaucugcagcugcggccuguacaagcaccccggcgugcccgugaaguggaagagaugaggacuagucccuguucccagagcccacuuuuuuuucuuuuuuugaaauaaaauagccugucuuucagaucucaaaggcucuuuucagagccaccaaaaaaaaaaaaaaaaaaaaaaaaaaaaaaaaaaaaaaaaaaaaaaaaaaaaaaaaaaaaaaaaagaauu

SEQ ID NO: 36755 - RNA, 1714 nt, Artificial Sequence
  mRNA product Design a-1 (hSL-A64-N5) comprising derived and/or modified sequence from LASV(LASV003-NIG-2008;Clade II)__AIT17580__GPCmut10 (opt4)
aggagagucccgcagucggcguccagcggcucugcuuguucgugugugugucguugcaggccuuauucaagcuuaccaugggccagaucaucaccuucuuccaggaggugccccacgugaucgaggaggugaugaacaucgugcugaucgcccugagccugcuggccauccugaagggcaucuacaacguggccaccugcggccuguucggccuggugagcuuccugcugcugugcggcagaagcugcagcaccaccuacaagggcguguacgagcugcagacccuggagcuggacauggccagccugaacaugugcaugccccugagcugcaccaagaacaacagccaccacuacaucauggugggcaacgagaccggccuggagcugacccugaccaacaccagcaucaucaaccacaaguucugcaaccugagcgacgcccacaagaagaaccuguacgaccacgcccugaugagcaucaucagcaccuuccaccugagcauccccaacuucaaccaguacgaggccaugagcugcgacuucaacggcggcaagaucagcgugcaguacaaccugagccacaccuacgccguggacgccgccaaccacugcggcaccaucgccaacggcgugcugcagaccuucaugagaauggccuggggcggcagcuacaucgcccuggacagcggcaagggcagcugggacugcaucaugaccagcuaccaguaccugaucauccagaacaccaccugggaggaccacugccaguucagcagacccagccccaucggcuaccugggccugcugagccagagaaccagagacaucuacaucagcagaagacugcugggcaccuucaccuggacccugagcgacagcgagagcaacgagacccccggcggcuacugccugaccagauggaugcugaucgaggccgagcugaagugcuucggcaacaccgccguggccaagugcaacgagaagcacgacgaggaguucugcgacaugcugagacuguucgacuucugcaagcaggccaucagaagacugaaggccgaggcccagaugagcauccagcugaucaacaaggccgugaacgcccugaucaacgaccagcugaucaugaagaaccaccugagagacaucaugggcauccccuacugcaacuacagcaaguacugguaccugaaccacaccgugaccggcagaaccagccugcccagaugcuggcuggugagcaacggcagcuaccugaacgagacccacuucagcgacgacaucgagcagcaggccgacaacaugaucaccgagcugcugcagaaggaguacauggacagacagggcaagaccccccugggccugguggaccuguucguguucagcaccagcuucuaccugaucagcaucuuccugcaccuggugaagauccccacccacagacacgugaucggcaagcccugccccaagccccacagacugaaccacaugggcaucugcagcugcggccuguacaagcaccccggcgugcccgugaaguggaagagaugaggacuagucccuguucccagagcccacuuuuuuuucuuuuuuugaaauaaaauagccugucuuucagaucucaaaggcucuuuucagagccaccaaaaaaaaaaaaaaaaaaaaaaaaaaaaaaaaaaaaaaaaaaaaaaaaaaaaaaaaaaaaaaaaagaauu

SEQ ID NO: 36756 - RNA, 1714 nt, Artificial Sequence
  mRNA product Design a-1 (hSL-A64-N5) comprising derived and/or modified sequence from LASV(LASV035-NIG-2009;Clade II)__AIT17588__GPCmut10 (opt4)
aggagagucccgcagucggcguccagcggcucugcuuguucgugugugugucguugcaggccuuauucaagcuuaccaugggccagaucaucaccuucuuccaggaggugccccacgugaucgaggaggugaugaacaucgugcugaucgcccugagccugcuggccauccugaagggcaucuacaacguggccaccugcggccuguucggccuggugagcuuccugcugcugugcggcagaagcugcagcaccaccuacaagggcguguacgagcugcagacccuggagcuggacauggccagccugaacaugugcaugccccugagcugcaccaagaacaacagccaccacuacaucauggugggcaacgagaccggccuggagcugacccugaccaacaccagcaucaucaaccacaaguucugcaaccugagcgacgcccacaagaagaaccuguacgaccacgcccugaugagcaucaucagcaccuuccaccugagcauccccaacuucaaccaguacgaggccaugagcugcgacuucaacggcggcaagaucagcgugcaguacaaccugagccacgccuacgccguggacgccgccaaccacugcggcaccaucgccaacggcgugcugcagaccuucaugagaauggccuggggcggcagcuacaucgcccuggacagcggcaagggcagcugggacugcaucaugaccagcuaccaguaccugaucauccagaacaccaccugggaggaccacugccaguucagcagacccagccccaucggcuaccugggccugcugagccagagaaccagagacaucuacaucagcagaagacugcugggcaccuucaccuggacccugagcgacagcgagggcaacgagacccccggcggcuacugccugaccagauggaugcugaucgaggccgagcugaagugcuucggcaacaccgccguggccaagugcaacgagaagcacgacgaggaguucugcgacaugcugagacuguucgacuucugcaagcaggccaucagaagacugaaggccgaggcccagaugagcauccagcugaucaacaaggccgugaacgcccugaucaacgaccagcugaucaugaagaaccaccugagagacaucaugggcauccccuacugcaacuacagcaaguacugguaccugaaccacaccgugaccggcaagaccagccugcccagaugcuggcuggugagcaacggcagcuaccugaacgagacccacuucagcgacgacaucgagcagcaggccgacaacaugaucaccgagcugcugcagaaggaguacaucgacagacagggcaagaccccccugggccugguggaccuguucguguucagcaccagcuucuaccugaucagcaucuuccugcaccuggugaagauccccacccacagacacgugaucggcaagcccugccccaagccccacagacugaaccacaugggcaucugcagcugcggccuguacaagcaccccggcgugcccgugaaguggaagagaugaggacuagucccuguucccagagcccacuuuuuuuucuuuuuuugaaauaaaauagccugucuuucagaucucaaaggcucuuuucagagccaccaaaaaaaaaaaaaaaaaaaaaaaaaaaaaaaaaaaaaaaaaaaaaaaaaaaaaaaaaaaaaaaaagaauu

SEQ ID NO: 36757 - RNA, 1714 nt, Artificial Sequence
  mRNA product Design a-1 (hSL-A64-N5) comprising derived and/or modified sequence from LASV(LASV1000-NIG-2009;Clade II)__AIT17782__GPCmut10 (opt4)
aggagagucccgcagucggcguccagcggcucugcuuguucgugugugugucguugcaggccuuauucaagcuuaccaugggccagaucaucaccuucuuccaggaggugccccacgugaucgaggaggugaugaacaucgugcugaucgcccugagccugcuggccauccugaagggcaucuacaacguggccaccugcggccuguucggccuggugagcuuccugcugcugugcggcagaagcugcagcaccaccuacaagggcguguacgagcugcagacccuggagcuggacauggccagccugaacaugugcaugccccugagcugcaccaagaacaacagccaccacuacaucauggugggcaacgagaccggccuggagcugacccugaccaacaccagcaucaucaaccacaaguucugcaaccugagcgacgcccacaagaagaaccuguacgaccacgcccugaugagcaucaucagcaccuuccaccugagcauccccaacuucaaccaguacgaggccaugagcugcgacuucaacggcggcaagaucagcgugcaguacaaccugagccacaccuacgccguggacgccgccaaccacugcggcaccaucgccaacggcgugcugcagaccuucaugagaauggccuggggcggcagcuacaucgcccuggacagcggcaagggcagcugggacugcaucaugaccagcuaccaguaccugaucauccagaacaccaccugggaggaccacugccaguucagcagacccagccccaucggcuaccugggccugcugagccagagaaccagagacaucuacaucagcagaagacugcugggcaccuucaccuggacccugagcgacagcgagggcaacgagacccccggcggcuacugccugaccagauggaugcugaucgaggccgagcugaagugcuucggcaacaccgccguggccaagugcaacgagaagcacgacgaggaguucugcgacaugcugagacuguucgacuucugcaagcaggccaucaagagacugaagaccgaggcccagaugagcauccagcugaucaacaaggccgugaacgcccugaucaacgaccagcugaucaugaagaaccaccugagagacaucaugggcauccccuacugcaacuacagcaaguacugguaccugaaccacaccgugaccggcaagaccagccugcccagaugcuggcuggugagcaacggcagcuaccugaacgagacccacuucagcgacgacaucgagcagcaggccgacaacaugaucaccgagcugcugcagaaggaguacaucgacagacagggcaagaccccccugggccugguggaccuguucguguucagcaccagcuucuaccugaucagcaucuuccugcaccuggugaagauccccacccacagacacguggugggcaagcccugccccaagccccacagacugaaccacaugggcaucugcagcugcggccuguacaagcaccccggcgugcccgugaaguggaagagaugaggacuagucccuguucccagagcccacuuuuuuuucuuuuuuugaaauaaaauagccugucuuucagaucucaaaggcucuuuucagagccaccaaaaaaaaaaaaaaaaaaaaaaaaaaaaaaaaaaaaaaaaaaaaaaaaaaaaaaaaaaaaaaaaagaauu

SEQ ID NO: 36758 - RNA, 1714 nt, Artificial Sequence
  mRNA product Design a-1 (hSL-A64-N5) comprising derived and/or modified sequence from LASV(LASV221-NIG-2010;Clade II)__AIT17624__GPCmut10 (opt4)
aggagagucccgcagucggcguccagcggcucugcuuguucgugugugugucguugcaggccuuauucaagcuuaccaugggccagaucaucaccuucuuccaggaggugccccacgugaucgaggaggugaugaacaucgugcugaucgcccugagccugcuggccauccugaagggcaucuacaacguggccaccugcggccuguucggccuggugagcuuccugcugcugugcggcagaagcugcagcaccaccuacaagggcguguacgagcugcagacccuggagcuggacauggccagccugaacaugugcaugccccugagcugcaccaagaacaacagccaccacuacaucauggugggcaacgagaccggccuggagcugacccugaccaacaccagcaucaucaaccacaaguucugcaaccugagcgacgcccacaagaagaaccuguacgaccacgcccugaugagcaucaucagcaccuuccaccugagcauccccaacuucaaccaguacgaggccaugagcugcgacuucaacggcggcaagaucagcgugcaguacaaccugagccacaccuacgccaucgacgccgccaaccacugcggcaccaucgccaacggcgugcugcagaccuucaugagaauggccuggggcggcagcuacaucgcccuggacagcggcaagggcagcugggacugcaucaugaccagcuaccaguaccugaucauccagaacaccaccugggaggaccacugccaguucagcagacccagccccaucggcuaccugggccugcugagccagagaaccagagacaucuacaucagcagaagacugcugggcaccuucaccuggacccugagcgacagcgagggcaacgagacccccggcggcuacugccugaccagauggaugcugaucgaggccgagcugaagugcuucggcaacaccgccguggccaagugcaacgagaagcacgacgaggaguucugcgacaugcugagacuguucgacuucugcaagcaggccaucagaagacugaagaccgaggcccagaugagcauccagcugaucaacaaggccgugaacgcccugaucaacgaccagcugaucaugaagaaccaccugagagacaucaugggcauccccuacugcaacuacagcaaguacugguaccugaaccacaccgugaccggcaagaccagccugcccagaugcuggcuggugagcaacggcagcuaccugaacgagacccacuucagcgacgacaucgagcagcaggccgacaacaugaucaccgagaugcugcagaaggaguacauggacagacagggcaagaccccccugggccugguggaccuguucguguucagcaccagcuucuaccugaucagcaucuuccugcaccuggugaagauccccacccacagacacgugaucggcaagcccugccccaagccccacagacugaaccacaugggcaucugcagcugcggccuguacaagcaccccggcgugcccgugaaguggaagagaugaggacuagucccuguucccagagcccacuuuuuuuucuuuuuuugaaauaaaauagccugucuuucagaucucaaaggcucuuuucagagccaccaaaaaaaaaaaaaaaaaaaaaaaaaaaaaaaaaaaaaaaaaaaaaaaaaaaaaaaaaaaaaaaaagaauu

SEQ ID NO: 36759 - RNA, 1714 nt, Artificial Sequence
  mRNA product Design a-1 (hSL-A64-N5) comprising derived and/or modified sequence from LASV(LASV237-NIG-2010;Clade II)__AIT17638__GPCmut10 (opt4)
aggagagucccgcagucggcguccagcggcucugcuuguucgugugugugucguugcaggccuuauucaagcuuaccaugggccagaucaucaccuucuuccaggaggugccccacgugaucgaggaggugaugaacaucgugcugaucgcccugagccugcuggccauccugaagggcaucuacaacguggccaccugcggccuguucggccuggugagcuuccugcugcugugcggcagaagcugcagcaccaccuacaagggcguguacgagcugcagacccuggagcuggacauggccagccugaacaugugcaugccccugagcugcaccaagaacaacagccaccacuacaucauggugggcaacgagaccggccuggagcugacccugaccaacaccagcaucaucaaccacaaguucugcaaccugagcgacgcccacaagaaggaccuguacgaccacgcccugaugagcaucaucagcaccuuccaccugagcauccccaacuucaaccaguacgaggccaugagcugcgacuucaacggcggcaagaucagcgugcaguacaaccugagccacaccuacgccguggacgccgccaaccacugcggcaccaucgccaacggcgugcugcagaccuucaugagaauggccuggggcggcagcuacaucgcccuggacagcggcaagggcagcugggacugcaucaugaccagcuaccaguaccugaucauccagaacaccaccugggaggaccacugccaguucagcagacccagccccaucggcuaccugggccugcugagccagagaaccagagacaucuacaucagcagaagacugcugggcaccuucaccuggacccugagcgacagcgagggcaacgagacccccggcggcuacugccugaccagauggaugcugaucgaggccgagcugaagugcuucggcaacaccgccguggccaagugcaacgagaagcacgacgaggaguucugcgacaugcugagacuguucgacuucugcaagcaggccaucagaagacugaagaccgaggcccagaugagcauccagcugaucaacaaggccgugaacgcccugaucaacgaccagcugaucaugaagaaccaccugagagacaucaugggcauccccuacugcaacuacagcaaguacugguaccugaaccacaccgugaccggcaagaccagccugcccagaugcuggcuggugagcaacggcagcuaccugaacgagacccacuucagcgacgacaucgagcagcaggccgacaacaugaucaccgagcugcugcagaaggaguacauggacagacagggcaagaccccccugggccugguggaccuguucguguucagcaccagcuucuaccugaucagcaucuuccugcaccugaucaagauccccacccacagacacaucaccggcaagcccugccccaagccccacagacugaaccacaugggcaucugcagcugcggccuguacaagcaccccggcgugcccgugaaguggaagagaugaggacuagucccuguucccagagcccacuuuuuuuucuuuuuuugaaauaaaauagccugucuuucagaucucaaaggcucuuuucagagccaccaaaaaaaaaaaaaaaaaaaaaaaaaaaaaaaaaaaaaaaaaaaaaaaaaaaaaaaaaaaaaaaaagaauu

SEQ ID NO: 36760 - RNA, 1714 nt, Artificial Sequence
  mRNA product Design a-1 (hSL-A64-N5) comprising derived and/or modified sequence from LASV(LASV253-NIG-2011;Clade II)__AIT17670__GPCmut10 (opt4)
aggagagucccgcagucggcguccagcggcucugcuuguucgugugugugucguugcaggccuuauucaagcuuaccaugggccagaucaucaccuucuuccaggaggugccccacgugaucgaggaggugaugaacaucgugcugaucgcccugagccugcuggccauccugaagggcaucuacaacguggccaccugcggccuguucggccuggugagcuuccugcugcugugcggcagaagcugcagcaccaccuacaagggcguguacgagcugcagacccuggagcuggacauggccagccugaacaugugcaugccccugagcugcaccaagaacaacagccaccacuacaucauggugggcaacgagaccggccuggagcugacccugaccaacaccagcaucaucaaccacaaguucugcaaccugagcgacgcccacaagaagaaccuguacgaccacgcccugaugagcaucaucagcaccuuccaccugagcauccccaacuucaaccaguacgaggccaugagcugcgacuucaacggcggcaagaucagcgugcaguacaaccugagccacaccuacgccguggacgccgccaaccacugcggcaccaucgccaacggcgugcugcagaccuucaugagaauggccuggggcggcagcuacaucgcccuggacagcggcaagggcagcugggacugcaucaugaccagcuaccaguaccugaucauccagaacaccaccugggaggaccacugccaguucagcagacccagccccaucggcuaccugggccugcugagccagagaaccagagacaucuacaucagcagaagacugcugggcaccuucaccuggacccugagcgacagcgagggcaacgagacccccggcggcuacugccugaccagauggaugcugaucgaggccgagcugaagugcuucggcaacaccgccguggccaagugcaacgagaagcacgacgaggaguucugcgacaugcugagacuguucgacuucugcaagcaggccaucagaagacugaaggccgaggcccagaugagcauccagcugaucaacaaggccgugaacgcccugaucaacgaccagcugaucaugaagaaccaccugagagacaucaugggcauccccuacugcaacuacagcaaguacugguaccugaaccacaccgugaccggcagaaccagccugcccagaugcuggcuggugagcaacggcagcuaccugaacgagacccacuucagcgacgacaucgagcagcaggccgacaacaugaucaccgagcugcugcagaaggaguacaucgacagacagggcaagaccccccugggccugguggaccuguucguguucagcaccagcuucuaccugaucagcaucuuccugcaccuggugaagauccccacccacagacacaucaucggcaagcccugccccaagccccacagacugaaccacaugggcaucugcagcugcggccuguacaagcaccccggcgugcccgugaaguggaagagaugaggacuagucccuguucccagagcccacuuuuuuuucuuuuuuugaaauaaaauagccugucuuucagaucucaaaggcucuuuucagagccaccaaaaaaaaaaaaaaaaaaaaaaaaaaaaaaaaaaaaaaaaaaaaaaaaaaaaaaaaaaaaaaaaagaauu

SEQ ID NO: 36761 - RNA, 1714 nt, Artificial Sequence
  mRNA product Design a-1 (hSL-A64-N5) comprising derived and/or modified sequence from LASV(LASV254-NIG-2011;Clade II)__AIT17674__GPCmut10 (opt4)
aggagagucccgcagucggcguccagcggcucugcuuguucgugugugugucguugcaggccuuauucaagcuuaccaugggccagaucaucaccuucuuccaggaggugccccacgugaucgaggaggugaugaacaucgugcugaucgcccugagccugcuggccauccugaagggcaucuacaacguggccaccugcggccuguucggccuggugagcuuccugcugcugugcggcagaagcugcagcaccaccuacaagggcguguacgagcugcagacccuggagcuggacaugaccaaccugaacaugugcaugccccugagcugcaccaagaacaacagccaccacuacaucauggugggcaacgagaccggccuggagcugacccugaccaacaccagcaucaucaaccacaaguucugcaaccugagcgacgcccacaagaagaaccuguacaaccacgcccugaugagcaucaucagcaccuuccaccugagcauccccaacuucaaccaguacgaggccaugagcugcgacuucaacggcggcaagaucagcgugcaguacaaccugagccacagcuacgccguggacgccgccaaccacugcggcaccaucgccaacggcgugcugcagaccuucaugagaauggccuggggcggcagcuacaucgcccuggacagcggcaagggcaacugggacugcaucaugaccagcuaccaguaccugaucauccagaacaccaccugggaggaccacugccaguucagcagacccagccccaucggcuaccugggccugcugagccagagaaccagagacaucuacaucagcagaagacugcugggcaccuucaccuggacccugagcgacagcgagggcaacgagacccccggcggcuacugccugaccagauggaugcugaucgaggccgagcugaagugcuucggcaacaccgccguggccaagugcaacgagaagcacgacgaggaguucugcgacaugcugagacuguucgacuucugcaagcaggccaucagaagacugaagaccgaggcccaggccaacauccagcugaucaacaaggccgugaacgcccugaucaacgaccagcugaucaugaagaaccaccugagagacaucaugggcauccccuacugcaacuacagcaaguacugguaccugaaccacaccgugaccggcaagaccagccugcccagaugcuggcuggugagcaacggcagcuaccugaacgagacccacuucagcgacgacaucgagcagcaggccgacaacaugaucaccgagcugcugcagaaggaguacauggacagacagggcaagaccccccugggccugguggaccuguucguguucagcaccagcuucuaccugaucagcaucuuccugcaccuggugaagauccccacccacagacacgugaucggcaagcccugccccaagccccacagacugaaccacaugggcaucugcagcugcggccuguacaagcaccccggcgugcccgugaaguggaagagaugaggacuagucccuguucccagagcccacuuuuuuuucuuuuuuugaaauaaaauagccugucuuucagaucucaaaggcucuuuucagagccaccaaaaaaaaaaaaaaaaaaaaaaaaaaaaaaaaaaaaaaaaaaaaaaaaaaaaaaaaaaaaaaaaagaauu

SEQ ID NO: 36762 - RNA, 1714 nt, Artificial Sequence
  mRNA product Design a-1 (hSL-A64-N5) comprising derived and/or modified sequence from LASV(Nig08-A19;Clade III)__ADU56618__GPCmut10 (opt4)
aggagagucccgcagucggcguccagcggcucugcuuguucgugugugugucguugcaggccuuauucaagcuuaccaugggccagaucgugaccuucuuccaggaggugccccacgugaucgaggaggugaugaacaucgugcugaucgcccugagcauccuggccauccugaagggccuguacaacaucgccaccugcggccugaucggccuggugaccuuccugcugcugagcggcagaagcugcagcaugaccuacaagggcguguacgagcugcagacccuggagcugaacaugaacacccugaacaugugcaugccccugagcugcaccaagaacaacagccaccacuacaucauggugggcaacgagaccggccuggagcugacccugaccaacaccagccugcugcaccacaaguucugcaaccugagcgacgcccacaagaagaaccuguacgaccacacccugaugagcaucaucagcaccuuccaccugagcauccccaacuucaaccaguacgaggccaugagcugcgacuucaacggcggcaagaucaccgugcaguacaaccugagccacagcuacgccaucgacgccgccaaccacugcggcaccguggccaacggcgugcugcagaccuucaugagaauggccuggggcggcagcuacaucgcccuggacagcggcagaggcaagugggacugcaucaugaccagcuaccaguaccugaucauccagaacaccaccugggaggaccacugccaguucagcagacccagccccaucggcuaccugggccugcugagccagagaaccagagacaucuacaucagcagaagacugcugggcaccuucaccuggacccugagcgacagcgagggcaacgagacccccggcggcuacugccugaccagauggaugcugaucgaggccgagcugaagugcuucggcaacaccgccguggccaagugcaacgagaagcacgacgaggaguucugcgacaugcugagacuguucgacuucugcaagcaggccaucagaagacugaaggccgaggcccagaugagcauccagcugaucaacaaggccgugaacgcccugaucaacgaccagcugaucaugaagaaccaccugagagacaucaugggcauccccuacugcaacuacagcaaguacugguaccugaaccacaccagcaccggcagaaccagccugcccagaugcuggcuggugagcaacggcagcuaccugaacgagacccacuucagcgacgacaucgagcagcaggccgacaacaugaucaccgagaugcugcagaaggaguaccuggacagacagggcaagaccccccugggccugguggaccuguucguguucagcaccagcuucuaccugaucagcaucuuccugcaccuggugaagauccccacccacagacacaucgugggcaagcccugccccaagccccacagacugaaccacaugggcaucugcagcugcggccuguacaagcagcccggcgugcccgugagauggaagagaugaggacuagucccuguucccagagcccacuuuuuuuucuuuuuuugaaauaaaauagccugucuuucagaucucaaaggcucuuuucagagccaccaaaaaaaaaaaaaaaaaaaaaaaaaaaaaaaaaaaaaaaaaaaaaaaaaaaaaaaaaaaaaaaaagaauu

SEQ ID NO: 36763 - RNA, 1717 nt, Artificial Sequence
  mRNA product Design a-1 (hSL-A64-N5) comprising derived and/or modified sequence from LASV(G1180-SLE-2010;Clade IV)__AIT17168__GPCmut10 (opt4)
aggagagucccgcagucggcguccagcggcucugcuuguucgugugugugucguugcaggccuuauucaagcuuaccaugggccagaucgugaccuucuuccaggaggugccccacgugaucgaggaggugaugaacaucgugcugaucgcccugagcauccuggccgugcugaagggccuguacaacuucgccaccugcggccuggugggccugcugaccuuccugcugcugugcggcagaagcugcaccgccagcagauacaagggcguguacgagcugcagacccuggagcugaacauggagacccugaacaugugcaugccccugagcugcaccaagaacaacagccaccacuacaucauggugggcaacgagaccggccuggagcugacccugaccaacaccagcaucaucaaccacaaguucugcaaccugagcgacgcccacaagaagaaccuguacgaccacgcccugaugagcaucaucagcaccuuccaccugagcauccccaacuucaaccaguacgaggccaugagcugcgacuucaacggcggcaagaucagcgugcaguacaaccugagccacagcuacgccggcgacgccgccaaccacugcggcaccguggccaacggcgugcugcagaccuucaugagaauggccuggggcggcagcuacaucgcccuggacagcggccacggcagcugggacugcaucaugaccagcuaccaguaccugaucauccagaacaccaccugggaggaccacugccaguucagcagacccagccccaucggcuaccugggccugcugagccagagaaccagagacaucuacaucagcagaagacugcugggcaccuucaccuggacccugagcgacagcgagggcaaggacacccccggcggcuacugccugaccagauggaugcugaucgaggccgagcugaagugcuucggcaacaccgccguggccaagugcaacgagaagcacgacgaggaguucugcgacaugcugagacuguucgacuucugcaagcaggccauccagagacugaaggccgaggcccagaugagcauccagcugaucaacaaggccgugaacgcccugaucaacgaccagcugaucaugaagaaccaccugagagacaucaugggcauccccuacugcaacuacagcaaguacugguaccugaaccacaccaccaccggcaagaccagccugcccaagugcuggcuggugagcaacggcagcuaccugaacgagacccacuucagcgacgacaucgagcagcaggccgacaacaugaucaccgagaugcugcagaaggaguacauggagagacagggcaagaccccccugggccugguggaccuguucguguucagcaccagcuucuaccugaucagcaucuuccugcaccuggugaagauccccacccacagacacaucgugggcaagagcugccccaagccccacagacugaaccacaugggcaucugcagcugcggccuguacaagcagcccggcgugcccgugaaguggaagagaugaggacuagucccuguucccagagcccacuuuuuuuucuuuuuuugaaauaaaauagccugucuuucagaucucaaaggcucuuuucagagccaccaaaaaaaaaaaaaaaaaaaaaaaaaaaaaaaaaaaaaaaaaaaaaaaaaaaaaaaaaaaaaaaaagaauu

SEQ ID NO: 36764 - RNA, 1717 nt, Artificial Sequence
  mRNA product Design a-1 (hSL-A64-N5) comprising derived and/or modified sequence from LASV(G1442-SLE-2011;Clade IV)__AIT17180__GPCmut10 (opt4)
aggagagucccgcagucggcguccagcggcucugcuuguucgugugugugucguugcaggccuuauucaagcuuaccaugggccagaucgugaccuucuuccaggaggugccccacgugaucgaggaggugaugaacaucgugcugaucgcccugagcauccuggccgugcugaagggccuguacaacguggccaccugcggccugaucggccuggugaccuuccugcugcugugcggcagaagcugcaccaccacccuguacaagggcguguacgagcugcagacccuggagcugaacauggagacccugaacaugugcaugccccugagcugcaccaagaacaacagccaccacuacaucagagugggcaacgagaccggccuggagcugacccugaccaacaccagcaucaucaaccacaaguucugcaaccugagcgacgcccacaagaagaaccuguacgaccacgcccugaugagcaucaucagcaccuuccaccugagcauccccaacuucaaccaguacgaggccaugagcugcgacuucaacggcggcaagaucagcgugcaguacaaccugagccacagcuacgccggcgacgccgccaaccacugcggcaccguggccaacggcgugcugcagaccuucaugagaauggccuggggcggcagcuacaucgcccuggacagcggcagaggcaacugggacugcaucaugaccagcuaccaguaccugaucauccagaacaccaccugggacgaccacugccaguucagcagacccagccccaucggcuaccugggccugcugagccagagaaccagagacguguacaucagcagaagacugcugggcaccuucaccuggacccugagcgacagcgagggcaaggacacccccggcggcuacugccugaccagauggaugcugaucgaggccgagcugaagugcuucggcaacaccgccguggccaagugcaacgagaagcacgacgaggaguucugcgacaugcugagacuguucgacuucugcaagcaggccauccagagacugaaggccgaggcccagaugagcauccagcugaucaacaaggccgugaacgcccugaucaacgaccagcugaucaugaagaaccaccugagagacaucaugggcauccccuacugcaacuacagcaaguacugguaccugaacaacaccgccaccggcaagaccagccugcccaagugcuggcugaucagcaacggcagcuaccugaacgagacccacuucagcgacgacaucgagcaggaggccgacaacaugaucaccgagaugcugcagaaggaguacauggagagacagggcaagaccccccugggccugguggaccuguucguguucagcaccagcuucuaccugaucagcaucuuccugcaccuggugaagauccccacccacagacacaucgugggcaagagcugccccaagccccacagacugaaccacaugggcaucugcagcugcggccuguacaagcagcccggcgugcccgugagauggaagagaugaggacuagucccuguucccagagcccacuuuuuuuucuuuuuuugaaauaaaauagccugucuuucagaucucaaaggcucuuuucagagccaccaaaaaaaaaaaaaaaaaaaaaaaaaaaaaaaaaaaaaaaaaaaaaaaaaaaaaaaaaaaaaaaaagaauu

SEQ ID NO: 36765 - RNA, 1717 nt, Artificial Sequence
  mRNA product Design a-1 (hSL-A64-N5) comprising derived and/or modified sequence from LASV(G3010-SLE-2013;Clade IV)__AIT17344__GPCmut10 (opt4)
aggagagucccgcagucggcguccagcggcucugcuuguucgugugugugucguugcaggccuuauucaagcuuaccaugggccagaucgugaccuucuuccaggaggugccccacgugaucgaggaggugaugaacaucgugcugaucgcccugagcauccuggccgugcugaagggccuguacaacuucgccaccugcggccuggugggccuggugaccuuccugcugcugugcggcagaagcugcaccaccagccuguacaagggcguguacgagcugcagacccuggagcugaacauggagacccugaacaugugcaugccccugagcugcaccaagaacaacagccaccacuacaucauggugggcaacgagaccggccuggagcugacccugaccaacaccagcaucaucaaccacaaguucugcaaccugagcgacgcccacaagaagaaccuguacaaccacgcccugaugagcaucaucagcaccuuccaccugagcauccccaacuucaaccaguacgaggccaugagcugcgacuucaacggcggcaagaucagcgugcaguacaaccugagccacagcuacgccggcgacgccgccagccacugcggcaccguggccaacggcgugcugcagaccuucaugagaauggccuggggcggcagcuacaucgcccuggacagcggcuacggcaagugggacugcaucaugaccagcuaccaguaccugaucauccagaacaccaccugggaggaccacugccaguucagcagacccagccccaucggcuaccugggccugcugagccagagaaccagagacaucuacaucagcagaagacugcugggcaccuucaccuggacccugagcgacagcgagggcaaggacacccccggcggcuacugccugaccagauggaugcugaucgaggccgagcugaagugcuucggcaacaccgccguggccaagugcaacgagaagcacgacgaggaguucugcgacaugcugagacuguucgacuucugcaagcaggccauccagagacugaagaccgaggcccagaugagcauccagcugaucaacaaggccgugaacgcccugaucaacgaccagcugaucaugaagaaccaccugagagacaucaugggcauccccuacugcaacuacagcaaguacugguaccugaaccacaccaccaccggcaagaccagccugcccaagugcuggcuggugagcaacggcagcuaccugaacgagacccacuucagcgacgacaucgagcagcaggccgacaacaugaucaccgagaugcugcagaaggaguacauggagagacagggcaagaccccccugggccugguggaccuguucguguucagcaccagcuucuaccugaucagcaucuuccugcaccuggugaagauccccacccacagacacaucgugggcaagagcugccccaagccccacagacugaaccacaugggcaucugcagcugcggccuguacaagcagcccggcgugcccgugagauggaagagaugaggacuagucccuguucccagagcccacuuuuuuuucuuuuuuugaaauaaaauagccugucuuucagaucucaaaggcucuuuucagagccaccaaaaaaaaaaaaaaaaaaaaaaaaaaaaaaaaaaaaaaaaaaaaaaaaaaaaaaaaaaaaaaaaagaauu

SEQ ID NO: 36766 - RNA, 1717 nt, Artificial Sequence
  mRNA product Design a-1 (hSL-A64-N5) comprising derived and/or modified sequence from LASV(G502-SLE-2009;Clade IV)__AIT17126__GPCmut10 (opt4)
aggagagucccgcagucggcguccagcggcucugcuuguucgugugugugucguugcaggccuuauucaagcuuaccaugggccagaucgugaccuucuuccaggaggugccccacgugaucgaggaggugaugaacaucgugcugaucgcccugagcauccuggccgugcugaagggccuguacaacuucgccaccugcggccuggugggccugcugaccuuccugcugcugugcggcagaagcugcaccaccggccuguacaagggcguguacgagcugcagacccuggagcugaacauggagacccugaacaugugcaugccccugagcugcaccaagaacaacagccaccacuacaucauggugggcaacgagaccggccuggagcugacccugaccaacaccagcaucaucaaccacaaguucugcaaccugagcgacgcccacaagaagaaccuguacgaccacgcccugaugagcaucaucagcaccuuccaccugagcauccccaacuucaaccaguacgaggccaugagcugcgacuucaacggcggcaagaucagcgugcaguacaaccugagccacagcuacgccggcgacgccgccgaccacugcggcaccguggccaacggcgugcugcagaccuucaugagaauggccuggggcggcagcuacaucgcccuggacagcggcagaggcagaugggacugcaucaugaccagcuaccaguaccugaucauccagaacaccaccugggaggaccacugccaguucagcagacccagccccaucggcuaccugggccugcugagccagagaaccagagacaucuacaucagcagaagacugcugggcaccuucaccuggacccugagcgacagcgagggcaaggacacccccggcggcuacugccugaccagauggaugcugaucgaggccgagcugaagugcuucggcaacaccgccguggccaagugcaacgagaagcacgacgaggaguucugcgacaugcugagacuguucgacuucugcaagcaggccauccagagacugaaggccgaggcccagaugagcauccagcugaucaacaaggccgugaacgcccugaucaacgaccagcuggugaugaagaaccaccugagagacaucaugggcauccccuacugcaacuacagcagauacugguaccugaaccacaccaccaccggcagaaccagccugcccaagugcuggcuggugagcaacggcagcuaccugaacgagacccacuucagcgacgacaucgagcagcaggccgacaacaugaucaccgagaugcugcagaaggaguacauggagagacagggcaagaccccccugggccugguggaccuguucguguucagcaccagcuucuaccugaucagcaucuuccugcaccuggugaagauccccacccacagacacaucgugggcaagagcugccccaagccccacagacugaaccacaugggcaucugcagcugcggccuguacaagcagcccggcgugcccgugaaguggaagagaugaggacuagucccuguucccagagcccacuuuuuuuucuuuuuuugaaauaaaauagccugucuuucagaucucaaaggcucuuuucagagccaccaaaaaaaaaaaaaaaaaaaaaaaaaaaaaaaaaaaaaaaaaaaaaaaaaaaaaaaaaaaaaaaaagaauu

SEQ ID NO: 36767 - RNA, 1717 nt, Artificial Sequence
  mRNA product Design a-1 (hSL-A64-N5) comprising derived and/or modified sequence from LASV(G733-SLE-2010;Clade IV)__AIT17154__GPCmut10 (opt4)
aggagagucccgcagucggcguccagcggcucugcuuguucgugugugugucguugcaggccuuauucaagcuuaccaugggccagaucgugaccuucuuccaggaggugccccacgugaucgaggaggugaugaacaucgugcugaucgcccugagcauccuggccgugcugaagggccuguacaacuucgccaccugcggcaucgugggccuggugagcuuccugcugcugugcggcagaagcugcaccaccagccuguacaagggcguguacgagcugcagacccuggagcugaacauggagacccugaacaugugcaugccccugagcugcaccaagaacaacagccaccacuacaucauggugggcaacgagaccggccuggagcugacccugaccaacaccagcaucaucaaccacaaguucugcaaccugagcgacgcccacaagaagaaccuguacgaccacgcccugaugagcaucaucagcaccuuccaccugagcauccccaacuucaaccaguacgaggccaugagcugcgacuucaacggcggcaagaucagcgugcaguacaaccugagccacagcuacgccggcgacgccgccaaccacugcggcaccaucgccaacggcgugcugcagaccuucaugagaauggccuggggcggcagcuacaucgcccuggacagcggcagagacagaugggacugcaucaugaccagcuaccaguaccugaucauccagaacaccaccugggaggaccacugccaguucagcagacccagccccaucggcuaccugggccugcugagccagagaaccagagacaucuacaucagcagaagacugcugggcaccuucaccuggacccugagcgacagcgagggcaaggacacccccggcggcuacugccugaccagauggaugcugaucgaggccgagcugaagugcuucggcaacaccgccguggccaagugcaacgagaagcacgacgaggaguucugcgacaugcugagacuguucgacuucugcaagcaggccauccagagacugaaggccgaggcccagaugagcauccagcugaucaacaaggccgugaacgcccugaucaacgaccagcugaucaugaagaaccaccugagagacaucaugggcauccccuacugcaacuacagcaaguacugguaccugaaccacaccaccaccggcaagaccagccugcccaagugcuggcuggugagcaacggcagcuaccugaacgagacccacuucagcgacgacaucgagcagcaggccgacaacaugaucaccgagaugcugcagaaggaguacauggagagacagggcaagaccccccugggccugguggaccuguucguguucagcaccagcuucuaccugaucagcaucuuccugcaccuggugaagauccccacccacagacacguggugggcaagagcugccccaagccccacagacugaaccacaugggcaucugcagcugcggccuguacggccagcccggcgugcccgugaaguggaagagaugaggacuagucccuguucccagagcccacuuuuuuuucuuuuuuugaaauaaaauagccugucuuucagaucucaaaggcucuuuucagagccaccaaaaaaaaaaaaaaaaaaaaaaaaaaaaaaaaaaaaaaaaaaaaaaaaaaaaaaaaaaaaaaaaagaauu

SEQ ID NO: 36768 - RNA, 1717 nt, Artificial Sequence
  mRNA product Design a-1 (hSL-A64-N5) comprising derived and/or modified sequence from MOPV/LASV reassortant(IGS-1;Clade IV)__AFY05576__GPCmut10 (opt4)
aggagagucccgcagucggcguccagcggcucugcuuguucgugugugugucguugcaggccuuauucaagcuuaccaugggccagaucgugaccuucuuccaggaggugccccacgugaucgaggaggugaugaacaucgugcugaucgcccugagcgugcuggccgugcugaagggccuguacaacuucgccaccugcggccuggugggccuggugaccuuccugcugcugugcggcagaagcugcaccaccagccuguacaagggcguguacgagcugcagacccuggagcugaacauggagacccugaacaugugcaugccccugagcugcaccaagaacaacagccaccacuacaucauggugggcaacgagaccggccuggagcugacccugaccaacaccagcaucaucaaccacaaguucugcaaccugagcgacgcccacaagaagaaccuguacgaccacgcccugaugagcaucaucagcaccuuccaccugagcauccccaacuucaaccaguacgaggccaugagcugcgacuucaacggcggcaagaucagcgugcaguacaaccugagccacagcuacgccggcgacgccgccaaccacugcggcaccguggccaacggcgugcugcagaccuucaugagaauggccuggggcggcagcuacaucgcccuggacagcggcagaggcaacugggacugcaucaugaccagcuaccaguaccugaucauccagaacaccaccugggaggaccacugccaguucagcagacccagccccaucggcuaccugggccugcugagccagagaaccagagacaucuacaucagcagaagacugcugggcaccuucaccuggacccugagcgacagcgagggcgaggacacccccggcggcuacugccugaccagauggaugcugaucgaggccgagcugaagugcuucggcaacaccgccguggccaagugcaacgagaagcacgacgaggaguucugcgacaugcugagacuguucgacuucugcaagcaggccauccagagacugaaggccgaggcccagaugagcauccagcugaucaacaaggccgugaacgcccugaucaacgaccagcugaucaugaagaaccaccugagagacaucaugggcauccccuacugcaacuacagcaaguacugguaccugaaccacaccaccaccggcagaaccagccugcccaagugcuggcuggugagcaacggcagcuaccugaacgagacccacuucagcgacgacaucgagcagcaggccgacaacaugaucaccgagaugcugcagaaggaguacauggagagacagggcaagaccccccugggccugguggaccuguucguguucagcaccagcuucuaccugaucagcaucuuccugcaccuggugaagauccccacccacagacacaucgugggcaagagcugccccaagccccacagacugaaccacaugggcaucugcagcugcggccuguacaagcagcccggcgugcccgugaaguggaagagaugaggacuagucccuguucccagagcccacuuuuuuuucuuuuuuugaaauaaaauagccugucuuucagaucucaaaggcucuuuucagagccaccaaaaaaaaaaaaaaaaaaaaaaaaaaaaaaaaaaaaaaaaaaaaaaaaaaaaaaaaaaaaaaaaagaauu

SEQ ID NO: 36769 - RNA, 1717 nt, Artificial Sequence
  mRNA product Design a-1 (hSL-A64-N5) comprising derived and/or modified sequence from LASV(LM765-SLE-2012;Clade IV)__AIT17814__GPCmut10 (opt4)
aggagagucccgcagucggcguccagcggcucugcuuguucgugugugugucguugcaggccuuauucaagcuuaccaugggccagaucgugaccuucuuccaggaggugccccacgugaucgaggaggugaugaacaucgugcugaucgcccugagcauccuggccgugcugaagggccuguacaacuucgccaccugcggccuggugggccuggugaccuuccugcugcugugcggcagaagcugcaccaccagccuguacaagggcguguacgagcugcagacccuggagcugaacauggagacccugaacaugugcaugccccugagcugcaccaagaacaacagccaccacuacaucauggugggcaacgagaccggccuggagcugacccugaccaacaccagcaucaucgaccacaaguucugcaaccugagcgacgcccacagaaagaaccuguacgaccacgcccugaugagcaucaucagcaccuuccaccugagcauccccaacuucaaccaguacgaggccaugagcugcgacuucaacggcggcaagaucagcgugcaguacaaccugagccacagcuacgccaaggacgccgccgaccacugcggcaccguggccaacggcgugcugcagaccuucaugagaauggccuggggcggcagcuacaucgcccuggacagcggcagaggcagaugggacugcaucaugaccagcuaccaguaccugaucauccagaacaccaccugggaggaccacugccaguucagcagacccagccccaucggcuaccugggccugcugagccagagaaccagagacaucuacaucagcagaagacugcugggcaccuucaccuggacccugagcgacagcgagggcaaggacacccccggcggcuacugccugaccagauggaugcugaucgaggccgagcugaagugcuucggcaacaccgccguggccaagugcaacgagaagcacgacgaggaguucugcgacaugcugagacuguucgacuucugcaagcaggccauccagagacugaaggccgaggcccagaugagcauccagcugaucaacaaggccgugaacgcccugaucaacgaccagcugaucaugaagaaccaccugagagacaucaugggcauccccuacugcaacuacagcaaguacugguaccugaaccacaccaccaccggcaagaccagccugcccaagugcuggcuggugagcaacggcagcuaccugaacgagacccacuucagcgacgacaucgagcagcaggccgacaacaugaucaccgagaugcugcagaaggaguacauggagagacagggcaagaccccccugggccugguggaccuguucguguucagcaccagcuucuaccugaucagcaucuuccugcaccuggugaagauccccacccacagacacaucgugggcaagcccugccccaagccccacagacugaaccacaugggcaucugcagcugcggccuguacaagcagcccggcgugcccgugaaguggaagagaugaggacuagucccuguucccagagcccacuuuuuuuucuuuuuuugaaauaaaauagccugucuuucagaucucaaaggcucuuuucagagccaccaaaaaaaaaaaaaaaaaaaaaaaaaaaaaaaaaaaaaaaaaaaaaaaaaaaaaaaaaaaaaaaaagaauu

SEQ ID NO: 36770 - RNA, 1717 nt, Artificial Sequence
  mRNA product Design a-1 (hSL-A64-N5) comprising derived and/or modified sequence from LASV(LM776-SLE-2012;Clade IV)__AIT17824__GPCmut10 (opt4)
aggagagucccgcagucggcguccagcggcucugcuuguucgugugugugucguugcaggccuuauucaagcuuaccaugggccagaucgugaccuucuuccaggaggugccccacgugaucgaggaggugaugaacaucgugcugaucgcccugagcauccuggccgugcugaagggccuguacaacuucgccaccugcggccuggugggccuggugaccuuccugcugcugugcggcagaagcugcaccaccagcguguacaagggcguguacgagcugcagacccuggagcugaacauggagacccugaacaugugcaugccccugagcugcaccaagaacaacagccaccacuacaucauggugggcaacgagaccggccuggagcugacccugaccaacaccagcaucaucaaccacaaguucugcaaccugagcgacgcccacaagaagaaccuguacgaccacgcccugaugagcaucaucagcaccuuccaccugagcauccccaacuucaaccaguacgaggccaugagcugcgacuucaacggcggcaagaucagcgugcaguacaaccugagccacagcuacgccggcgacgccgccaaccacugcggcaccguggccaacggcgugcugcagaccuucaugagaauggccuggggcggcagcuacaucgcccuggacagcggccacggcaagugggacugcaucaugaccagcuaccaguaccugaucauccagaacaccaccugggaggaccacugccaguucagcagacccagccccaucggcuaccugggccugcugagccagagaaccagagacaucuacaucagcagaagacugcugggcaccuucaccuggacccugagcgacagcgagggcaaggacacccccggcggcuacugccugaccagauggaugcugaucgaggccgagcugaagugcuucggcaacaccgccguggccaagugcaacgagaagcacgacgaggaguucugcgacaugcugagacuguucgacuucugcaagcaggccauccagagacugaaggccgaggcccagaugagcauccagcugaucaacaaggccgugaacgcccugaucaacgaccagcugaucaugaagaaccaccugagagacaucaugggcauccccuacugcaacuacagcaaguacugguaccugaaccacaccaccaccggcaagaccagccugcccaagugcuggcuggugagcaacggcagcuaccugaacgagacccacuucagcgacgacaucgagcagcaggccgacaacaugaucaccgagaugcugcagaaggaguacauggagagacagggcaagaccccccugggccugguggaccuguucguguucagcaccagcuucuaccugaucagcaucuuccugcaccuggugaagauccccacccacagacacaucgugggcaagagcugccccaagccccacagacugaaccacaugggcaucugcagcugcggccuguacaagcagcccggcgugcccgugagauggaagagaugaggacuagucccuguucccagagcccacuuuuuuuucuuuuuuugaaauaaaauagccugucuuucagaucucaaaggcucuuuucagagccaccaaaaaaaaaaaaaaaaaaaaaaaaaaaaaaaaaaaaaaaaaaaaaaaaaaaaaaaaaaaaaaaaagaauu

SEQ ID NO: 36771 - RNA, 1717 nt, Artificial Sequence
  mRNA product Design a-1 (hSL-A64-N5) comprising derived and/or modified sequence from LASV(Mad39;Clade IV)__ANH09722__GPCmut10 (opt4)
aggagagucccgcagucggcguccagcggcucugcuuguucgugugugugucguugcaggccuuauucaagcuuaccaugggccagaucgugaccuucuuccaggaggugccccacgugaucgaggaggugaugaacaucgugcugaucgcccugagcauccuggccgugcugaagggccuguacaacguggccaccugcggccugaucggccuggugaccuuccugcugcugugcggcagaagcugcaccaccacccuguacaagggcguguacgagcugcaggcccuggagcugaacauggagacccugaacaugugcaugccccugagcugcaccaagaacaacagccaccacuacaucagagugggcaacgagaccggccuggagcugacccugaccaacaccagccugaucaaccacaaguucugcaaccugagcgacgcccacaagaagaaccuguacgaccacgcccugaugagcaucaucagcaccuuccaccugagcauccccaacuucaaccaguacgaggccaugagcugcgacuucaacgacggcaagaucagcgugcaguacaaccugagccacaccuacgccggcgacaccgccaaccacugcggcaccguggccaacggcgugcugcagaccuucaugagaauggccuggggcggcagcuacaucgcccuggacagcggcagaggcggcugggacugcaucaugaccagcuaccaguaccugaucauccagaacaccaccugggaggaccacugccaguucagcagacccagccccaucggcuaccugggccugcugagccagagaaccagagacaucuacaucagcagaagacugcugggcaccuucaccuggacccugagcgacagcgagggcaaggacacccccggcggcuacugccugaccagauggaugcugaucgaggccgagcugaagugcuucggcaacaccgccguggccaagugcaacgagaagcacgacgaggaguucugcgacaugcugagacuguucgacuucugcaagcaggccauccagagacugaaggccgaggcccagaugagcauccagcugaucaacaaggccgugaacgcccugaucaacgaccagcugaucaugaagaaccaccugagagacaucaugggcauccccuacugcaacuacagcaaguacugguaccugaaccacaccgugaccggcaagaccagccugcccaagugcuggcuggugagcaacggcagcuaccugaacgagacccacuucagcgacgacaucgagcagcaggccgacaacaugaucaccgagaugcugcagaaggaguacauggagagacagggcaagaccccccugggccugguggaccuguucguguucagcaccagcuucuaccugaucagcaucuuccugcaccuggugaagauccccacccacagacacguggugggcaagcccugccccaagccccacagacugaaccacaugggcaucugcagcugcggcuucuacaagcagcccggcgugcccgugagauggaagagaugaggacuagucccuguucccagagcccacuuuuuuuucuuuuuuugaaauaaaauagccugucuuucagaucucaaaggcucuuuucagagccaccaaaaaaaaaaaaaaaaaaaaaaaaaaaaaaaaaaaaaaaaaaaaaaaaaaaaaaaaaaaaaaaaagaauu

SEQ ID NO: 36772 - RNA, 1717 nt, Artificial Sequence
  mRNA product Design a-1 (hSL-A64-N5) comprising derived and/or modified sequence from LASV(Z0947-SLE-2011;Clade IV)__AIT17840__GPCmut10 (opt4)
aggagagucccgcagucggcguccagcggcucugcuuguucgugugugugucguugcaggccuuauucaagcuuaccaugggccagaucgugaccuucuuccaggaggugccccacgugaucgaggaggugaugaacaucgugcugaucgcccugagcauccuggccgugcugaagggccuguacaacuucgccaccugcggccuggugggccuggugaccuuccugcugcugugcggcagaagcugcaccaucagccuguacaagggcguguacgagcugcagacccuggagcugaacauggagacccugaacaugugcaugccccugagcugcaccaagaacaacagccaccacuacaucauggugggcaacgagaccggccuggagcugacccugaccaacaccagcaucaucaaccacaaguucugcaaccugagcgacgcccacaagaagaaccuguacgaccacgcccugaugagcaucaucagcaccuuccaccugagcauccccaacuucaaccaguacgaggccaugagcugcgacuucaacggcggcaagaucagcgugcaguacaaccugagccacagcuacgccggcgacgccgccaaccacugcggcaccguggccaacggcgugcugcagaccuucaugagaauggccuggggcggcagcuacaucgcccuggacagcggcagagacagaugggacugcaucaugaccagcuaccaguaccugaucauccagaacaccaccugggaggaccacugccaguucagcagacccagccccaucggcuaccugggccugcugagccagagaaccagagacaucuacaucagcagaagacugcugggcaccuucaccuggacccugagcgacagcgagggcaaggacacccccggcggcuacugccugaccagauggaugcugaucgaggccgagcugaagugcuucggcaacaccgccguggccaagugcaacgagaagcacgacgaggaguucugcgacaugcugagacuguucgacuucugcaagcaggccauccagagacugaaggccgaggcccagaugagcauccagcugaucaacaaggccgugaacgcccugaucaacgaccagcugaucaugaagaaccaccugagagacaucaugggcauccccuacugcaacuacagcaaguacugguaccugaaccacaccaccaccggcaagaccagccugcccaagugcuggcuggugagcaacggcagcuaccugaacgagacccacuucagcgacgacaucgagcagcaggccgacaacaugaucaccgagaugcugcagaaggaguacauggagagacagggcaagaccccccugggccugguggaccuguucguguucagcaccagcuucuaccugaucagcaucuuccugcaccuggugaagauccccacccacagacacaucgugggcaagcccugccccaagccccacagacugaaccacaugggcaucugcagcugcggccuguacaagcagcccggcgugcccgugaaguggaagagaugaggacuagucccuguucccagagcccacuuuuuuuucuuuuuuugaaauaaaauagccugucuuucagaucucaaaggcucuuuucagagccaccaaaaaaaaaaaaaaaaaaaaaaaaaaaaaaaaaaaaaaaaaaaaaaaaaaaaaaaaaaaaaaaaagaauu

SEQ ID NO: 36773 - RNA, 1717 nt, Artificial Sequence
  mRNA product Design a-1 (hSL-A64-N5) comprising derived and/or modified sequence from LASV(Josiah;Clade IV)__NP_694870__GPCmut10 (opt5)
aggagagucccgcagucggcguccagcggcucugcuuguucgugugugugucguugcaggccuuauucaagcuuaccaugggccagaucgugaccuucuuucaagaggucccccacguuauugaagaggugaugaacaucgugcugauugcccucagcguccuggcugugcuuaaggggcuguacaauuucgccacaugcggacucguuggccuggugacguuucuucugcucugugggagauccugcaccacaucucuguauaaaggagucuacgaacugcagacccucgagcugaacauggaaacacuuaauauguguaugccucugagcugcaccaagaacaauucccaucacuauaucauggugggcaacgagacagggcucgagcugacccuuacgaauaccucuauuaucaaccauaaauucuguaaucugagcgacgcgcacaagaaaaaccucuacgaucaugcucugauguccaucauuucuacauuucaccugagcaucccgaauuucaaccaguaugaagccauguccugcgacuuuaauggaggcaagauuagcguucaguacaaccucucucacuccuaugccggcgaugcugccaaucauugugggaccguggcuaacggaguccugcaaacauucaugcggauggccuggggcgggagcuacaucgcgcuugacucuggacgcggcaacugggauugcauuaugaccuccuaccaguaucugaucauucagaauacgacaugggaggaccacugucaguuuagcagacccucuccuaucggguaccucggacugcuuucccaacggacccgcgauaucuauauuagcagacggcugcucggcacauucaccuggacccuguccgacucugaaggcaaggauacacccgggggauacugccugacgcgcuggaugcucaucgaggccgagcugaaauguuuuggcaacaccgcuguggccaagugcaaugaaaaacaugacgaggaguucugcgauaugcuuagacuguuugacuucuguaagcaggcuauucagcggcucaaagccgaagcgcagaugagcauccaacugauuaacaaggccgugaaugcucuuaucaacgaucagcugaucaugaagaaucaccuccgcgacauuauggggaucccuuauugcaacuacuccaaauauugguaccugaaucacacaaccacaggaagaaccagccugcccaaguguuggcucgucucuaacggcuccuaccugaaugaaacgcauuucagcgacgauauugagcagcaagccgacaacaugaucacagagaugcuucagaaagaauauauggagcggcaggggaagaccccucugggacucguugaucuguuuguguucucuaccagcuuuuaccugauuuccaucuuccuucaccucgugaaaaucccgacacaucgccacauugucggcaagucuugccccaaaccucauagacugaaucacaugggcaucuguagcugcgggcuguauaagcagcccggagugccuguuaaguggaaacggugaggacuagucccuguucccagagcccacuuuuuuuucuuuuuuugaaauaaaauagccugucuuucagaucucaaaggcucuuuucagagccaccaaaaaaaaaaaaaaaaaaaaaaaaaaaaaaaaaaaaaaaaaaaaaaaaaaaaaaaaaaaaaaaaagaauu

SEQ ID NO: 36774 - RNA, 1714 nt, Artificial Sequence
  mRNA product Design a-1 (hSL-A64-N5) comprising derived and/or modified sequence from LASV(LP;Clade I)__AAF86701__GPCmut10 (opt5)
aggagagucccgcagucggcguccagcggcucugcuuguucgugugugugucguugcaggccuuauucaagcuuaccaugggccagaucauuaccuucuuucaagaggugccccacgucaucgaagagguuaugaacauugugcugaucgcccucagccugcuugcuauucugaaggggcucuacaauaucgccacaugcggaaucauuggccugguggcguuccuuuuucugugugggaaauccugcucucucacgcugaagggaggcuaugaacugcagacccucgagcugaacauggaaacacuuaauauguguaugccucugagcugcaccaaaaacuccucucaucacuacaucagagucgggaaugagacaggacucgagcugacccuuacaaacaccagcauuaucaaucauaaguucuguaaccuguccgacgcucacaaaaagaaucucuaugaucaugcccugaugucuauuaucagcacguuucaccuguccauuccgaacuucaaucaguacgaagccaugagcugcgacuuuaacggcggcaagaucucugugcaguauaaucucucccacagcuacgcuggggaugccgcugagcauuguggaaccguugccaacggcgugcugcaaacauucaugcggauggcguggggagggcgcuauaucgcccuugacucuggcaaagggaauugggauugcauuaugaccuccuaccaguaccugaucauucagaacacaaccugggaagaccacugucaguuuagcagacccucuccuaucggauaucucggccugcuuucccaacggacgcgcgauauuuacaucagcagacggcugcucggcacauucaccuggacacuguccgacucugaggggaacgagacccccggaggcuauugccugacccgcuggaugcucaucgaagcugagcugaaguguuuugggaauacagccgucgcuaaaugcaacgaaaagcaugaugaggaguucugcgacaugcuuagacuguuugauuucuguaaacaggccauucggcgccucaaggcggaagcccagaugagcauccagcugauuaauaaggcugugaacgcccuuaucaaugaccaacugauuaugaaaaaccaccucagagauaucaugggaaucccuuacugcaauuauuccaaguacugguaucugaaccacacgagcucuggccggaccucccugcccaaauguuggcucauuagcaaugggucuuaccugaacgagacacaguucagcgacgacaucgaacagcaagcugauaauaugauuaccgagaugcuucagaaggaauacaucgagcgccagggaaaaacaccucugggccucguugacauuuuuaucuucuccaccucuuuuuaucugauuagcaucuuccugcaucuuaucaagauuccgacgcacagacauaucgugggcaaacccugcccuaagccccaccggcucaaccauaugggggucuguuccugcggacuguacaagcacccuggcgugcccacaaaauggaagcgcugaggacuagucccuguucccagagcccacuuuuuuuucuuuuuuugaaauaaaauagccugucuuucagaucucaaaggcucuuuucagagccaccaaaaaaaaaaaaaaaaaaaaaaaaaaaaaaaaaaaaaaaaaaaaaaaaaaaaaaaaaaaaaaaaagaauu

SEQ ID NO: 36775 - RNA, 1714 nt, Artificial Sequence
  mRNA product Design a-1 (hSL-A64-N5) comprising derived and/or modified sequence from LASV(803213;Clade II)__AAF86703__GPCmut10 (opt5)
aggagagucccgcagucggcguccagcggcucugcuuguucgugugugugucguugcaggccuuauucaagcuuaccaugggccagaucauuaccuucuuucaagaggugccccacgucaucgaagagguuaugaacauugugcugaucgcccucagccugcuugcuauucugaaggggaucuacaauguggccacaugcggacucuucggccugaucuccuuucuucugcucugugggagaucuugcagcgucacguauaaaggaguguacgaacugcagacccuggagcucaacauggcgaaucugaacauguguaugccucuuuccugcacaaagaauaacucucaucacuauauuaugguuggcaaugaaaccgggcuggagcucacacugaccaacacaagcaucauuaaucauaaauucuguaaccuuuccgacgcucacaagaaaaaucuguacgaucaugcccucaugucuaucauuagcaccuuucaccuguccaucccgaacuucaaucaguaugaggccaugagcugcgacuuuaacggaggcaagauuucugugcaguacaaucugucccacagcuucgcugucgaugccgcuaaccauuguggcacgaucgccaacggggugcuccaaaccuuuaugcggauggcguggggaggcucuuauaucgcccuggacuccgggaagggaaauugggauugcauuaugacaagcuaccaguaccuuaucauucagaacaccacaugggaagaccacugucaguucucucgccccuccccuaucggcuaucuggggcuccugagccaaagaacccgggauauuuacaucucccgcagacuucugggaacguuuacauggacccucucugacagcgagggcaaugaagcucccggcggguauugccugacacgguggaugcugaucgaggccgagcucaaauguuucggaaacaccgcuguugccaagugcaaugaaaaacaugaugaggaauuuugcgacaugcugcgccuuuucgauuucuguaagcaggcgauuaaaagacugaagaccgaggcccagauguccauccagcucauuaacaaggcugugaaugcccugaucaacgaccaacuuauuaugaaaaaucaucugcgggauaucaugggcaucccuuacugcaacuauagccgcuacugguaucucaaucacacagucacggggaagaccucucugcccagauguuggcugguguccaacggaagcuaccucaaugaaacacacuuuucugacgacauugagcagcaggcugauaacaugaucaccgagaugcugcaaaaagaauacauggaccggcagggcaagacaccucuugggcugguggaucucuucgucuuuagcaccuccuucuaucugauuucuaucuuucugcaccuuguuaaaauuccgacgcaucgccacaucgugggaaagcccugcccuaaaccccauagacucaaucacaugggcauuuguagcugcggccuguacaagcacccuggggugcccgucaaguggaaacggugaggacuagucccuguucccagagcccacuuuuuuuucuuuuuuugaaauaaaauagccugucuuucagaucucaaaggcucuuuucagagccaccaaaaaaaaaaaaaaaaaaaaaaaaaaaaaaaaaaaaaaaaaaaaaaaaaaaaaaaaaaaaaaaaagaauu

SEQ ID NO: 36776 - RNA, 1714 nt, Artificial Sequence
  mRNA product Design a-1 (hSL-A64-N5) comprising derived and/or modified sequence from LASV(GA391;Clade III)__CAA36645__GPCmut10 (opt5)
aggagagucccgcagucggcguccagcggcucugcuuguucgugugugugucguugcaggccuuauucaagcuuaccaugggccagaucgugaccuucuuucaagaggucccccacguuauugaagaggugaugaacaucgugcugauugcccucagcauccuggcuauucuuaaggggcuguacaaugucgccacaugcggacucaucggccuggugacguuccuucugcucuccgggagaucuuguagccugaucuauaaaggaaccuacgaacugcagacacucgagcugaacauggaaacccuuaauaugugcaugccucuguccuguacaaagaacaauucucaucacuauauucggguuggcaacgagaccgggcucgagcugacacuuaccaauacgagcauccugaaccauaaauuuugcaaucucuccgacgcgcacaagcgcaaccuguacgaucauucucugaugagcauuaucuccaccuuccaccucagcauuccgaauuuuaaccaguaugaagcuaugucuugugacuucaauggaggcaaaaucacagugcaguacaaccugucccacagcuuugccgucgaugccgcuggccauugcgggacccuugccaauggagugcugcaaacauucaugagaauggcuuggggcgggucuuauauugcccucgacuccggacggggcaacugggauuguaucaugaccagcuaccaguaccugaucauucagaacacgacaugggacgaucacugccaguuuucucgccccuccccuaucggguaucuuggacugcucagccaaagaacccgggacauuuacaucucccgcagacugcugggcacauucaccuggacccucucugauagcgagggcaaugaaacacccgggggauauugucugacgcgguggaugcuuauugaggcggagcugaagugcuuuggcaacaccgccguugcuaaguguaaugaaaaacaugacgaggaguucugcgauaugcuccgccuguuugacuucugcaagcaggccaucagacggcuuaaaacagaagcucagauguccauccagcugauuaacaaggccgugaaugcgcucaucaacgaucaacugauuaugaaaaaucaucugcgcgacaucauggggauuccuuacuguaacuauagcagauacugguaucucaaucacaccucuacaggaaagaccucccugccccggugcuggcuuaucagcaacggcucuuaccugaaugaaacgaaguucagcgacgauaucgagcagcaggccgacaacaugauuacagagaugcuccaaaaagaauacaucgaucgccaggggaagaccccucugggacuggucgaccuuuuuguguucuccaccucuuuuuaucucauuagcaucuuccugcaccuggugaaaauuccgacacacagacauaucgucggcaagcccuguccuaaaccccaccggcucaaucauaugggcauuugcuccugugggcuguacaagcagccuggaguucccgugagauggaaacgcugaggacuagucccuguucccagagcccacuuuuuuuucuuuuuuugaaauaaaauagccugucuuucagaucucaaaggcucuuuucagagccaccaaaaaaaaaaaaaaaaaaaaaaaaaaaaaaaaaaaaaaaaaaaaaaaaaaaaaaaaaaaaaaaaagaauu

SEQ ID NO: 36777 - RNA, 1717 nt, Artificial Sequence
  mRNA product Design a-1 (hSL-A64-N5) comprising derived and/or modified sequence from LASV(AV;Clade V)__CCA30314__GPCmut10 (opt5)
aggagagucccgcagucggcguccagcggcucugcuuguucgugugugugucguugcaggccuuauucaagcuuaccaugggccagaucgugaccuucuuucaagaggucccccacguuauugaagaggugaugaacaucgugcugauugcccucagcauccuggcuguccuuaaggggcuguacaauauugccacaugcggacucaucggccugaucacguuccuucugcucugugggagauccugcucuagcaaccuguauaaaggaguguacgaacugcagucccucgaccugaauauggagacccuuaacauguguaugccucugucuugcacaaagaauaacagccaucacuauauucggguuggcaaugauaccgggcucgaacugacacuuaccaacacauccauccugaaucauaaauuuuguaaccucucugacgcgcacaagaaagaucuguacgaccaugcucugaugagcauuaucuccaccuuccaccucagcauuccgaauuuuaaccaguaugaggccaugucuugcgauuucaauggaggcaagaucuccgugcaguacaaccugagccacucuuaugccauugacgcugccaaucauuguggcacggucgcuaacgggauccuucaaaccuuuaugcgcauggccuggggaggcuccuacaucgcgcuggauagcgggagaggaaacugggacugcauuaugacaucuuaccaguaucucaucauucagaauaccacaugggagaaccacugucaguucucccggcccagcccuaucggcuaccuggggcuucugucccaacgcaccagagauauuuauaucucucggcgccuccugggaacguuuacauggacccugagcgacuccgaaggcaaugccacacccggcggguacugccucaccagauggaugcugaucgaggcugaacuuaaguguuucggaaacaccgccguggcuaaaugcaaugagaagcaugaugaggaauuuugcgacaugcugcgccucuucgauuuuuguaaacaggccauuagccggcugaagucugaggcgcagauguccauccagcuuauuaacaaagccguuaaugcucugaucaacgaccaacucauuaugaagaaucaccugagagacaucaugggcaucccuuauugcaacuacagcaaguauugguaccugaaucacacaauuacggggaaaaccucucuccccaaguguuggcuggugagcaacggauccuaccuuaaugaaacacauuucucugaugacaucgagcagcaggccgauaacaugauuaccgaaaugcugcaaaaagaguauauggagcggcagggcaagacaccucucgggcuggucgaccuguucguguuuagcaccuccuucuaccuuaucagcauuuuucuccgccuggugaaaaucccgacgcacagacauauugucggaaagcccugcccuaaaccccaccggcugaaucauaugggcaucuguucuugcggccucuauaagcagccugggguucccgugcgcuggaagagaugaggacuagucccuguucccagagcccacuuuuuuuucuuuuuuugaaauaaaauagccugucuuucagaucucaaaggcucuuuucagagccaccaaaaaaaaaaaaaaaaaaaaaaaaaaaaaaaaaaaaaaaaaaaaaaaaaaaaaaaaaaaaaaaaagaauu

SEQ ID NO: 36778 - RNA, 1714 nt, Artificial Sequence
  mRNA product Design a-1 (hSL-A64-N5) comprising derived and/or modified sequence from LASV(Togo/2016/7082;Clade VI)__AMR44577__GPCmut10 (opt5)
aggagagucccgcagucggcguccagcggcucugcuuguucgugugugugucguugcaggccuuauucaagcuuaccaugggccagaucauuaccuucuuucaagaggugccccacgucaucgaagagguuaugaacauugugcugaucgcccucagccugcuugcuauucugaaggggguguacaaugucgccacaugcggaaucaucggccucgugacguuccuguuucuuugugggagauccugcucucugauuuauaaaggaagcuacgaacuccagacccuggagcugaacauggaaacacucaauauguguaugccucuguccugcaccaagaacucuagccaucacuauauccggguuggcaaugagacagggcuugagcugacccucacaaacaccuccauuaucaaucauaaauucuguaaccugucugacgcgcacaagcgcaaucuuuacgaucaugcucugaugagcauucucuccacguuucaccugagcaucccgaacuucaaucaguaugaagccaugucuugcgacuuuaacggaggcaaaauuuccgugcaguacaaucugagccacgccuaugcugucgaugccgcugagcauuguggcaccguggccaacgggguucuccaaacauucaugagaauggcguggggaggcucuuacaucgcccuggacuccgggcggggaaauugggauugcaucaugaccagcuaccaguaucuuauuauccagaacacaaccugggaagaccacugucaguuuucucgccccuccccuauuggcuaccuggggcuccugagccaaagaacgcgggauaucuauauuucccgcagacuucugggaacauucaccuggacacucucugacagcgagggcaacgagacccccggcggguacugccugacccgguggaugcugaucgaagcugagcucaaguguuuuggaaauacagccguggcuaagugcaacgaaaaacaugaugaggaguucugcgacaugcugcgccuuuuugauuucuguaagcaggccauccagagacugaaauccgaagcgcagaugagcauucaacucaucaauaaggccgucaacgcucugauuaaugaccagcuuaucaugaaaaaccaucugcgggauaugaugggcauuccuuauugcaauuacucuaaguauugguaccucaaccacacguccagcgggcgcaccucucugcccaaguguuggcuggugagcaauggauccuaccucaacgagacacacuucucugacgacaucgaacagcaagccgauaauaugaucaccgagaugcugcagaaagaauauauugacagacagggcaagacaccucuugggcugguggaucucuuugucuucagcaccuccuuuuaccugaucagcauuuuccugcaccuuaucaaaauuccgacgcaucggcacaucguuggaaagcccugcccuaaaccccaucgccucaaccacaugggcauuuguucuugcggccuguauaagcagccuggggugcccacaagauggaaacggugaggacuagucccuguucccagagcccacuuuuuuuucuuuuuuugaaauaaaauagccugucuuucagaucucaaaggcucuuuucagagccaccaaaaaaaaaaaaaaaaaaaaaaaaaaaaaaaaaaaaaaaaaaaaaaaaaaaaaaaaaaaaaaaaagaauu

SEQ ID NO: 36779 - RNA, 1714 nt, Artificial Sequence
  mRNA product Design a-1 (hSL-A64-N5) comprising derived and/or modified sequence from LASV(KAK-428;Clade n.d. (VII))__ANH09740__GPCmut10 (opt5)
aggagagucccgcagucggcguccagcggcucugcuuguucgugugugugucguugcaggccuuauucaagcuuaccaugggccagaucgugaccuucuuucaagaggucccccacguuauugaagaggugaugaacaucgugcugauugcccucagccugcuugcuauccugaaggggcucuacaauuucgccacaugcggagucauuggccugaucacguuucuucugcucugugggagauccugcucugcgaccuauaaaggacaguacgaacugcagacacuggagcucaacauggaaagccugaauauguguaugccucuuuccugcaccaagaacaauucucaucacuauauccgggcuggcaacaauacagggcuggagcucacccugacaaacaccagcauuaucucccauaaauucuguaaucuuucugacgcccacaagaaaaaccuguacgaucauacgcucaugagcauuaucaccacauuucaccuguccauuccgaauuucaaccaguaugaggccaugagcugcgacuuuaauggaggcaagaucucuauucaauacaaccugucccacagcuaugcuggcgaugccgcucagcauugugggaccguggccaauggaguucuccagacauucaugcgcauggcguggggcgggucuuaccuggcccuugacuccggaagacggggcugggauugcaucaucagcucuuaccaguaucugauuauccaaaacaccacgugggacgaucacugucaguuuucccgccccagcccuauuggguaccucggauucgugucccagaagacaagagacaucuauauuucucggcgccugcuuggcaccuuuacauggacccugagcgauuccgaaggccaugacaugcccgggggauacugccucaccagauggaugcugaucgaggcugaucugaaauguuucggcaacacagccgucgcuaagugcaaugaaaaacacgacgaggaguuuugcgauauguggcgccucuucgacuucuguaagcaggccauccaacggcugaaagcggaagcccagaugaacauucagcuuaucaauaaggcugugaacgcccugauuaaugaccaacucaugaugaagaaccaccugagagauaucauggggauuccuuauugcaauuacagcaaauuuugguaucuuaacaauacgaccacaggacggaccucucugccccgcuguuggcucaucuccaacggcagcuaccugaaugagacacauuucucugacgauaucgaacagcaggcugacaacaugauuaccgagaugcugcagaaggaauacauggauagacaagggaaaacgccucucggacugguugaccuuuuuguguucagcacauccuuuuaucugaucaccauuuuccuccaccuggucaagaucccgacccaucggcacauugugggcaaacccugcccuaagccccaucgccugaaucacaugggcaucuguucuugcgggcuuuacaaacagccuggagugcccgucagauggaagcggugaggacuagucccuguucccagagcccacuuuuuuuucuuuuuuugaaauaaaauagccugucuuucagaucucaaaggcucuuuucagagccaccaaaaaaaaaaaaaaaaaaaaaaaaaaaaaaaaaaaaaaaaaaaaaaaaaaaaaaaaaaaaaaaaagaauu

SEQ ID NO: 36780 - RNA, 1714 nt, Artificial Sequence; identical to SEQ ID NO: 36774
  mRNA product Design a-1 (hSL-A64-N5) comprising derived and/or modified sequence from LASV(Pinneo-NIG-1969;Clade I)__AIT17836__GPCmut10 (opt5)

SEQ ID NO: 36781 - RNA, 1714 nt, Artificial Sequence
  mRNA product Design a-1 (hSL-A64-N5) comprising derived and/or modified sequence from LASV(ISTH0009-NIG-2011;Clade II)__AIT17404__GPCmut10 (opt5)
aggagagucccgcagucggcguccagcggcucugcuuguucgugugugugucguugcaggccuuauucaagcuuaccaugggccagaucauuaccuucuuucaagaggugccccacgucaucgaagagguuaugaacauugugcugaucgcccucagccugcuugcuauucugaaggggaucuacaauguggccacaugcggacucuucggccuggucuccuuucuucugcucugugggagaucuugcagcacgaccuauaaaggaguguacgaacugcagacacuggagcucgacauggcgucccugaacauguguaugccucuuucuugcaccaagaauaacagccaucacuauaucaugguuggcaaugaaacagggcuggagcucacccugacaaacaccuccauuaucaaucauaaauucuguaaccuuucugaugcucacaagaaaaaucuguacgaccaugcccucaugagcauuaucuccacguuucaccugagcauuccgaacuucaaucaguaugaggccaugucuugcgauuuuaacggaggcaagaucuccgugcaguacaaucugagccacgcuuaugccgucgacgcugccaaccauuguggcaccauugcgaauggggugcuccaaacauucaugcggauggccuggggaggcucuuacaucgcucuggauuccgggaagggaagcugggacugcaucaugaccucuuaccaguaucuuauuauccagaacacaaccugggaagaucacugucaguuuucccgccccagcccuauuggcuaccuggggcuccugucccaaagaacgcgggacaucuauauuucucgcagacuucugggaacauucaccuggacacucagcgauuccgagggcaacgaaacccccggcggguacugccugacccgguggaugcugaucgaggccgagcucaaauguuuuggaaauacagcuguugccaagugcaacgaaaaacaugacgaggaguucugcgauaugcugcgccuuuuugacuucuguaagcaggcgaucagacggcugaaaacggaagcccagaugagcauucagcucaucaauaaggcugugaacgcccugauuaaugaucaacuuaucaugaagaaccaucugcgcgacauuaugggcaucccuuauugcaauuacucuaaauauugguaccucaaccacaccgucacagggaagaccucccugcccagauguuggcuggugagcaauggaucuuaccucaacgaaacacacuucagcgacgauaucgagcagcaggcugacaauaugauuaccgagcugcuucaaaaagaauauauggaucggcagggcaagacgccucuggggcucguggaccuguuugucuucuccacaucuuuuuaccugaucagcauuuuccuucaccucaucaaaauuccgacccaucgccacaucaccggaaagcccugcccuaaaccccauagacugaaccacaugggcauuuguuccugcggccuguauaagcacccugggguucccgugaaguggaaacggugaggacuagucccuguucccagagcccacuuuuuuuucuuuuuuugaaauaaaauagccugucuuucagaucucaaaggcucuuuucagagccaccaaaaaaaaaaaaaaaaaaaaaaaaaaaaaaaaaaaaaaaaaaaaaaaaaaaaaaaaaaaaaaaaagaauu

SEQ ID NO: 36782 - RNA, 1714 nt, Artificial Sequence
  mRNA product Design a-1 (hSL-A64-N5) comprising derived and/or modified sequence from LASV(ISTH2010-NIG-2012;Clade II)__AIT17482__GPCmut10 (opt5)
aggagagucccgcagucggcguccagcggcucugcuuguucgugugugugucguugcaggccuuauucaagcuuaccaugggccagaucauuaccuucuuucaagaggugccccacgucaucgaagagguuaugaacauugugcugaucgcccucagccugcuugcuauucugaaggggaucuacaauguggccacaugcggacucuucggccuggucuccuuucuucugcucugugggagaucuugcagcacgaccuauaaaggaguguacgaacugcagacacuggagcucgacauggcgucccugaacauguguaugccucuuucuugcaccaagaauaacagccaucacuauaucaugguuggcaaugaaacagggcuggagcucacccugacaaacaccuccauuaucaaucauaaauucuguaaccuuucugaugcucacaagaaaaaucuguacgaccaugcccucaugagcauuaucuccacguuucaccugagcauuccgaacuucaaucaguaugaggccaugucuugcgauuuuaacggaggcaagaucuccgugcaguacaaucugagccacgcuuaugccgucgacgcugccaaccauuguggcaccauugcgaauggggugcuccaaacauucaugcggauggccuggggaggcucuuacaucgcucuggauuccgggaagggaagcugggacugcaucaugaccucuuaccaguaucuuauuauccagaacauuacaugggaagaucacugucaguuuucccgccccagcccuaucggcuaccuggggcuccugucccaaagaacccgggacauuuauaucucucgcagacuucugggaacguucacauggacccucagcgauuccgagggcaacgaaacacccggcggguacugccugacccgguggaugcugaucgaggccgagcucaaauguuuuggaaauaccgcuguugccaagugcaacgaaaaacaugacgaggaguucugcgauaugcugcgccuuuuugacuucuguaagcaggcgauuagacggcugaaaacagaagcccagaugagcauccagcucauuaauaaggcugugaacgcccugaucaaugaucaacuuauuaugaagaaccaucugcgcgacaucaugggcaucccuuauugcaauuacucuaaauauugguaccucaaccacacggucaccgggaagacaucccugcccagauguuggcuggugagcaauggaucuuaccucaacgaaacccacuucagcgacgauauugagcagcaggcugacaauaugaucacagagcugcuucaaaaagaauauauugaucggcagggcaagaccccucuggggcucguggaccuguuugucuucuccacgucuuuuuaccugaucagcauuuuccuucaccucguuaaaaucccgacacaucgccacguggugggaaagcccugcccuaaaccccauagacugaaccacaugggcauuuguuccugcggccuguauaagcacccugggguccccgugaaguggaaacggugaggacuagucccuguucccagagcccacuuuuuuuucuuuuuuugaaauaaaauagccugucuuucagaucucaaaggcucuuuucagagccaccaaaaaaaaaaaaaaaaaaaaaaaaaaaaaaaaaaaaaaaaaaaaaaaaaaaaaaaaaaaaaaaaagaauu

SEQ ID NO: 36783 - RNA, 1714 nt, Artificial Sequence
  mRNA product Design a-1 (hSL-A64-N5) comprising derived and/or modified sequence from LASV(Lassa virus/H.sapiens-wt/NGA/2015/ISTH_0543;Clade II)__AVO03639__GPCmut10 (opt5)
aggagagucccgcagucggcguccagcggcucugcuuguucgugugugugucguugcaggccuuauucaagcuuaccaugggccagaucauuaccuucuuucaagaggugccccacgucaucgaagagguuaugaacauugugcugaucgcccucagccugcuugcuauucugaaggggaucuacaauguggccacaugcggacucuucggccuggucuccuuucuucugcucugugggagaucuugcagcacgaccuauaaaggaguguacgaacugcagacacuggagcucgacauggcgaaccugaauauguguaugccucuuuccugcaccaagaacaauucucaucacuauaucaugguuggcaacgaaacagggcuggagcucacccugacaaauaccagcauuaucaaccauaaauucuguaaucuuuccgaugcucacaagaaaaaccuguacgaccaugcccucaugucuauuaucagcacguuucaccuguccauuccgaauuucaaccaguaugaggccaugagcugcgauuuuaauggaggcaagaucucugugcaguacaaccugucccacaccuaugcugucgacgccgcuaaucauuguggcacaauugccaacggggugcuccaaaccuucaugcggauggcguggggaggcagcuacaucgcccuggauucugggaagggauccugggacugcaucaugacaagcuaccaguaucuuguuauucagaacaccacgugggaagaucacugucaguuuucucgccccuccccuaucggcuaccuggggcuccugagccaaagaacacgggacauuuauaucucccgcagacuucugggaaccuucacauggacccucucugauagcgagggcaaugaaacccccggcggguacugccugacacgguggaugcugauugaggcugagcucaaauguuuuggaaacacggccguggcuaagugcaaugaaaaacaugacgaggaguucugcgauaugcugcgccuuuuugacuucuguaagcaggccaucagacggcugaaaaccgaagcgcagauguccauccagcucauuaacaaggccgucaaugcucugaucaacgaucaacuuauuaugaagaaucaucugcgcgacaucaugggcauuccuuauugcaacuacagcaaauauugguaccucaaucacacagugaccgggaagacaucucugcccagauguuggcugguguccaacggaagcuaccucaaugaaacccacuucucugacgauaucgagcagcaggccgacaacaugaucacggagcugcuucaaaaagaauauauugaucggcagggcaagacaccucuggggcucgucgaccuguuuguuuucagcaccuccuuuuaccugaucucuauuuuccuucaccucgugaaaaucccgacccaucgccacauuacaggaaagcccugcccuaaaccccauagacugaaucacaugggcaucuguagcugcggccuguauaagcacccuggggugcccgucaaguggaaacggugaggacuagucccuguucccagagcccacuuuuuuuucuuuuuuugaaauaaaauagccugucuuucagaucucaaaggcucuuuucagagccaccaaaaaaaaaaaaaaaaaaaaaaaaaaaaaaaaaaaaaaaaaaaaaaaaaaaaaaaaaaaaaaaaagaauu

SEQ ID NO: 36784 - RNA, 1714 nt, Artificial Sequence
  mRNA product Design a-1 (hSL-A64-N5) comprising derived and/or modified sequence from LASV(Lassa virus/H.sapiens-wt/NGA/2016/ISTH_0009;Clade II)__AVO03571__GPCmut10 (opt5)
aggagagucccgcagucggcguccagcggcucugcuuguucgugugugugucguugcaggccuuauucaagcuuaccaugggccagaucauuaccuucuuucaagaggugccccacgucaucgaagagguuaugaacauugugcugaucgcccucagccugcuugcuauucugaaggggaucuacaauguggccacaugcggacuccugggccuugucuccuuccugcuccugugugggagaucuugcagcacgaccuauaaaggaguguacgaacugcagacacucgagcuggacauggcgucccuuaacauguguaugccucugucuugcaccaagaauaacagccaucacuauaucaugguuggcaaugaaacagggcucgagcugacccuuacaaacaccuccauuaucaaucauaaauuuuguaaccugucugaugcucacaagaaaaaucucuacgaccaugcccugaugagcauuaucuccacguuccaccugagcauuccgaacuuuaaucaguaugaggccaugucuugcgauuucaacggaggccggaucuccgugcaguacaaucucagccacucuuaugcugucgacgccgcuaaccauuguggcaccauugccaauggggugcugcaaacauuuaugcgcauggcguggggaggcuccuacaucgcccuugauagcgggaagggaucuugggacugcaucaugaccuccuaccaguaucugauuauccagaacacaaccugggaagaucacugucaguucagcagacccuccccuauuggcuaccucgggcugcuuucucaacggacgcgcgacaucuauauuagcagacggcugcucggaacauuuaccuggacacuguccgauagcgagggcaacgaaacccccggcggguacugccugacccgcuggaugcucaucgaggcugagcugaaguguuucggaaauacagccguugcuaaaugcaacgaaaagcaugacgaggaauuuugcgauaugcuuagacuguucgacuuuuguaaacaggccauccggcgccucaagacggaggcgcagaugucuauucagcugaucaauaaagccgugaacgcucuuauuaaugaucaacugaucaugaagaaccaccucagagacauuaugggcaucccuuauugcaauuacuccaaguauugguaccugaaccacaccgucacagggaaaaccagccugccccgguguuggcucgugucuaauggaagcuaccugaacgaaacacauuucuccgacgauaucgagcagcaggccgacaauaugauuaccgagcuucugcaaaaggaauauaucgaucgccagggcaaaacgccucucgggcugguggaccuguucgucuuuucuaccagcuucuaccuuauuuccaucuuucuccaccugguuaagauuccgacacauagacacaucaccggaaaacccugcccuaagccccaucggcugaaccacaugggcauuuguagcugcggccucuauaaucacccuggggugcccgugaaauggaagcgcugaggacuagucccuguucccagagcccacuuuuuuuucuuuuuuugaaauaaaauagccugucuuucagaucucaaaggcucuuuucagagccaccaaaaaaaaaaaaaaaaaaaaaaaaaaaaaaaaaaaaaaaaaaaaaaaaaaaaaaaaaaaaaaaaagaauu

SEQ ID NO: 36785 - RNA, 1714 nt, Artificial Sequence
  mRNA product Design a-1 (hSL-A64-N5) comprising derived and/or modified sequence from LASV(Lassa virus/H.sapiens-wt/NGA/2016/ISTH_0017;Clade II)__AVO03567__GPCmut10 (opt5)
aggagagucccgcagucggcguccagcggcucugcuuguucgugugugugucguugcaggccuuauucaagcuuaccaugggccagaucauuaccuucuuucaagaggugccccacgucaucgaagagguuaugaacauugugcugaucgcccucagccugcuugcuauucugaaggggaucuacaauguggccacaugcggacucuucggccuggucuccuuucuucugcucugugggagaucuugcagcacgaccuauaaaggaguguacgaacugcagacacuggagcucgacauggcgucccugaacauguguaugccucuuucuugcaccaagaauaacagccaucacuauaucaugguuggcaaugaaacagggcuggagcucacccugacaaacaccuccauuaucaaucauaaauucuguaaccuuucugaugcucacaagaaaaaucuguacgaccaugcccucaugagcauuaucuccacguuucaccugagcauuccgaacuucaaucaguaugaggccaugucuugcgauuuuaacggaggcaagaucuccgugcaguacaaucugagccacaccuaugcuauugacgccgcuaaccauuguggcacaaucgccaaugggguccuccaaaccuucaugcggauggcguggggaggcucuuacaucgcccuggauuccgggaagggaagcugggacugcauuaugacaucuuaccaguaucuuaucauucagaacaccacgugggaagaucacugucaguuuucccgccccagcccuaucggcuaccuggggcuccugucccaaagaacacgggacauuuauaucucucgcagacuucugggaaccuucacauggacccucagcgauuccgagggcaacgaaacccccggcggguacugccugacacgguggaugcugaucgaggcugagcucaaauguuuuggaaauacggccguggcuaagugcaacgaaaaacaugacgaggaguucugcgauaugcugcgccuuuuugacuucuguaagcaggccauuagacggcugaaaaccgaagcgcagaugagcauccagcucauuaauaaggccguuaacgcucugaucaaugaucaacuuauuaugaagaaccaucugcgcgacaucaugggcaucccuuauugcaauuacucuaaauauugguaccucaaccacacagugaccgggaagacaucccugcccagauguuggcuggucagcaauggaucuuaccucaacgaaacccacuucagcgacgauauugagcagcaggccgacaauaugaucacggagcugcuucaaaaagaauauauggaucggcagggcaagacaccucuggggcucguggaccuguuuguguucuccaccucuuuuuaccugauuagcaucuuccuucaccucguccgcauuccgacccauagacacguuaucggaaaacccugcccuaagccccaucggcugaaccacaugggcauuuguuccugcggccuguauaaacacccuggggugcccgugaaguggaagcgcugaggacuagucccuguucccagagcccacuuuuuuuucuuuuuuugaaauaaaauagccugucuuucagaucucaaaggcucuuuucagagccaccaaaaaaaaaaaaaaaaaaaaaaaaaaaaaaaaaaaaaaaaaaaaaaaaaaaaaaaaaaaaaaaaagaauu

SEQ ID NO: 36786 - RNA, 1714 nt, Artificial Sequence
  mRNA product Design a-1 (hSL-A64-N5) comprising derived and/or modified sequence from LASV(Lassa virus/H.sapiens-wt/NGA/2018/ISTH_0959;Clade II)__AVV65099__GPCmut10 (opt5)
aggagagucccgcagucggcguccagcggcucugcuuguucgugugugugucguugcaggccuuauucaagcuuaccaugggccagaucauuaccuucuuucaagaggugccccacgucaucgaagagguuaugaacauugugcugaucgcccucagccugcuugcuauucugaaggggaucuacaauguggucacaugcggacucuucggccugguguccuuucuucugcucugugggagaucuugcagcacgaccuauaaaggaguuuacgaacugcagacacuggagcucgacauggccucccugaacauguguaugccucuuucuugcaccaagaauaacagccaucacuauaucauggugggcaaugaaacagggcuggagcucacccugacaaacaccuccauuaucaaucauaaauucuguaaccuuucugaugcgcacaagaaaaaucuguacgaccaugcucucaugagcauuaucuccacguuucaccugagcauuccgaacuucaaucaguaugaggccaugucuugcgauuuuaacggaggcaagaucuccguccaguacaaucugagccacgccuaugcuauugacgccgcuaaccauuguggcaccaucgccaauggggugcuccaaacauucaugcggauggcguggggaggcucuuacaucgcccuggauuccgggaagggaagcugggacugcauuaugaccucuuaccaguaucuuaucauucagaacacaaccugggaagaucacugucaguuuucccgccccagcccuaucggcuaccuggggcuccugucccaaagaacgcgggacauuuauaucucucgcagacuucugggaacauucaccuggacacucagcgauuccgagggcaacgaaacccccggcggguacugccugacccgguggaugcugaucgaggcugagcucaaauguuuuggaaauacagccguugcuaagugcaacgaaaaacaugacgaggaguucugcgauaugcugcgccuuuuugacuucuguaagcaggccauuagacggcugaaaacggaagcgcagaugagcauccagcucauuaauaaggccgugaacgcucugaucaaugaucaacuuauuaugaagaaccaucugcgcgacaucaugggcaucccuuauugcaauuacucuaaauauugguaccucaaccacaccgucacagggaagaccucccugcccagauguuggcuggugagcaauggaucuuaccucaacgaaacacacuucagcgacgauauugagcagcaggccgacaauaugaucaccgagcugcuucaaaaagaauauauugaucggcagggcaagacgccucuggggcucguggaccuguuugucuucuccacaucuuuuuaccugaucagcauuuuccuucaccucguuaaaaucccgacccaucgccacgugauuggaaagcccugcccuaaaccccauagacugaaccacaugggcaucuguuccugcggccuguauaagcacccuggggugcccgucaaguggaaacggugaggacuagucccuguucccagagcccacuuuuuuuucuuuuuuugaaauaaaauagccugucuuucagaucucaaaggcucuuuucagagccaccaaaaaaaaaaaaaaaaaaaaaaaaaaaaaaaaaaaaaaaaaaaaaaaaaaaaaaaaaaaaaaaaagaauu

SEQ ID NO: 36787 - RNA, 1714 nt, Artificial Sequence
  mRNA product Design a-1 (hSL-A64-N5) comprising derived and/or modified sequence from LASV(LASV003-NIG-2008;Clade II)__AIT17580__GPCmut10 (opt5)
aggagagucccgcagucggcguccagcggcucugcuuguucgugugugugucguugcaggccuuauucaagcuuaccaugggccagaucauuaccuucuuucaagaggugccccacgucaucgaagagguuaugaacauugugcugaucgcccucagccugcuugcuauucugaaggggaucuacaauguggccacaugcggacucuucggccuggucuccuuucuucugcucugugggagaucuugcagcacgaccuauaaaggaguguacgaacugcagacacuggagcucgacauggcgucccugaacauguguaugccucuuucuugcaccaagaauaacagccaucacuauaucaugguuggcaaugaaacagggcuggagcucacccugacaaacaccuccauuaucaaucauaaauucuguaaccuuucugaugcucacaagaaaaaucuguacgaccaugcccucaugagcauuaucuccacguuucaccugagcauuccgaacuucaaucaguaugaggccaugucuugcgauuuuaacggaggcaagaucuccgugcaguacaaucugagccacaccuaugcugucgacgccgcuaaccauuguggcacaauugccaauggggugcuccaaaccuucaugcggauggcguggggaggcucuuacaucgcccuggauuccgggaagggaagcugggacugcaucaugacaucuuaccaguaucuuauuauccagaacaccacgugggaagaucacugucaguuuucccgccccagcccuauuggcuaccuggggcuccugucccaaagaacacgggacaucuauauuucucgcagacuucugggaaccuucacauggacccucagcgauuccgagagcaacgaaacccccggcggcuacugccugacacgguggaugcugaucgaggcugagcucaaauguuuugggaauacggccguugcuaagugcaacgaaaaacaugacgaggaguucugcgauaugcugcgccuuuuugacuucuguaagcaggccaucagacggcugaaagcggaagcccagaugucuauucagcucaucaauaaggcugugaacgcccugauuaaugaucaacuuaucaugaagaaccaucugcgcgacauuaugggaaucccuuauugcaauuacuccaaauauugguaccucaaccacaccgucacaggcagaaccagccugccccgguguuggcuggugucuaaugggagcuaccucaacgaaacacacuucuccgacgauaucgagcagcaggcugacaauaugauuaccgagcugcuucaaaaggaauauauggaucgccagggaaaaacgccucugggccucguggaccuguuugucuucucuaccagcuuuuaccugaucuccauuuuccuucaccucguuaagaucccgacacauagacacgugauugggaaacccugcccuaagccccaucggcugaaccacaugggaaucuguagcugcggccuguauaaacacccuggcgugcccgucaaguggaagcgcugaggacuagucccuguucccagagcccacuuuuuuuucuuuuuuugaaauaaaauagccugucuuucagaucucaaaggcucuuuucagagccaccaaaaaaaaaaaaaaaaaaaaaaaaaaaaaaaaaaaaaaaaaaaaaaaaaaaaaaaaaaaaaaaaagaauu

SEQ ID NO: 36788 - RNA, 1714 nt, Artificial Sequence
  mRNA product Design a-1 (hSL-A64-N5) comprising derived and/or modified sequence from LASV(LASV035-NIG-2009;Clade II)__AIT17588__GPCmut10 (opt5)
aggagagucccgcagucggcguccagcggcucugcuuguucgugugugugucguugcaggccuuauucaagcuuaccaugggccagaucauuaccuucuuucaagaggugccccacgucaucgaagagguuaugaacauugugcugaucgcccucagccugcuugcuauucugaaggggaucuacaauguggccacaugcggacucuucggccuggucuccuuucuucugcucugugggagaucuugcagcacgaccuauaaaggaguguacgaacugcagacacuggagcucgacauggcgucccugaacauguguaugccucuuucuugcaccaagaauaacagccaucacuauaucaugguuggcaaugaaacagggcuggagcucacccugacaaacaccuccauuaucaaucauaaauucuguaaccuuucugaugcucacaagaaaaaucuguacgaccaugcccucaugagcauuaucuccacguuucaccugagcauuccgaacuucaaucaguaugaggccaugucuugcgauuuuaacggaggcaagaucuccgugcaguacaaucugagccacgcuuaugccgucgacgcugccaaccauuguggcaccauugcgaauggggugcuccaaacauucaugcggauggccuggggaggcucuuacaucgcucuggauuccgggaagggaagcugggacugcaucaugaccucuuaccaguaucuuauuauccagaacacaaccugggaagaucacugucaguuuucccgccccagcccuauuggcuaccuggggcuccugucccaaagaacgcgggacaucuauauuucucgcagacuucugggaacauucaccuggacacucagcgauuccgagggcaacgaaacccccggcggguacugccugacccgguggaugcugaucgaggccgagcucaaauguuuuggaaauacagcuguugccaagugcaacgaaaaacaugacgaggaguucugcgauaugcugcgccuuuuugacuucuguaagcaggcgaucagacggcugaaagccgaagcucagaugagcauucagcucaucaauaaggccgugaacgcucugauuaaugaucaacuuaucaugaagaaccaucugcgcgacauuaugggcaucccuuauugcaauuacucuaaauauugguaccucaaccacacggucaccgggaagacaucccugcccagauguuggcuggugagcaauggaucuuaccucaacgaaacccacuucagcgacgauaucgagcagcaggccgacaauaugauuacagagcugcuucaaaaagaauauaucgaucggcagggcaagaccccucuggggcucguggaccuguuugucuucuccacgucuuuuuaccugauuagcaucuuccuucaccucguuaaaauuccgacacaucgccacgugaucggaaagcccugcccuaaaccccauagacugaaccacaugggcauuuguuccugcggccuguauaagcacccuggggugcccgucaaguggaaacggugaggacuagucccuguucccagagcccacuuuuuuuucuuuuuuugaaauaaaauagccugucuuucagaucucaaaggcucuuuucagagccaccaaaaaaaaaaaaaaaaaaaaaaaaaaaaaaaaaaaaaaaaaaaaaaaaaaaaaaaaaaaaaaaaagaauu

SEQ ID NO: 36789 - RNA, 1714 nt, Artificial Sequence
  mRNA product Design a-1 (hSL-A64-N5) comprising derived and/or modified sequence from LASV(LASV1000-NIG-2009;Clade II)__AIT17782__GPCmut10 (opt5)
aggagagucccgcagucggcguccagcggcucugcuuguucgugugugugucguugcaggccuuauucaagcuuaccaugggccagaucauuaccuucuuucaagaggugccccacgucaucgaagagguuaugaacauugugcugaucgcccucagccugcuugcuauucugaaggggaucuacaauguggccacaugcggacucuucggccuggucuccuuucuucugcucugugggagaucuugcagcacgaccuauaaaggaguguacgaacugcagacacuggagcucgacauggcgucccugaacauguguaugccucuuucuugcaccaagaauaacagccaucacuauaucaugguuggcaaugaaacagggcuggagcucacccugacaaacaccuccauuaucaaucauaaauucuguaaccuuucugaugcucacaagaaaaaucuguacgaccaugcccucaugagcauuaucuccacguuucaccugagcauuccgaacuucaaucaguaugaggccaugucuugcgauuuuaacggaggcaagaucuccgugcaguacaaucugagccacaccuaugcugucgacgccgcuaaccauuguggcacaauugccaauggggugcuccaaaccuucaugcggauggcguggggaggcucuuacaucgcccuggauuccgggaagggaagcugggacugcaucaugacaucuuaccaguaucuuauuauccagaacaccacgugggaagaucacugucaguuuucccgccccagcccuauuggcuaccuggggcuccugucccaaagaacacgggacaucuauauuucucgcagacuucugggaaccuucacauggacccucagcgauuccgagggcaacgaaacccccggcggguacugccugacacgguggaugcugaucgaggcugagcucaaauguuuuggaaauacggccguugcuaagugcaacgaaaaacaugacgaggaguucugcgauaugcugcgccuuuuugacuucuguaagcaggccaucaaaagacugaagaccgaagcgcagaugagcauucagcucaucaauaaggccgugaacgcucugauuaaugaucaacuuaucaugaaaaaccaucugcgggacauuaugggcaucccuuauugcaauuacucuaaguauugguaccucaaccacacagucaccgggaaaacaucccugccccgcuguuggcuggugagcaauggaucuuaccucaacgaaacccacuucagcgacgauaucgagcagcaggccgacaauaugauuacggagcugcuucaaaaggaauauaucgauagacagggcaaaacaccucuggggcucguggaccuguuugucuucuccaccucuuuuuaccugauuagcaucuuccuucaccucguuaagauuccgacccaucggcacguggugggaaaacccugcccuaagccccaucgccugaaccacaugggcaucuguuccugcggccuguauaagcacccugggguccccgugaaauggaagagaugaggacuagucccuguucccagagcccacuuuuuuuucuuuuuuugaaauaaaauagccugucuuucagaucucaaaggcucuuuucagagccaccaaaaaaaaaaaaaaaaaaaaaaaaaaaaaaaaaaaaaaaaaaaaaaaaaaaaaaaaaaaaaaaaagaauu

SEQ ID NO: 36790 - RNA, 1714 nt, Artificial Sequence
  mRNA product Design a-1 (hSL-A64-N5) comprising derived and/or modified sequence from LASV(LASV221-NIG-2010;Clade II)__AIT17624__GPCmut10 (opt5)
aggagagucccgcagucggcguccagcggcucugcuuguucgugugugugucguugcaggccuuauucaagcuuaccaugggccagaucauuaccuucuuucaagaggugccccacgucaucgaagagguuaugaacauugugcugaucgcccucagccugcuugcuauucugaaggggaucuacaauguggccacaugcggacucuucggccuggucuccuuucuucugcucugugggagaucuugcagcacgaccuauaaaggaguguacgaacugcagacacuggagcucgacauggcgucccugaacauguguaugccucuuucuugcaccaagaauaacagccaucacuauaucaugguuggcaaugaaacagggcuggagcucacccugacaaacaccuccauuaucaaucauaaauucuguaaccuuucugaugcucacaagaaaaaucuguacgaccaugcccucaugagcauuaucuccacguuucaccugagcauuccgaacuucaaucaguaugaggccaugucuugcgauuuuaacggaggcaagaucuccgugcaguacaaucugagccacaccuaugcuauugacgccgcuaaccauuguggcacaaucgccaaugggguccuccaaaccuucaugcggauggcguggggaggcucuuacaucgcccuggauuccgggaagggaagcugggacugcauuaugacaucuuaccaguaucuuaucauucagaacaccacgugggaagaucacugucaguuuucccgccccagcccuaucggcuaccuggggcuccugucccaaagaacacgggacauuuauaucucucgcagacuucugggaaccuucacauggacccucagcgauuccgagggcaacgaaacccccggcggguacugccugacacgguggaugcugaucgaggcugagcucaaauguuuuggaaauacggccguggcuaagugcaacgaaaaacaugacgaggaguucugcgauaugcugcgccuuuuugacuucuguaagcaggccauuagacggcugaaaaccgaagcgcagaugagcauccagcucauuaauaaggccguuaacgcucugaucaaugaucaacuuauuaugaagaaccaucugcgcgacaucaugggcaucccuuauugcaauuacucuaaauauugguaccucaaccacacagugaccgggaagacaucccugcccagauguuggcuggucagcaauggaucuuaccucaacgaaacccacuucagcgacgauauugagcagcaggccgacaauaugaucacggagaugcugcaaaaagaauauauggaucggcagggcaagacaccucuugggcugguggaccucuuuguguucuccaccucuuuuuaccugauuagcaucuuccugcaccuugucaaaauuccgacccaucgccacguuaucggaaagcccugcccuaaaccccauagacucaaccacaugggcauuuguuccugcggccuguauaagcacccuggggugcccgugaaguggaaacggugaggacuagucccuguucccagagcccacuuuuuuuucuuuuuuugaaauaaaauagccugucuuucagaucucaaaggcucuuuucagagccaccaaaaaaaaaaaaaaaaaaaaaaaaaaaaaaaaaaaaaaaaaaaaaaaaaaaaaaaaaaaaaaaaagaauu

SEQ ID NO: 36791 - RNA, 1714 nt, Artificial Sequence
  mRNA product Design a-1 (hSL-A64-N5) comprising derived and/or modified sequence from LASV(LASV237-NIG-2010;Clade II)__AIT17638__GPCmut10 (opt5)
aggagagucccgcagucggcguccagcggcucugcuuguucgugugugugucguugcaggccuuauucaagcuuaccaugggccagaucauuaccuucuuucaagaggugccccacgucaucgaagagguuaugaacauugugcugaucgcccucagccugcuugcuauucugaaggggaucuacaauguggccacaugcggacucuucggccuggucuccuuucuucugcucugugggagaucuugcagcacgaccuauaaaggaguguacgaacugcagacacuggagcucgacauggcgucccugaacauguguaugccucuuucuugcaccaagaauaacagccaucacuauaucaugguuggcaaugaaacagggcuggagcucacccugacaaacaccuccauuaucaaucauaaauucuguaaccuuucugaugcucacaagaaagaccuguacgaucaugcccucaugagcauuaucuccacguuucaccugagcauuccgaauuucaaccaguaugaggccaugucuugcgacuuuaauggaggcaagaucuccgugcaguacaaccugagccacaccuaugcugucgaugccgcuaaucauuguggcacaauugccaacggggugcuccaaaccuucaugcggauggcguggggaggcucuuacaucgcccuggacuccgggaagggaagcugggauugcaucaugacaucuuaccaguaucuuauuauccagaauaccacgugggaagaccacugucaguuuucccgccccagcccuauuggcuaccuggggcuccugucccaaagaacacgggauaucuauauuucucgcagacuucugggaaccuucacauggacccucagcgacuccgagggcaacgaaacccccggcggguacugccugacacgguggaugcugaucgaggcugagcucaaauguuuuggaaacacggccguugcuaagugcaaugaaaaacaugaugaggaguucugcgacaugcugcgccuuuuugauuucuguaagcaggccaucagacggcugaaaaccgaagcgcagaugagcauucagcucaucaacaaggccgugaaugcucugauuaacgaccaacuuaucaugaagaaucaucugcgcgacauuaugggcaucccuuauugcaacuacucuaaauauugguaccucaaucacacagucaccgggaagacaucccugcccagauguuggcuggugagcaacggaucuuaccucaaugaaacccacuucagcgaugacaucgagcagcaggccgauaacaugauuacggagcugcuucaaaaagaauauauggaccggcagggcaagacaccucuggggcucguggaucuguuugucuucuccaccucuuuuuaccugaucagcauuuuccuucaccucaucaaaauuccgacccaucgccacaucacaggaaagcccugcccuaaaccccauagacugaaucacaugggcauuuguuccugcggccuguauaagcacccugggguucccgugaaguggaaacggugaggacuagucccuguucccagagcccacuuuuuuuucuuuuuuugaaauaaaauagccugucuuucagaucucaaaggcucuuuucagagccaccaaaaaaaaaaaaaaaaaaaaaaaaaaaaaaaaaaaaaaaaaaaaaaaaaaaaaaaaaaaaaaaaagaauu

SEQ ID NO: 36792 - RNA, 1714 nt, Artificial Sequence
  mRNA product Design a-1 (hSL-A64-N5) comprising derived and/or modified sequence from LASV(LASV253-NIG-2011;Clade II)__AIT17670__GPCmut10 (opt5)
aggagagucccgcagucggcguccagcggcucugcuuguucgugugugugucguugcaggccuuauucaagcuuaccaugggccagaucauuaccuucuuucaagaggugccccacgucaucgaagagguuaugaacauugugcugaucgcccucagccugcuugcuauucugaaggggaucuacaauguggccacaugcggacucuucggccuggucuccuuucuucugcucugugggagaucuugcagcacgaccuauaaaggaguguacgaacugcagacacuggagcucgacauggcgucccugaacauguguaugccucuuucuugcaccaagaauaacagccaucacuauaucaugguuggcaaugaaacagggcuggagcucacccugacaaacaccuccauuaucaaucauaaauucuguaaccuuucugaugcucacaagaaaaaucuguacgaccaugcccucaugagcauuaucuccacguuucaccugagcauuccgaacuucaaucaguaugaggccaugucuugcgauuuuaacggaggcaagaucuccgugcaguacaaucugagccacaccuaugcugucgacgccgcuaaccauuguggcacaauugccaauggggugcuccaaaccuucaugcggauggcguggggaggcucuuacaucgcccuggauuccgggaagggaagcugggacugcaucaugacaucuuaccaguaucuuauuauccagaacaccacgugggaagaucacugucaguuuucccgccccagcccuauuggcuaccuggggcuccugucccaaagaacacgggacaucuauauuucucgcagacuucugggaaccuucacauggacccucagcgauuccgagggcaacgaaacccccggcggguacugccugacacgguggaugcugaucgaggcugagcucaaauguuuuggaaauacggccguugcuaagugcaacgaaaaacaugacgaggaguucugcgauaugcugcgccuuuuugacuucuguaagcaggccaucagacggcugaaagcggaagcccagaugagcauucagcucaucaauaaggcugugaacgcccugauuaaugaucaacuuaucaugaagaaccaucugcgcgacauuaugggcaucccuuauugcaauuacucuaaauauugguaccucaaccacaccgucacagggagaaccucccugccccgguguuggcuggugagcaauggaucuuaccucaacgaaacacacuucagcgacgauaucgagcagcaggcugacaauaugauuaccgagcugcuucaaaaggaauauaucgaucgccagggcaaaacgccucuggggcucguggaccuguuugucuucuccacaucuuuuuaccugauuagcaucuuccuucaccucguuaagauuccgacccauagacacaucauuggaaaacccugcccuaagccccaucggcugaaccacaugggcaucuguuccugcggccuguauaaacacccuggggugcccgugaaguggaagcgcugaggacuagucccuguucccagagcccacuuuuuuuucuuuuuuugaaauaaaauagccugucuuucagaucucaaaggcucuuuucagagccaccaaaaaaaaaaaaaaaaaaaaaaaaaaaaaaaaaaaaaaaaaaaaaaaaaaaaaaaaaaaaaaaaagaauu

SEQ ID NO: 36793 - RNA, 1714 nt, Artificial Sequence
  mRNA product Design a-1 (hSL-A64-N5) comprising derived and/or modified sequence from LASV(LASV254-NIG-2011;Clade II)__AIT17674__GPCmut10 (opt5)
aggagagucccgcagucggcguccagcggcucugcuuguucgugugugugucguugcaggccuuauucaagcuuaccaugggccagaucauuaccuucuuucaagaggugccccacgucaucgaagagguuaugaacauugugcugaucgcccucagccugcuugcuauucugaaggggaucuacaauguggccacaugcggacucuucggccuggucuccuuucuucugcucugugggagaucuugcagcacgaccuauaaaggaguguacgaacugcagacacuggagcucgacaugaccaaccugaauauguguaugccucuuuccugcacaaagaacaauucucaucacuauaucaugguuggcaacgaaaccgggcuggagcucacacugaccaauacgagcauuaucaaccauaaauucuguaaucuuuccgaugcgcacaagaaaaaccuguacaaucaugcucucaugucuauuaucagcaccuuucaccuguccauuccgaacuucaaucaguaugaggccaugagcugcgacuuuaacggaggcaagaucucugugcaguacaaucugucccacagcuaugccgucgaugcugccaaccauuguggcacaauugcuaacggggugcuccaaaccuucaugcggauggccuggggaggcucuuacaucgcgcuggacuccgggaagggaaauugggauugcaucaugacaagcuaccaguaucuuauuauccagaacaccacgugggaagaccacugucaguuuucucgccccuccccuauuggcuaccuggggcuccugagccaaagaacacgggauaucuauauuucccgcagacuucugggaaccuucacauggacccucucugacagcgagggcaaugaaacccccggcggguacugccugacacgguggaugcugaucgaggccgagcucaaauguuuuggaaacacggcuguugccaagugcaaugaaaaacaugaugaggaguucugcgacaugcugcgccuuuuugauuucuguaagcaggcuaucagacggcugaaaaccgaagcccaggcgaacauucagcucaucaauaaggccgugaacgcucugauuaaugaccaacuuaucaugaagaaccaucugcgcgauauuaugggcaucccuuauugcaauuacuccaaauauugguaccucaaccacacagucaccgggaagacaagccugcccagauguuggcuggugucuaauggauccuaccucaacgaaacccacuucagcgacgacaucgagcagcaggccgauaauaugauuacggagcugcuucaaaaagaauauauggaccggcagggcaagacaccucuggggcucguggaucuguuugucuucucuaccagcuuuuaccugaucuccauuuuccuucaccucguuaaaaucccgacccaucgccacgugauuggaaagcccugcccuaaaccccauagacugaaccacaugggcaucuguucuugcggccuguauaagcacccuggggugcccgucaaguggaaacggugaggacuagucccuguucccagagcccacuuuuuuuucuuuuuuugaaauaaaauagccugucuuucagaucucaaaggcucuuuucagagccaccaaaaaaaaaaaaaaaaaaaaaaaaaaaaaaaaaaaaaaaaaaaaaaaaaaaaaaaaaaaaaaaaagaauu

SEQ ID NO: 36794 - RNA, 1714 nt, Artificial Sequence
  mRNA product Design a-1 (hSL-A64-N5) comprising derived and/or modified sequence from LASV(Nig08-A19;Clade III)__ADU56618__GPCmut10 (opt5)
aggagagucccgcagucggcguccagcggcucugcuuguucgugugugugucguugcaggccuuauucaagcuuaccaugggccagaucgugaccuucuuucaagaggucccccacguuauugaagaggugaugaacaucgugcugauugcccucagcauccuggcuauucuuaaggggcuguacaauaucgccacaugcggacucaucggccuggucacguuccuucugcucuccgggagaucuuguagcaugaccuauaaaggaguguacgaacugcagacacuggagcucaacaugaauacccugaacaugugcaugccucuuuccuguacaaagaauaacucucaucacuauauuaugguuggcaaugaaaccgggcuggagcucacacugaccaacacgagccuucugcaucacaaauuuugcaaucucuccgacgcgcauaagaaaaaccuguacgaucacacccugaugucuaucauuagcacauuccaccucuccaucccgaauuuuaaccaguaugaggcuaugagcugugacuucaauggaggcaagauuaccgugcaguacaaccugucucauuccuaugccaucgaugccgcuaaucacugcggcacagucgccaacggggugcuucaaaccuuuaugcggauggcuuggggaggcagcuacauugcccuggacucugggcgcggaaagugggauuguaucaugacguccuaccaguaucucaucauucagaacacaaccugggaagaccauugccaguucagcagacccucuccuaucggcuaccuggggcuucugucccaacggacacgcgauauuuauaucagcagacggcuccugggaaccuuuaccuggacacuguccgacucugagggcaaugaaacgcccggcggguacugucucacccgcuggaugcugauugaggcggagcuuaaaugcuucggaaacacagccguugcuaaguguaaugaaaaacacgaugaggaauuuugcgacaugcugagacucuucgauuuuugcaagcaggccauccggcgccugaaagcugaggcccagaugagcauccagcuuauuaacaaggcggugaaugcccugaucaacgaccaacucauuaugaagaaucaccugagagauaucaugggcauuccuuauuguaacuacuccaaauauugguaccugaaucauaccagcacagggcggaccucucucccccgcugcuggcuggucuccaacggaagcuaccuuaaugaaacgcacuucucugacgacaucgagcagcaggcugauaacaugaucacagagaugcugcaaaaggaauaucucgacagacagggcaaaaccccucuggggcugguggaucuuuucguguuuagcaccuccuucuaccucauuucuaucuuucugcaucuggucaagauuccgacacaccggcauaucguuggaaaacccuguccuaagccccaccgccucaaucacaugggcauuugcagcuguggccuguauaaacagccuggggugcccgugagauggaagcggugaggacuagucccuguucccagagcccacuuuuuuuucuuuuuuugaaauaaaauagccugucuuucagaucucaaaggcucuuuucagagccaccaaaaaaaaaaaaaaaaaaaaaaaaaaaaaaaaaaaaaaaaaaaaaaaaaaaaaaaaaaaaaaaaagaauu

SEQ ID NO: 36795 - RNA, 1717 nt, Artificial Sequence
  mRNA product Design a-1 (hSL-A64-N5) comprising derived and/or modified sequence from LASV(G1180-SLE-2010;Clade IV)__AIT17168__GPCmut10 (opt5)
aggagagucccgcagucggcguccagcggcucugcuuguucgugugugugucguugcaggccuuauucaagcuuaccaugggccagaucgugaccuucuuucaagaggucccccacguuauugaagaggugaugaacaucgugcugauugcccucagcauccuggcuguccuuaaggggcuguacaauuucgccacaugcggacucgugggccugcuuacguuucugcuccugugugggagauccugcaccgcgucucgguauaaaggaguuuacgaacugcagacacucgagcugaacauggaaacccuuaauauguguaugccucugagcugcacaaagaacaauucccaucacuauauuauggugggcaacgagaccgggcucgagcugacacuuaccaauacgucuaucaucaaccauaaauucuguaaucugagcgacgcucacaagaaaaaccucuacgaucaugcccugauguccauuaucucuaccuuucaccugagcauuccgaauuucaaccaguaugaagccauguccugcgacuuuaauggaggcaagaucagcguccaguacaaccucucucacuccuaugcuggcgaugccgcuaaucauugugggacaguggccaacggaguucugcaaaccuucaugcgcauggcguggggcgggagcuacauugcccuugacucuggacacggcuccugggauugcaucaugacaagcuaccaguaucugauuauccagaacaccacgugggaggaccauugucaguuuucuagacccuccccuaucggguaccucggacugcuuagccaacggacacgcgauauuuauaucuccagacggcugcucggcaccuucacauggacccugucugacagcgaaggcaaggauacccccgggggauacugccugacacgcuggaugcucauugaggcugagcugaaauguuuuggcaauacggccguggcuaagugcaacgaaaaacacgacgaggaguucugcgauaugcuuagacuguuugacuucuguaagcaggccauccagcggcucaaagcggaagcccagauguccauucaacugaucaauaaggcugucaacgcccuuaucaaugaucagcugauuaugaagaaccaccuccgcgacaucauggggauuccuuauugcaauuacagcaaauauugguaccugaaccauaccacaaccggaaagacaucucugcccaaauguuggcucguguccaauggcagcuaccugaacgaaacccacuucucugacgauaucgagcagcaagcugacaauaugauuacggagaugcuucagaaggaauauauggagagacaggggaaaacaccucugggacucguggaucuguuugucuucagcaccuccuuuuaccugaucucuaucuuccuucaucucguuaagauuccgacccaccggcauaucgugggcaaaagcugccccaagccucaccgccugaaccacaugggcauuuguuccugcgggcuguauaagcagcccggagugccugucaaauggaagagaugaggacuagucccuguucccagagcccacuuuuuuuucuuuuuuugaaauaaaauagccugucuuucagaucucaaaggcucuuuucagagccaccaaaaaaaaaaaaaaaaaaaaaaaaaaaaaaaaaaaaaaaaaaaaaaaaaaaaaaaaaaaaaaaaagaauu

SEQ ID NO: 36796 - RNA, 1717 nt, Artificial Sequence
  mRNA product Design a-1 (hSL-A64-N5) comprising derived and/or modified sequence from LASV(G1442-SLE-2011;Clade IV)__AIT17180__GPCmut10 (opt5)
aggagagucccgcagucggcguccagcggcucugcuuguucgugugugugucguugcaggccuuauucaagcuuaccaugggccagaucgugaccuucuuucaagaggucccccacguuauugaagaggugaugaacaucgugcugauugcccucagcauccuggcuguccuuaaggggcuguacaauguggccacaugcggacucauuggccugguuacguuccuucugcucugugggagauccugcaccacaacccuguauaaaggaguguacgaacugcagacacucgagcugaacauggaaacccuuaauauguguaugccucugucuugcacaaagaacaauagccaucacuauauccgggucggcaacgagaccgggcucgagcugacgcuuaccaauacauccaucauuaaccauaaauuuuguaaucugucugacgcgcacaagaaaaaccucuacgaucaugcucugaugagcaucauuuccaccuuccaccugucuaucccgaauuuuaaccaguaugaagccaugagcugcgacuucaauggaggcaagauuuccgugcaguacaaccucagccacucuuaugccggcgaugcugccaaucauugugggacaguugcuaacggagugcugcaaaccuuuaugcgcauggccuggggcggguccuacaucgcgcuugacagcggaagaggcaacugggauugcauuaugacgucuuaccaguaucugaucauccagaauacaaccugggacgaucacugucaguucucccggcccagcccuauuggguaccucggacugcuuucucaacgcacaagagacgucuauaucucccggcgccugcucggcaccuuuaccuggacacugagcgauuccgagggcaaggacacgcccgggggauacugccugaccagauggaugcucauugaagccgagcugaaauguuucggcaacacagcuguggccaagugcaaugagaaacaugaugaagaguuuugcgacaugcuucggcuguucgauuuuuguaagcaggcuauccagcgccucaaagccgaagcgcagaugucuauucaacugaucaacaaggccgugaaugcucuuaucaacgaccagcugauuaugaagaaucaccucagagacaucauggggauuccuuauugcaacuacagcaaauauugguaccugaauaacaccgccacaggaaagaccucccugcccaaauguuggcucaucagcaauggcucuuaccugaacgagacgcacuucuccgaugacauugaacaggaggcugauaauaugaucacagagaugcuucaaaaggaauauauggagcggcaggggaaaaccccucugggacucgucgaccuguucguuuuuagcaccucuuucuaccugaucagcauuuuucuucaucucgugaagaucccgacacaccgccauauugugggcaaauccugccccaagccucacagacugaaccauaugggcaucuguucuugcgggcuguauaagcagcccggagucccugugcgguggaaacgcugaggacuagucccuguucccagagcccacuuuuuuuucuuuuuuugaaauaaaauagccugucuuucagaucucaaaggcucuuuucagagccaccaaaaaaaaaaaaaaaaaaaaaaaaaaaaaaaaaaaaaaaaaaaaaaaaaaaaaaaaaaaaaaaaagaauu

SEQ ID NO: 36797 - RNA, 1717 nt, Artificial Sequence
  mRNA product Design a-1 (hSL-A64-N5) comprising derived and/or modified sequence from LASV(G3010-SLE-2013;Clade IV)__AIT17344__GPCmut10 (opt5)
aggagagucccgcagucggcguccagcggcucugcuuguucgugugugugucguugcaggccuuauucaagcuuaccaugggccagaucgugaccuucuuucaagaggucccccacguuauugaagaggugaugaacaucgugcugauugcccucagcauccuggcuguccuuaaggggcuguacaauuucgccacaugcggacucgugggccugguuacguuucuucugcucugugggagauccugcaccacaucucuguauaaaggaguguacgaacugcagacccucgagcugaacauggaaacacuuaauauguguaugccucugagcugcaccaagaacaauucccaucacuauauuauggucggcaacgagacagggcucgagcugacccuuacgaauaccucuaucaucaaccauaaauucuguaaucugagcgacgcgcacaagaaaaaccucuacaaucaugcucugauguccauuaucucuacauuucaccugagcauuccgaacuucaaucaguaugaagccauguccugcgauuuuaacggaggcaagaucagcgugcaguacaaucucucucacuccuaugccggcgacgcugccagccauugugggaccguugcuaacggagugcugcaaacauucaugcggauggccuggggcgggucuuacauugcgcuugauuccggauacggcaagugggacugcaucaugaccagcuaucaguaccugauuauccagaacacgacaugggaggaucacugucaguuuucucgccccuccccuaucggguaucucggacugcuuagccaaagaacccgggacauuuacaucucccgcagacugcucggcacauucaccuggacccugucugauagcgaaggcaaagacacacccgggggauauugccugacgcgguggaugcucauugaggccgagcugaaguguuuuggcaauaccgcugucgccaaaugcaacgaaaagcaugaugaggaguucugcgacaugcuucgccuguuugauuucuguaaacaggcuauccagagacucaagacagaagcccagauguccauucaacugaucaauaaggcggugaacgcccuuaucaaugaccagcugauuaugaaaaaccaccuccgggauaucauggggauuccuuacugcaauuauagcaaguacugguaccugaaccacaccacaaccggaaaaacgucucugcccaaguguuggcucguguccaauggcagcuaucugaacgaaacacauuucucugacgacaucgagcagcaagcugauaauaugauuaccgagaugcuucagaaagaauacauggagcgccaggggaagaccccucugggacucgucgaccuguuuguuuucagcacauccuuuuaucugaucucuaucuuccuucaccucgugaaaauuccgacccauagacacaucgugggcaagagcugccccaagccucaucggcugaaccacaugggcauuuguuccugcgggcuguacaaacagcccggagucccugugcgcuggaagagaugaggacuagucccuguucccagagcccacuuuuuuuucuuuuuuugaaauaaaauagccugucuuucagaucucaaaggcucuuuucagagccaccaaaaaaaaaaaaaaaaaaaaaaaaaaaaaaaaaaaaaaaaaaaaaaaaaaaaaaaaaaaaaaaaagaauu

SEQ ID NO: 36798 - RNA, 1717 nt, Artificial Sequence
  mRNA product Design a-1 (hSL-A64-N5) comprising derived and/or modified sequence from LASV(G502-SLE-2009;Clade IV)__AIT17126__GPCmut10 (opt5)
aggagagucccgcagucggcguccagcggcucugcuuguucgugugugugucguugcaggccuuauucaagcuuaccaugggccagaucgugaccuucuuucaagaggucccccacguuauugaagaggugaugaacaucgugcugauugcccucagcauccuggcuguccuuaaggggcuguacaauuucgccacaugcggacucgugggccugcuuacguuucugcuccugugugggagauccugcaccacaggacuguauaaaggcguuuacgaacuccagacccuggagcuuaacauggaaacacugaauauguguaugccucucucuugcaccaagaacaauagccaucacuauauuaugguggggaacgagacaggacuggagcuuacccugacgaauaccuccaucaucaaccauaaauucuguaaucucucugacgcgcacaagaaaaaccuguacgaucaugcucugaugagcauuaucuccacauuucaccucucuauuccgaauuucaaccaguaugaagccaugagcugcgacuuuaauggcggcaagaucuccguccaguacaaccugagccacucuuaugccggggaugcugccgaccauuguggaaccguggcuaauggcguucuucaaacauucaugcggauggccuggggaggguccuacauugcgcuggauagcggccgcgggagaugggacugcaucaugaccucuuaccaguaucucauuauccagaacacgacaugggaggaucacugucaguuuucccggcccagcccuaucggauaccugggccuucugucucaacgcaccagagacauuuauaucucccggcgccuccugggcacauucaccuggacccugagcgauuccgaagggaaggacacacccggaggcuacugccucacgagauggaugcugauugaggccgagcuuaaauguuuugggaacaccgcuguggccaagugcaaugaaaaacaugaugaggaguucugcgacaugcugcggcucuuugauuucuguaagcaggcuauccagcgccugaaagccgaagcgcagaugucuauucaacuuaucaacaaggccgucaaugcucugaucaacgaccagcucgugaugaagaaucaccugagagacauuaugggaaucccuuauugcaacuacagccgguauugguaccugaaucacacaaccacaggccgcaccucccuccccaaauguuggcuggugagcaacgggucuuaccuuaaugaaacgcauuucuccgaugacauugagcagcaagccgauaacaugaucacagagaugcugcagaaggaauauauggagagacagggaaaaaccccucucggccuggucgaccuguuuguuuucagcaccucuuuuuaccuuauuagcaucuuccuccaccuggugaagaucccgacacaucggcacauugugggcaaauccugccccaagccucaucgccugaaucacauggggaucuguucuugcggacucuauaaacagcccggcgucccugugaaguggaagagaugaggacuagucccuguucccagagcccacuuuuuuuucuuuuuuugaaauaaaauagccugucuuucagaucucaaaggcucuuuucagagccaccaaaaaaaaaaaaaaaaaaaaaaaaaaaaaaaaaaaaaaaaaaaaaaaaaaaaaaaaaaaaaaaaagaauu

SEQ ID NO: 36799 - RNA, 1717 nt, Artificial Sequence
  mRNA product Design a-1 (hSL-A64-N5) comprising derived and/or modified sequence from LASV(G733-SLE-2010;Clade IV)__AIT17154__GPCmut10 (opt5)
aggagagucccgcagucggcguccagcggcucugcuuguucgugugugugucguugcaggccuuauucaagcuuaccaugggccagaucgugaccuucuuucaagaggucccccacguuauugaagaggugaugaacaucgugcugauugcccucagcauccuggcuguccuuaaggggcuguacaauuucgccacaugcggaauugugggccucguuuccuuucugcuucugugugggagaucuugcacgaccagccucuauaaaggaguguacgaacugcagacacuggagcucaacauggaaacccugaauauguguaugccucuuuccugcacaaagaacaauucucaucacuauaucauggucggcaacgagaccgggcuggagcucacacugaccaauacgagcaucauuaaccauaaauucuguaaucuuuccgacgcgcacaagaaaaaccuguacgaucaugcucucaugucuaucauuagcaccuuucaccuguccaucccgaauuucaaccaguaugaagccaugagcugcgacuuuaauggaggcaagauuucugugcaguacaaccugucccacagcuaugccggcgaugcugccaaucauugugggacaaucgcuaacggaguucuccaaaccuucaugcggauggccuggggcgggucuuacauugcgcuggacuccggacgcgauagaugggacugcaucaugacaagcuaccaguaucuuaucauucagaacaccacgugggaggaucacugucaguuuucucggcccuccccuaucggcuaccuggggcuccugagccaacgcacaagagacauuuauaucucccggcgccuucugggaaccuucacauggacccucucugauagcgaaggcaaggacacccccggcggguacugccugacaagauggaugcugauugaggccgagcucaaauguuuuggaaauacggcuguggccaagugcaacgaaaaacaugaugaggaguucugcgacaugcugcggcuuuuugauuucuguaagcaggcuauccagcgccugaaagccgaagcgcagauguccauccaacucauuaauaaggccgucaacgcucugaucaaugaccagcuuauuaugaagaaccaccugagagacaucaugggcauuccuuauugcaauuacagcaaauauugguaccucaaccacaccacaaccgggaagacaucucugcccaaauguuggcugguguccaauggaagcuaccucaacgaaacccauuucucugaugacaucgagcagcaagccgauaauaugaucacggagaugcugcagaaggaauauauggagcggcagggcaaaacaccucuugggcugguggaccucuuugucuucagcaccuccuuuuaccugauuucuaucuuccugcaccuuguuaagauuccgacccaucgccacguggugggaaaaagcugccccaagccucauagacucaaccacaugggcaucuguuccugcggccuguaugggcagcccggagucccugugaaguggaaacggugaggacuagucccuguucccagagcccacuuuuuuuucuuuuuuugaaauaaaauagccugucuuucagaucucaaaggcucuuuucagagccaccaaaaaaaaaaaaaaaaaaaaaaaaaaaaaaaaaaaaaaaaaaaaaaaaaaaaaaaaaaaaaaaaagaauu

SEQ ID NO: 36800 - RNA, 1717 nt, Artificial Sequence
  mRNA product Design a-1 (hSL-A64-N5) comprising derived and/or modified sequence from MOPV/LASV reassortant(IGS-1;Clade IV)__AFY05576__GPCmut10 (opt5)
aggagagucccgcagucggcguccagcggcucugcuuguucgugugugugucguugcaggccuuauucaagcuuaccaugggccagaucgugaccuucuuucaagaggucccccacguuauugaagaggugaugaacaucgugcugauugcccucagcguccuggcugugcuuaaggggcuguacaauuucgccacaugcggacucguuggccuggugacguuucuucugcucugugggagauccugcaccacaucucuguauaaaggagucuacgaacugcagacccucgagcugaacauggaaacacuuaauauguguaugccucugagcugcaccaagaacaauucccaucacuauaucauggugggcaacgagacagggcucgagcugacccuuacgaauaccucuauuaucaaccauaaauucuguaaucugagcgacgcgcacaagaaaaaccucuacgaucaugcucugauguccaucauuucuacauuucaccugagcaucccgaauuucaaccaguaugaagccauguccugcgacuuuaauggaggcaagauuagcguucaguacaaccucucucacuccuaugccggcgaugcugccaaucauugugggaccguggcuaacggaguccugcaaacauucaugcggauggccuggggcgggagcuacaucgcgcuugacucuggacgcggcaacugggauugcauuaugaccuccuaccaguaucugaucauucagaauacgacaugggaggaccacugucaguuuagcagacccucuccuaucggguaccucggacugcuuucccaacggacccgcgauaucuauauuagcagacggcugcucggcacauucaccuggacccuguccgacucugaaggcgaggauacacccgggggauacugccugacgcgcuggaugcucaucgaggccgaacugaaguguuuuggcaacaccgcuguggccaaaugcaaugagaagcaugacgaagaguucugcgauaugcuuagacuguuugacuucuguaaacaggcuauucagcggcucaaggccgaagcgcagaugagcauccaacugauuaacaaagccgugaaugcucuuaucaacgaucagcugaucaugaagaaucaccuccgcgacauuauggggaucccuuauugcaacuacuccaaguauugguaccugaaucacacaaccacaggaagaaccagccugcccaaauguuggcucgucucuaacggcuccuaccugaaugagacgcauuucagcgacgauauugagcagcaagccgacaacaugaucacagaaaugcuucagaaggaguauauggaacggcaggggaaaaccccucugggacucguugaucuguuuguguucucuaccagcuuuuaccugauuuccaucuuccuucaccucgugaagaucccgacacaucgccacauugucggcaaaucuugccccaagccucauagacugaaucacaugggcaucuguagcugcgggcuguauaaacagcccggagugccuguuaaguggaagcggugaggacuagucccuguucccagagcccacuuuuuuuucuuuuuuugaaauaaaauagccugucuuucagaucucaaaggcucuuuucagagccaccaaaaaaaaaaaaaaaaaaaaaaaaaaaaaaaaaaaaaaaaaaaaaaaaaaaaaaaaaaaaaaaaagaauu

SEQ ID NO: 36801 - RNA, 1717 nt, Artificial Sequence
  mRNA product Design a-1 (hSL-A64-N5) comprising derived and/or modified sequence from LASV(LM765-SLE-2012;Clade IV)__AIT17814__GPCmut10 (opt5)
aggagagucccgcagucggcguccagcggcucugcuuguucgugugugugucguugcaggccuuauucaagcuuaccaugggccagaucgugaccuucuuucaagaggucccccacguuauugaagaggugaugaacaucgugcugauugcccucagcauccuggcuguccuuaaggggcuguacaauuucgccacaugcggacucgugggccugguuacguuucuucugcucugugggagauccugcaccacaucucuguauaaaggaguguacgaacugcagacccucgagcugaacauggaaacacuuaauauguguaugccucugagcugcaccaagaacaauucccaucacuauauuauggucggcaacgagacagggcucgagcugacccuuacgaauaccucuaucaucgaccauaaauucuguaaccugagcgaugcgcaccggaagaaucucuacgaccaugcucugauguccauuaucucuacauuucaccugagcauuccgaacuucaaucaguaugaagccauguccugcgauuuuaacggaggcaaaaucagcgugcaguacaaucucucucacuccuaugccaaggacgcugccgaucauuguggcaccguugcuaacggggugcugcaaacauucaugcgcauggccuggggaggcagcuacauugcgcuugacucugggagaggacggugggauugcaucaugaccuccuaccaguaucugauuauccagaauacgacaugggaggaccacugucaguuuagccgccccucuccuaucggcuaccucgggcugcuuucccaaagaacccgggauauuuauaucagccgcagacugcucggaacauucaccuggacccuguccgacucugaaggcaaggauacacccggcggguacugccugacgcgguggaugcucauugaggccgagcugaaauguuuuggaaacaccgcugucgccaagugcaacgaaaaacaugacgaggaguucugcgauaugcuucgccuguuugacuucuguaagcaggcuauccagagacucaaagccgaagcgcagaugagcauucaacugaucaauaaggccgugaacgcucuuaucaaugaccagcugauuaugaagaaccaccuccgggauaucaugggcauuccuuauugcaauuacuccaaauauugguaccugaaccacacaaccacagggaagaccagccugcccaaauguuggcucgugucuaauggauccuaccugaacgaaacgcauuucagcgacgauaucgagcagcaagccgacaauaugauuacagagaugcuucagaaggaauauauggagcgccagggcaaaaccccucuggggcucgucgaucuguuuguuuucucuaccagcuuuuaccugaucuccaucuuccuucaccucgugaagauuccgacacauagacacaucgugggaaaacccugcccuaagccccaucggcugaaccacaugggcauuuguucuugcggccuguauaagcagccugggguccccgugaaauggaagcgcugaggacuagucccuguucccagagcccacuuuuuuuucuuuuuuugaaauaaaauagccugucuuucagaucucaaaggcucuuuucagagccaccaaaaaaaaaaaaaaaaaaaaaaaaaaaaaaaaaaaaaaaaaaaaaaaaaaaaaaaaaaaaaaaaagaauu

SEQ ID NO: 36802 - RNA, 1717 nt, Artificial Sequence
  mRNA product Design a-1 (hSL-A64-N5) comprising derived and/or modified sequence from LASV(LM776-SLE-2012;Clade IV)__AIT17824__GPCmut10 (opt5)
aggagagucccgcagucggcguccagcggcucugcuuguucgugugugugucguugcaggccuuauucaagcuuaccaugggccagaucgugaccuucuuucaagaggucccccacguuauugaagaggugaugaacaucgugcugauugcccucagcauccuggcuguccuuaaggggcuguacaauuucgccacaugcggacucgugggccugguuacguuucuucugcucugugggagauccugcaccacaucuguguauaaaggagucuacgaacugcagacccuggagcucaacauggaaacacugaauauguguaugccucuuagcugcaccaagaacaauucccaucacuauauuauggugggcaacgagacagggcuggagcucacccugacgaauaccucuaucaucaaccauaaauucuguaaucuuagcgacgcgcacaagaaaaaccuguacgaucaugcucucauguccauuaucucuacauuucaccugagcauuccgaauuucaaccaguaugaagccauguccugcgacuuuaauggaggcaagaucagcguucaguacaaccugucucacuccuaugccggcgaugcugccaaucauugugggaccguggcuaacggaguccuccaaacauucaugcggauggccuggggcgggagcuacauugcgcuggacucuggacacggcaagugggauugcaucaugaccuccuaccaguaucuuauuauccagaacacgacaugggaggaccauugucaguuuagccgccccucuccuaucggguaccugggacuccugucccaaagaacccgggauauuuauaucagccgcagacuucugggcacauucaccuggacccucuccgacucugaaggcaaagauacacccgggggauacugccugacgcgguggaugcugauugaggccgagcucaaguguuuuggcaauaccgcuguggccaaaugcaacgaaaagcacgacgaggaguucugcgauaugcugcgccuuuuugacuucuguaaacaggcuauccagagacugaaggccgaagcgcagaugagcauucaacucaucaauaaggccgugaacgcucugaucaaugaucagcuuauuaugaaaaaccaucugcgggacaucauggggauuccuuauugcaauuacuccaaguauugguaccucaaccacacaaccacaggaaaaaccagccugcccaaguguuggcuggucucuaauggcuccuaccucaacgaaacgcacuucagcgacgauaucgagcagcaagccgacaauaugauuacagagaugcugcagaaagaauauauggagcgccaggggaagaccccucuuggacugguugaucucuuuguguucucuaccagcuuuuaccugaucuccaucuuccugcaucuugugaaaauuccgacacacagacauaucgucggcaagucuugccccaagccucaccggcucaaccacaugggcauuuguagcugcgggcuguauaaacagcccggagugccuguucgcuggaagagaugaggacuagucccuguucccagagcccacuuuuuuuucuuuuuuugaaauaaaauagccugucuuucagaucucaaaggcucuuuucagagccaccaaaaaaaaaaaaaaaaaaaaaaaaaaaaaaaaaaaaaaaaaaaaaaaaaaaaaaaaaaaaaaaaagaauu

SEQ ID NO: 36803 - RNA, 1717 nt, Artificial Sequence
  mRNA product Design a-1 (hSL-A64-N5) comprising derived and/or modified sequence from LASV(Mad39;Clade IV)__ANH09722__GPCmut10 (opt5)
aggagagucccgcagucggcguccagcggcucugcuuguucgugugugugucguugcaggccuuauucaagcuuaccaugggccagaucgugaccuucuuucaagaggucccccacguuauugaagaggugaugaacaucgugcugauugcccucagcauccuggcuguccuuaaggggcuguacaauguggccacaugcggacucauuggccugguuacguuccuucugcucugugggagauccugcaccacaacccuguauaaaggaguguacgaacugcaggcgcucgagcugaacauggaaacacuuaauauguguaugccucugucuugcaccaagaacaauagccaucacuauauccgggucggcaacgagacagggcucgagcugacccuuacgaauaccucccugaucaaccauaaauuuuguaaucucucugacgcucacaagaaaaaccuguacgaucaugcccugaugagcauuaucuccacauuccaccucucuauuccgaauuuuaaccaguaugaagccaugagcugcgacuucaaugauggaaagaucuccgugcaguacaaccugagccacaccuaugcuggcgacacagccaaucauuguggcaccguugcuaacggggugcuucaaacguuuaugcgcauggccuggggaggcucuuacauugcgcuggauuccgggagaggaggcugggacugcaucaugacaagcuaccaguaucucauuauccagaacaccacaugggaggaucacugucaguucucucggcccuccccuaucggguaccugggacuucugagccaacgcaccagagacauuuauaucucucggcgccuccugggcaccuuuacauggacgcuguccgauagcgaaggcaaggacacccccgggggauacugccucacaagauggaugcugauugaggccgagcuuaaauguuucggcaauaccgcugucgccaagugcaacgaaaaacaugaugaggaauuuugcgacaugcugcgccucuucgauuuuuguaagcaggcuauccagcggcugaaagccgaggcgcagauguccauucaacuuaucaauaaggccgugaacgcucugaucaaugaccagcucauuaugaagaaccaccugagagacaucauggggauuccuuauugcaauuacucuaaauauugguaccugaaccacacagugaccggaaagacgagccuccccaaauguuggcuggucuccaauggcagcuaccuuaacgaaacacauuucucugaugacaucgagcagcaagccgauaauaugauuaccgagaugcugcagaaggaauauauggagcggcaggggaaaaccccucucggacugguugaccuguucguguuuuccaccagcuucuaccuuaucucuaucuuucuccaccuggugaagauuccgacacaucgccacgucgugggcaaacccugcccuaagccccauagacugaaccacaugggcaucuguagcugcggguucuauaagcagccuggaguucccgugcgguggaaacgcugaggacuagucccuguucccagagcccacuuuuuuuucuuuuuuugaaauaaaauagccugucuuucagaucucaaaggcucuuuucagagccaccaaaaaaaaaaaaaaaaaaaaaaaaaaaaaaaaaaaaaaaaaaaaaaaaaaaaaaaaaaaaaaaaagaauu

SEQ ID NO: 36804 - RNA, 1717 nt, Artificial Sequence
  mRNA product Design a-1 (hSL-A64-N5) comprising derived and/or modified sequence from LASV(Z0947-SLE-2011;Clade IV)__AIT17840__GPCmut10 (opt5)
aggagagucccgcagucggcguccagcggcucugcuuguucgugugugugucguugcaggccuuauucaagcuuaccaugggccagaucgugaccuucuuucaagaggucccccacguuauugaagaggugaugaacaucgugcugauugcccucagcauccuggcuguccuuaaggggcuguacaauuucgccacaugcggacucgugggccugguuacguuucuucugcucugugggagauccugcaccauuucucuguauaaaggaguguacgaacugcagacacucgagcugaacauggaaacccuuaauauguguaugccucugagcugcacaaagaacaauucccaucacuauaucauggucggcaacgagaccgggcucgagcugacacuuaccaauacgucuaucauuaaccauaaauucuguaaucugagcgacgcgcacaagaaaaaccucuacgaucaugcucugauguccaucauuucuaccuuucaccugagcaucccgaauuucaaccaguaugaagccauguccugcgacuuuaauggaggcaagauuagcgugcaguacaaccucucucacuccuaugccggcgaugcugccaaucauugugggacaguugcuaacggagugcugcaaaccuucaugcggauggccuggggcgggagcuacaucgcgcuugacucuggacgcgauagaugggacugcauuaugacauccuaccaguaucugaucauccagaacaccacgugggaggaucacugucaguuuagccggcccucuccuauuggcuaccucgggcugcuuucccaacgcacaagagacaucuauauuagccggcgccugcucggaaccuucacauggacccuguccgauucugaaggcaaggacacccccggcggguacugccugacaagauggaugcucaucgaggccgagcugaaauguuuuggaaauacggcugucgccaagugcaacgaaaaacaugaugaggaguucugcgacaugcuucggcuguuugauuucuguaagcaggcuauucagcgccucaaagccgaagcgcagaugagcauccaacugaucaauaaggccgugaacgcucuuauuaaugaccagcugaucaugaagaaccaccucagagacauuaugggcaucccuuauugcaauuacuccaaauauugguaccugaaccacaccacaaccgggaagacaagccugcccaaauguuggcucgugucuaauggauccuaccugaacgaaacccauuucagcgaugacauugagcagcaagccgauaauaugaucacggagaugcuucagaaggaauauauggagcggcagggcaaaacaccucuggggcucgucgaccuguuuguuuucucuaccagcuuuuaccugaucuccauuuuccuucaccucgugaagaucccgacccaucgccacauugugggaaaacccugcccuaagccccauagacugaaccacaugggcaucuguucuugcggccuguauaagcagccugggguccccgugaaauggaagcggugaggacuagucccuguucccagagcccacuuuuuuuucuuuuuuugaaauaaaauagccugucuuucagaucucaaaggcucuuuucagagccaccaaaaaaaaaaaaaaaaaaaaaaaaaaaaaaaaaaaaaaaaaaaaaaaaaaaaaaaaaaaaaaaaagaauu

SEQ ID NO: 36805 - RNA, 1748 nt, Artificial Sequence
  mRNA product Design a-1 (hSL-A100) comprising derived and/or modified sequence from LASV(Josiah;Clade IV)__NP_694870__GPCmut10 (opt1)
aggagagucccgcagucggcguccagcggcucugcuuguucgugugugugucguugcaggccuuauucaagcuuaccaugggccagaucgugaccuucuuccaggaggucccccacgugaucgaggaggugaugaacaucguccugaucgcccucagcgugcuggccgugcugaaggggcucuacaacuucgcgaccugcggccuggucgggcuggugacguuccuccugcugugcggccgcuccugcaccaccagccucuacaaggggguguacgagcugcagacccuggagcucaacauggagacgcugaacaugugcaugccgcuguccugcaccaagaacaacagccaccacuacaucauggucggcaacgagaccggccucgagcugacgcugaccaacaccuccaucaucaaccacaaguucugcaaccucagcgacgcccacaagaagaaccuguacgaccacgcccugauguccaucaucagcaccuuccaccucuccauccccaacuucaaccaguacgaggccaugagcugcgacuucaacgggggcaagaucuccgugcaguacaaccugagccacuccuacgccggggacgcggccaaccacugcggcacgguggccaacgggguccugcagaccuucaugcggauggccuggggcggcagcuacaucgcgcucgacuccgggcgcggcaacugggacugcaucaugaccagcuaccaguaccugaucauccagaacaccacgugggaggaccacugccaguucucccggcccagccccaucggguaccugggccuccugucccagcgcacccgggacaucuacaucagccgccggcugcucggcaccuucaccuggacgcugagcgacuccgaggggaaggacaccccgggcggguacugccugacccgcuggaugcucaucgaggccgagcugaagugcuucggcaacaccgccguggccaagugcaacgagaagcacgacgaggaguucugcgacaugcugcggcuguucgacuucugcaagcaggccauccagcgccugaaggcggaggcccagaugagcauccagcugaucaacaaggccgugaacgcccucaucaacgaccagcugaucaugaagaaccaccuccgggacaucauggggauccccuacugcaacuacuccaaguacugguaccucaaccacacgaccaccggccgcaccagccugcccaagugcuggcuggucuccaacggcagcuaccucaacgagacgcacuucuccgacgacaucgagcagcaggccgacaacaugaucaccgagaugcugcagaaggaguacauggagcggcaggggaagacgccccugggccucguggaccuguucguguucagcaccuccuucuaccugaucagcaucuuccugcaccucgucaagaucccgacccaccgccacaucguggggaaguccugccccaagccccaccggcugaaccacaugggcaucugcagcugcgggcuguacaagcagcccggcgugccggucaaguggaagcgcugaggacuagucccuguucccagagcccacuuuuuuuucuuuuuuugaaauaaaauagccugucuuucagaucucaaaggcucuuuucagagccaccaaaaaaaaaaaaaaaaaaaaaaaaaaaaaaaaaaaaaaaaaaaaaaaaaaaaaaaaaaaaaaaaaaaaaaaaaaaaaaaaaaaaaaaaaaaaaaaaaaaaa

SEQ ID NO: 36806 - RNA, 1745 nt, Artificial Sequence
  mRNA product Design a-1 (hSL-A100) comprising derived and/or modified sequence from LASV(LP;Clade I)__AAF86701__GPCmut10 (opt1)
aggagagucccgcagucggcguccagcggcucugcuuguucgugugugugucguugcaggccuuauucaagcuuaccaugggccagaucaucaccuucuuccaggaggugccccacgucaucgaggaggugaugaacaucgugcugaucgcccucagccugcuggccauccucaaggggcuguacaacaucgcgaccugcggcaucaucgggcuggucgccuuccucuuccugugcggcaaguccugcagccugacgcucaagggcggguacgagcugcagacccuggagcucaacauggagacccugaacaugugcaugccgcuguccugcacgaagaacagcucccaccacuacauccgcgugggcaacgagaccgggcucgagcugacccugaccaacacgagcaucaucaaccacaaguucugcaaccucuccgacgcccacaagaagaaccuguacgaccacgcccugaugagcaucaucuccaccuuccaccucagcauccccaacuucaaccaguacgaggccauguccugcgacuucaacggcgggaagaucagcgugcaguacaaccugucccacagcuacgcgggcgacgccgccgagcacugcgggaccgucgccaacggcgugcugcagaccuucaugcggauggcguggggcgggcgcuacaucgcccucgacuccggcaaggggaacugggacugcaucaugacgagcuaccaguaccugaucauccagaacaccaccugggaggaccacugccaguucucccggcccagccccaucggcuaccugggccuccugucccagcgcacccgggacaucuacaucagccgccggcugcucgggacguucaccuggacccugagcgacuccgagggcaacgagacccccgggggcuacugccugacgcgcuggaugcucaucgaggccgagcugaagugcuucgggaacaccgccguggccaagugcaacgagaagcacgacgaggaguucugcgacaugcugcggcuguucgacuucugcaagcaggcgauccgccggcugaaggccgaggcccagaugagcauccagcugaucaacaaggccgucaacgcccucaucaacgaccagcugaucaugaagaaccaccuccgcgacaucaugggcauccccuacugcaacuacuccaaguacugguaccucaaccacaccagcuccggccggaccagccugcccaagugcuggcugaucuccaacgggagcuaccucaacgagacgcaguucuccgacgacaucgagcagcaggcggacaacaugaucaccgagaugcugcagaaggaguacaucgagcgccagggcaagaccccgcuggggcucguggacaucuucaucuucagcaccuccuucuaccugaucagcaucuuccugcaccugaucaagaucccgacgcaccggcacaucgugggcaagcccugccccaagccccaccgccucaaccacaugggggucugcuccugcggccuguacaagcacccgggcgugcccaccaaguggaagcggugaggacuagucccuguucccagagcccacuuuuuuuucuuuuuuugaaauaaaauagccugucuuucagaucucaaaggcucuuuucagagccaccaaaaaaaaaaaaaaaaaaaaaaaaaaaaaaaaaaaaaaaaaaaaaaaaaaaaaaaaaaaaaaaaaaaaaaaaaaaaaaaaaaaaaaaaaaaaaaaaaaaaa

SEQ ID NO: 36807 - RNA, 1745 nt, Artificial Sequence
  mRNA product Design a-1 (hSL-A100) comprising derived and/or modified sequence from LASV(803213;Clade II)__AAF86703__GPCmut10 (opt1)
aggagagucccgcagucggcguccagcggcucugcuuguucgugugugugucguugcaggccuuauucaagcuuaccaugggccagaucaucaccuucuuccaggaggugccccacgucaucgaggaggugaugaacaucgugcugaucgcccucagccugcuggccauccucaaggggaucuacaacgucgcgaccugcggccuguucgggcugaucuccuuccuccugcugugcggccgcagcugcuccgugacguacaaggggguguacgagcuccagacccuggagcugaacauggccaaccucaacaugugcaugccgcugagcugcaccaagaacaacucccaccacuacaucauggucggcaacgagacgggccuggagcucacccugaccaacaccagcaucaucaaccacaaguucugcaaccuguccgacgcccacaagaagaaccucuacgaccacgcccugaugagcaucaucuccacguuccaccugagcauccccaacuucaaccaguacgaggccauguccugcgacuucaacgggggcaagaucagcgugcaguacaaccucucccacagcuucgcgguggacgccgccaaccacugcgggaccaucgccaacggcguccugcagaccuucaugcggauggcguggggcggguccuacaucgcccuggacagcggcaaggggaacugggacugcaucaugaccuccuaccaguaccucaucauccagaacacgaccugggaggaccacugccaguucagccgccccucccccaucggcuaccuggggcugcucagccagcggacccgcgacaucuacaucagccggcgccugcugggcaccuucacguggacccucuccgacagcgagggcaacgaggcccccgggggcuacugccugacccgguggaugcugaucgaggccgagcucaagugcuucgggaacaccgccguggcgaagugcaacgagaagcacgacgaggaguucugcgacaugcugcgccuguucgacuucugcaagcaggccaucaagcggcucaagacggaggcccagauguccauccagcugaucaacaaggccgugaacgcccugaucaacgaccagcucaucaugaagaaccaccuccgcgacaucaugggcauccccuacugcaacuacagccgguacugguaccugaaccacaccgucaccgggaagaccucccugccccgcugcuggcuggugagcaacggcuccuaccugaacgagacgcacuucagcgacgacaucgagcagcaggcggacaacaugaucaccgagaugcuccagaaggaguacauggaccggcagggcaagaccccgcuggggcugguggaccucuucgucuucuccaccagcuucuaccugaucuccaucuuccugcaccuggugaagaucccgacgcaccgccacaucgugggcaagcccugccccaagccccaccggcucaaccacauggggaucugcagcugcggccuguacaagcacccggggguccccgugaaguggaagcgcugaggacuagucccuguucccagagcccacuuuuuuuucuuuuuuugaaauaaaauagccugucuuucagaucucaaaggcucuuuucagagccaccaaaaaaaaaaaaaaaaaaaaaaaaaaaaaaaaaaaaaaaaaaaaaaaaaaaaaaaaaaaaaaaaaaaaaaaaaaaaaaaaaaaaaaaaaaaaaaaaaaaaa

SEQ ID NO: 36808 - RNA, 1745 nt, Artificial Sequence
  mRNA product Design a-1 (hSL-A100) comprising derived and/or modified sequence from LASV(GA391;Clade III)__CAA36645__GPCmut10 (opt1)
aggagagucccgcagucggcguccagcggcucugcuuguucgugugugugucguugcaggccuuauucaagcuuaccaugggccagaucgugaccuucuuccaggaggucccccacgugaucgaggaggugaugaacaucguccugaucgcccucagcauccuggccauccugaaggggcucuacaacguggcgaccugcggccugaucgggcuggugacguuccuccugcuguccggccgcagcugcucccucaucuacaaggggaccuacgagcugcagacccuggagcucaacauggagacccugaacaugugcaugccgcugagcugcaccaagaacaacucccaccacuacauccgggucggcaacgagaccggccucgagcugacccugacgaacaccagcauccucaaccacaaguucugcaaccuguccgacgcccacaagcgcaaccuguacgaccacagccucauguccaucaucagcaccuuccaccuguccauccccaacuucaaccaguacgaggccaugagcugcgacuucaacgggggcaagaucaccgugcaguacaaccugucccacagcuucgccguggacgccgcggggcacugcggcacgcucgccaacgggguccugcagaccuucaugcggauggccuggggcggcuccuacaucgcccuggacagcgggcgcggcaacugggacugcaucaugaccuccuaccaguaccucaucauccagaacaccacgugggacgaccacugccaguucagccggcccucccccaucggguaccugggccugcucagccagcgcacccgggacaucuacaucagccgccggcugcugggcaccuucaccuggacgcucuccgacagcgaggggaacgagaccccgggcggguacugccugacccgcuggaugcugaucgaggcggagcucaagugcuucggcaacaccgccguggccaagugcaacgagaagcacgacgaggaguucugcgacaugcugcggcuguucgacuucugcaagcaggccauccgccggcucaagacggaggcccagauguccauccagcugaucaacaaggcggugaacgcccugaucaacgaccagcucaucaugaagaaccaccuccgcgacaucauggggauccccuacugcaacuacagccgguacugguaccugaaccacaccuccaccggcaagaccagccugccccgcugcuggcugaucuccaacggcagcuaccugaacgagacgaaguucuccgacgacaucgagcagcaggccgacaacaugaucaccgagaugcuccagaaggaguacaucgaccggcaggggaagacgccccugggccuggucgaccuguucguguucagcaccuccuucuaccucaucagcaucuuccugcaccuggugaagaucccgacccaccgccacaucgucgggaagcccugccccaagccccaccggcucaaccacaugggcaucugcuccugcgggcuguacaagcagccgggcgugcccgugcgcuggaagcggugaggacuagucccuguucccagagcccacuuuuuuuucuuuuuuugaaauaaaauagccugucuuucagaucucaaaggcucuuuucagagccaccaaaaaaaaaaaaaaaaaaaaaaaaaaaaaaaaaaaaaaaaaaaaaaaaaaaaaaaaaaaaaaaaaaaaaaaaaaaaaaaaaaaaaaaaaaaaaaaaaaaaa

SEQ ID NO: 36809 - RNA, 1748 nt, Artificial Sequence
  mRNA product Design a-1 (hSL-A100) comprising derived and/or modified sequence from LASV(AV;Clade V)__CCA30314__GPCmut10 (opt1)
aggagagucccgcagucggcguccagcggcucugcuuguucgugugugugucguugcaggccuuauucaagcuuaccaugggccagaucgugaccuucuuccaggaggucccccacgugaucgaggaggugaugaacaucguccugaucgcccucagcauccuggccgugcugaaggggcucuacaacaucgcgaccugcggccugaucgggcugaucacguuccuccugcugugcggccgcuccugcagcuccaaccucuacaaggggguguacgagcugcagagccuggaccucaacauggagacccugaacaugugcaugccgcuguccugcaccaagaacaacagccaccacuacauccgggucggcaacgacacgggccucgagcugacccugaccaacaccuccauccucaaccacaaguucugcaaccugagcgacgcccacaagaaggaccuguacgaccacgcccucauguccaucaucagcacguuccaccuguccauccccaacuucaaccaguacgaggccaugagcugcgacuucaacgggggcaagaucuccgugcaguacaaccugagccacuccuacgccaucgacgcggccaaccacugcgggaccguggccaacggcauccuccagaccuucaugcgcauggccuggggcgggagcuacaucgcgcuggacuccggccgggggaacugggacugcaucaugaccagcuaccaguaccugaucauccagaacacgaccugggagaaccacugccaguucucccgccccagccccaucggcuaccucgggcugcugagccagcggacccgcgacaucuacaucucccggcgccuccugggcaccuucacguggacccugagcgacuccgagggcaacgccacccccgggggcuacugccucacccgguggaugcugaucgaggccgagcugaagugcuucgggaacacggccgucgccaagugcaacgagaagcacgacgaggaguucugcgacaugcuccgccuguucgacuucugcaagcaggcgaucagccggcugaaguccgaggcccagaugagcauccagcucaucaacaaggccgugaacgcccugaucaacgaccagcugaucaugaagaaccaccuccgcgacaucaugggcauccccuacugcaacuacuccaaguacugguaccugaaccacaccaucaccgggaagaccagccugcccaagugcuggcucguguccaacggcagcuaccugaacgagacgcacuucuccgacgacaucgagcagcaggccgacaacaugaucaccgagaugcugcagaaggaguacauggagcggcagggcaagaccccgcucgggcuggucgaccuguucguguucagcaccuccuucuaccugaucagcaucuuccuccgccuggugaagaucccgacgcaccggcacaucgucggcaagcccugccccaagccccaccgccugaaccacauggggaucugcuccugcggccucuacaagcagccgggggugcccgugcgguggaagcgcugaggacuagucccuguucccagagcccacuuuuuuuucuuuuuuugaaauaaaauagccugucuuucagaucucaaaggcucuuuucagagccaccaaaaaaaaaaaaaaaaaaaaaaaaaaaaaaaaaaaaaaaaaaaaaaaaaaaaaaaaaaaaaaaaaaaaaaaaaaaaaaaaaaaaaaaaaaaaaaaaaaaaa

SEQ ID NO: 36810 - RNA, 1745 nt, Artificial Sequence
  mRNA product Design a-1 (hSL-A100) comprising derived and/or modified sequence from LASV(Togo/2016/7082;Clade VI)__AMR44577__GPCmut10 (opt1)
aggagagucccgcagucggcguccagcggcucugcuuguucgugugugugucguugcaggccuuauucaagcuuaccaugggccagaucaucaccuucuuccaggaggugccccacgucaucgaggaggugaugaacaucgugcugaucgcccucagccugcuggccauccucaagggggucuacaacguggcgaccugcggcaucaucgggcuggugacguuccuguuccucugcggccgcuccugcagccugaucuacaagggguccuacgagcugcagacccucgagcugaacauggagacccugaacaugugcaugccgcucagcugcacgaagaacuccagccaccacuacauccgggucggcaacgagaccggccuggagcugacccucaccaacacguccaucaucaaccacaaguucugcaaccugagcgacgcccacaagcgcaaccuguacgaccacgcccucauguccauccugagcaccuuccaccuguccauccccaacuucaaccaguacgaggccaugagcugcgacuucaacgggggcaagaucuccgugcaguacaaccucagccacgccuacgcgguggacgccgccgagcacugcgggaccgucgccaacggcgugcugcagaccuucaugcggauggcguggggcggguccuacaucgcccuggacagcggccgcgggaacugggacugcaucaugacguccuaccaguaccucaucauccagaacaccaccugggaggaccacugccaguucagccggcccucccccaucggcuaccuggggcugcucagccagcgcacccgggacaucuacaucagccgccggcugcugggcacguucaccuggacccucuccgacagcgagggcaacgagacccccgggggcuacugccugacgcgcuggaugcugaucgaggccgagcucaagugcuucgggaacaccgccguggccaagugcaacgagaagcacgacgaggaguucugcgacaugcugcggcuguucgacuucugcaagcaggcgauccagcgccucaaguccgaggcccagaugagcauccagcugaucaacaaggccgucaacgcccugaucaacgaccagcucaucaugaagaaccaccuccgggacaugaugggcauccccuacugcaacuacuccaaguacugguaccugaaccacaccagcuccgggcgcaccagccugcccaagugcuggcugguguccaacggcagcuaccugaacgagacgcacuucuccgacgacaucgagcagcaggccgacaacaugaucaccgagaugcuccagaaggaguacaucgaccggcagggcaagaccccgcuggggcugguggaccucuucgucuucagcaccuccuucuaccugaucagcaucuuccugcaccugaucaagaucccgacgcaccgccacaucgugggcaagcccugccccaagccccaccggcucaaccacauggggaucugcuccugcggccuguacaagcagccgggggugcccacccgcuggaagcggugaggacuagucccuguucccagagcccacuuuuuuuucuuuuuuugaaauaaaauagccugucuuucagaucucaaaggcucuuuucagagccaccaaaaaaaaaaaaaaaaaaaaaaaaaaaaaaaaaaaaaaaaaaaaaaaaaaaaaaaaaaaaaaaaaaaaaaaaaaaaaaaaaaaaaaaaaaaaaaaaaaaaa

SEQ ID NO: 36811 - RNA, 1745 nt, Artificial Sequence
  mRNA product Design a-1 (hSL-A100) comprising derived and/or modified sequence from LASV(KAK-428;Clade n.d. (VII))__ANH09740__GPCmut10 (opt1)
aggagagucccgcagucggcguccagcggcucugcuuguucgugugugugucguugcaggccuuauucaagcuuaccaugggccagaucgugaccuucuuccaggaggucccccacgugaucgaggaggugaugaacaucguccugaucgcccucagccugcuggccauccucaaggggcuguacaacuucgcgaccugcggcgugaucgggcugaucacguuccuccugcugugcggccgcuccugcagcgccaccuacaaggggcaguacgagcuccagacccuggagcugaacauggagucccucaacaugugcaugccgcugagcugcacgaagaacaacucccaccacuacauccgggccggcaacaacaccggccuggagcucacccugaccaacacgagcaucaucucccacaaguucugcaaccugagcgacgcccacaagaagaaccucuacgaccacacccugauguccaucaucaccaccuuccaccugagcauccccaacuucaaccaguacgaggccauguccugcgacuucaacgggggcaagaucagcauccaguacaaccucucccacagcuacgcgggggacgccgcccagcacugcggcacgguggccaacgggguccugcagaccuucaugcgcauggcguggggcggcuccuaccuggcccucgacagcgggcggcgcggcugggacugcaucaucuccagcuaccaguaccugaucauccagaacaccaccugggacgaccacugccaguucucccggcccagccccaucggguaccugggcuucgugagccagaagacgcgcgacaucuacaucucccggcgccuccugggcaccuucaccuggacccugagcgacuccgaggggcacgacaugccgggcggguacugccucacgcgguggaugcugaucgaggccgaccugaagugcuucggcaacaccgccguggccaagugcaacgagaagcacgacgaggaguucugcgacauguggcgccucuucgacuucugcaagcaggcgauccagcggcugaaggccgaggcccagaugaacauccagcugaucaacaaggccgucaacgcccucaucaacgaccagcugaugaugaagaaccaccuccgcgacaucauggggauccccuacugcaacuacagcaaguucugguaccugaacaacaccaccacgggccggaccucccugccccgcugcuggcugaucagcaacggcuccuaccucaacgagacccacuucagcgacgacaucgagcagcaggcggacaacaugaucaccgagaugcugcagaaggaguacauggaccggcaggggaagacgccccugggccucguggaccuguucguguucuccaccagcuucuaccugaucaccaucuuccuccaccuggucaagaucccgacccaccgccacaucguggggaagcccugccccaagccccaccggcugaaccacaugggcaucugcuccugcgggcuguacaagcagccgggcgugcccguccgcuggaagcggugaggacuagucccuguucccagagcccacuuuuuuuucuuuuuuugaaauaaaauagccugucuuucagaucucaaaggcucuuuucagagccaccaaaaaaaaaaaaaaaaaaaaaaaaaaaaaaaaaaaaaaaaaaaaaaaaaaaaaaaaaaaaaaaaaaaaaaaaaaaaaaaaaaaaaaaaaaaaaaaaaaaaa

SEQ ID NO: 36812 - RNA, 1745 nt, Artificial Sequence; identical to SEQ ID NO: 36806
  mRNA product Design a-1 (hSL-A100) comprising derived and/or modified sequence from LASV(Pinneo-NIG-1969;Clade I)__AIT17836__GPCmut10 (opt1)

SEQ ID NO: 36813 - RNA, 1745 nt, Artificial Sequence
  mRNA product Design a-1 (hSL-A100) comprising derived and/or modified sequence from LASV(ISTH0009-NIG-2011;Clade II)__AIT17404__GPCmut10 (opt1)
aggagagucccgcagucggcguccagcggcucugcuuguucgugugugugucguugcaggccuuauucaagcuuaccaugggccagaucaucaccuucuuccaggaggugccccacgucaucgaggaggugaugaacaucgugcugaucgcccucagccugcuggccauccucaaggggaucuacaacgucgcgaccugcggccuguucgggcugguguccuuccuccugcugugcggccgcagcugcuccacgaccuacaaggggguguacgagcuccagacccuggagcuggacauggccagccucaacaugugcaugccgcuguccugcacgaagaacaacagccaccacuacaucauggucggcaacgagaccggccuggagcucacccugaccaacacguccaucaucaaccacaaguucugcaaccugagcgacgcccacaagaagaaccucuacgaccacgcccugauguccaucaucagcaccuuccaccuguccauccccaacuucaaccaguacgaggccaugagcugcgacuucaacgggggcaagaucuccgugcaguacaaccucagccacgcguacgccguggacgccgccaaccacugcgggaccaucgcgaacggcguccugcagaccuucaugcggauggccuggggcggguccuacaucgcccuggacagcggcaagggguccugggacugcaucaugacgagcuaccaguaccucaucauccagaacaccaccugggaggaccacugccaguucucccgccccagccccaucggcuaccuggggcugcucagccagcggacccgcgacaucuacaucucccggcgccugcugggcacguucaccuggacccucagcgacuccgagggcaacgagacccccgggggcuacugccugacgcgguggaugcugaucgaggccgagcucaagugcuucgggaacaccgccguggcgaagugcaacgagaagcacgacgaggaguucugcgacaugcugcgccuguucgacuucugcaagcaggccauccggcgccucaagaccgaggcccagaugagcauccagcugaucaacaaggccgugaacgcccugaucaacgaccagcucaucaugaagaaccaccuccgggacaucaugggcaucccguacugcaacuacuccaaguacugguaccugaaccacaccgucacggggaagaccagccugccccgcugcuggcugguguccaacggcagcuaccugaacgagacccacuucuccgacgacaucgagcagcaggcggacaacaugaucaccgagcuccugcagaaggaguacauggaccggcagggcaagacgccccuggggcucguggaccuguucgucuucagcaccuccuucuaccugaucagcaucuuccugcaccucaucaagaucccgacccaccgccacaucaccggcaagcccugccccaagccccaccggcugaaccacauggggaucugcuccugcggccuguacaagcacccgggggugcccgugaaguggaagcgcugaggacuagucccuguucccagagcccacuuuuuuuucuuuuuuugaaauaaaauagccugucuuucagaucucaaaggcucuuuucagagccaccaaaaaaaaaaaaaaaaaaaaaaaaaaaaaaaaaaaaaaaaaaaaaaaaaaaaaaaaaaaaaaaaaaaaaaaaaaaaaaaaaaaaaaaaaaaaaaaaaaaaa

SEQ ID NO: 36814 - RNA, 1745 nt, Artificial Sequence
  mRNA product Design a-1 (hSL-A100) comprising derived and/or modified sequence from LASV(ISTH2010-NIG-2012;Clade II)__AIT17482__GPCmut10 (opt1)
aggagagucccgcagucggcguccagcggcucugcuuguucgugugugugucguugcaggccuuauucaagcuuaccaugggccagaucaucaccuucuuccaggaggugccccacgucaucgaggaggugaugaacaucgugcugaucgcccucagccugcuggccauccucaaggggaucuacaacgucgcgaccugcggccuguucgggcugguguccuuccuccugcugugcggccgcagcugcuccacgaccuacaaggggguguacgagcuccagacccuggagcuggacauggccagccucaacaugugcaugccgcuguccugcacgaagaacaacagccaccacuacaucauggucggcaacgagaccggccuggagcucacccugaccaacacguccaucaucaaccacaaguucugcaaccugagcgacgcccacaagaagaaccucuacgaccacgcccugauguccaucaucagcaccuuccaccuguccauccccaacuucaaccaguacgaggccaugagcugcgacuucaacgggggcaagaucuccgugcaguacaaccucagccacgcguacgccguggacgccgccaaccacugcgggaccaucgcgaacggcguccugcagaccuucaugcggauggccuggggcggguccuacaucgcccuggacagcggcaagggguccugggacugcaucaugacgagcuaccaguaccucaucauccagaacaucaccugggaggaccacugccaguucucccgccccagccccaucggcuaccuggggcugcucagccagcggacccgcgacaucuacaucucccggcgccugcugggcaccuucacguggacccucagcgacuccgagggcaacgagacccccgggggcuacugccugacccgguggaugcugaucgaggccgagcucaagugcuucgggaacacggccguggcgaagugcaacgagaagcacgacgaggaguucugcgacaugcugcgccuguucgacuucugcaagcaggccauccggcgccucaagaccgaggcccagaugagcauccagcugaucaacaaggccgugaacgcccugaucaacgaccagcucaucaugaagaaccaccuccgggacaucaugggcauccccuacugcaacuacuccaaguacugguaccugaaccacaccgucaccgggaagacgagccugccccgcugcuggcugguguccaacggcagcuaccugaacgagacccacuucuccgacgacaucgagcagcaggcggacaacaugaucaccgagcuccugcagaaggaguacaucgaccggcagggcaagaccccgcuggggcucguggaccuguucgucuucagcacguccuucuaccugaucagcaucuuccugcaccucgugaagaucccgacccaccgccacguggucggcaagcccugccccaagccccaccggcugaaccacauggggaucugcuccugcggccuguacaagcacccgggggugcccgugaaguggaagcgcugaggacuagucccuguucccagagcccacuuuuuuuucuuuuuuugaaauaaaauagccugucuuucagaucucaaaggcucuuuucagagccaccaaaaaaaaaaaaaaaaaaaaaaaaaaaaaaaaaaaaaaaaaaaaaaaaaaaaaaaaaaaaaaaaaaaaaaaaaaaaaaaaaaaaaaaaaaaaaaaaaaaaa

SEQ ID NO: 36815 - RNA, 1745 nt, Artificial Sequence
  mRNA product Design a-1 (hSL-A100) comprising derived and/or modified sequence from LASV(Lassa virus/H.sapiens-wt/NGA/2015/ISTH_0543;Clade II)__AVO03639__GPCmut10 (opt1)
aggagagucccgcagucggcguccagcggcucugcuuguucgugugugugucguugcaggccuuauucaagcuuaccaugggccagaucaucaccuucuuccaggaggugccccacgucaucgaggaggugaugaacaucgugcugaucgcccucagccugcuggccauccucaaggggaucuacaacgucgcgaccugcggccuguucgggcugguguccuuccuccugcugugcggccgcagcugcuccacgaccuacaaggggguguacgagcuccagacccuggagcuggacauggccaaccucaacaugugcaugccgcugagcugcacgaagaacaacucccaccacuacaucauggucggcaacgagaccggccuggagcucacccugaccaacacgagcaucaucaaccacaaguucugcaaccuguccgacgcccacaagaagaaccucuacgaccacgcccugaugagcaucaucuccaccuuccaccugagcauccccaacuucaaccaguacgaggccauguccugcgacuucaacgggggcaagaucagcgugcaguacaaccucucccacaccuacgcgguggacgccgccaaccacugcgggaccaucgccaacggcguccugcagacguucaugcggauggcguggggcgggagcuacaucgcccuggacuccggcaaggggagcugggacugcaucaugaccuccuaccaguaccucgugauccagaacaccaccugggaggaccacugccaguucagccgccccucccccaucggcuaccuggggcugcucagccagcggacgcgcgacaucuacaucagccggcgccugcugggcaccuucaccuggacccucuccgacagcgagggcaacgagacgcccgggggcuacugccugacccgguggaugcugaucgaggccgagcucaagugcuucgggaacaccgccguggccaagugcaacgagaagcacgacgaggaguucugcgacaugcugcgccuguucgacuucugcaagcaggcgauccggcgccucaagaccgaggcccagauguccauccagcugaucaacaaggccgucaacgcccugaucaacgaccagcucaucaugaagaaccaccuccgggacaucaugggcauccccuacugcaacuacagcaaguacugguaccugaaccacacggugaccgggaagaccucccugccccgcugcuggcuggugagcaacggcuccuaccugaacgagacccacuucagcgacgacaucgagcagcaggccgacaacaugaucacggagcuccugcagaaggaguacaucgaccggcagggcaagaccccgcuggggcucgucgaccuguucguguucuccaccagcuucuaccugaucuccaucuuccugcaccucgugaagaucccgacccaccgccacaucacgggcaagcccugccccaagccccaccggcugaaccacauggggaucugcagcugcggccuguacaagcacccggggguccccgugaaguggaagcgcugaggacuagucccuguucccagagcccacuuuuuuuucuuuuuuugaaauaaaauagccugucuuucagaucucaaaggcucuuuucagagccaccaaaaaaaaaaaaaaaaaaaaaaaaaaaaaaaaaaaaaaaaaaaaaaaaaaaaaaaaaaaaaaaaaaaaaaaaaaaaaaaaaaaaaaaaaaaaaaaaaaaaa

SEQ ID NO: 36816 - RNA, 1745 nt, Artificial Sequence
  mRNA product Design a-1 (hSL-A100) comprising derived and/or modified sequence from LASV(Lassa virus/H.sapiens-wt/NGA/2016/ISTH_0009;Clade II)__AVO03571__GPCmut10 (opt1)
aggagagucccgcagucggcguccagcggcucugcuuguucgugugugugucguugcaggccuuauucaagcuuaccaugggccagaucaucaccuucuuccaggaggugccccacgucaucgaggaggugaugaacaucgugcugaucgcccucagccugcuggccauccucaaggggaucuacaacgucgcgaccugcggccugcuggggcucguguccuuccugcugcucugcggccgcagcugcuccacgaccuacaaggggguguacgagcugcagacccuggagcucgacauggccagccugaacaugugcaugccgcuguccugcacgaagaacaacagccaccacuacaucauggucggcaacgagaccggccucgagcugacccugaccaacacguccaucaucaaccacaaguucugcaaccucagcgacgcccacaagaagaaccuguacgaccacgcccugauguccaucaucagcaccuuccaccucuccauccccaacuucaaccaguacgaggccaugagcugcgacuucaacgggggccggaucuccgugcaguacaaccugagccacuccuacgcgguggacgccgccaaccacugcgggaccaucgccaacggcguccugcagaccuucaugcgcauggcguggggcgggagcuacaucgcccucgacuccggcaaggggagcugggacugcaucaugacguccuaccaguaccugaucauccagaacaccaccugggaggaccacugccaguucagccggcccagccccaucggcuaccuggggcuccugucccagcgcacccgggacaucuacaucagccgccggcugcucggcacguucaccuggacccuguccgacagcgagggcaacgagacccccgggggcuacugccugacgcgcuggaugcucaucgaggccgagcugaagugcuucgggaacaccgccguggccaagugcaacgagaagcacgacgaggaguucugcgacaugcugcggcuguucgacuucugcaagcaggcgauccgccggcugaagaccgaggcccagauguccauccagcugaucaacaaggccgugaacgcccucaucaacgaccagcugaucaugaagaaccaccuccgcgacaucaugggcaucccguacugcaacuacagcaaguacugguaccucaaccacaccgucacggggaagaccucccugccccggugcuggcuggugagcaacggcuccuaccucaacgagacccacuucagcgacgacaucgagcagcaggccgacaacaugaucaccgagcugcugcagaaggaguacaucgaccgccagggcaagacgccccucgggcugguggaccuguucgucuucuccaccagcuucuaccugaucuccaucuuccuccaccuggugaagaucccgacccaccggcacaucaccggcaagcccugccccaagccccaccgccugaaccacauggggaucugcagcugcggccucuacaaccacccgggggugcccgucaaguggaagcggugaggacuagucccuguucccagagcccacuuuuuuuucuuuuuuugaaauaaaauagccugucuuucagaucucaaaggcucuuuucagagccaccaaaaaaaaaaaaaaaaaaaaaaaaaaaaaaaaaaaaaaaaaaaaaaaaaaaaaaaaaaaaaaaaaaaaaaaaaaaaaaaaaaaaaaaaaaaaaaaaaaaaa

SEQ ID NO: 36817 - RNA, 1745 nt, Artificial Sequence
  mRNA product Design a-1 (hSL-A100) comprising derived and/or modified sequence from LASV(Lassa virus/H.sapiens-wt/NGA/2016/ISTH_0017;Clade II)__AVO03567__GPCmut10 (opt1)
aggagagucccgcagucggcguccagcggcucugcuuguucgugugugugucguugcaggccuuauucaagcuuaccaugggccagaucaucaccuucuuccaggaggugccccacgucaucgaggaggugaugaacaucgugcugaucgcccucagccugcuggccauccucaaggggaucuacaacgucgcgaccugcggccuguucgggcugguguccuuccuccugcugugcggccgcagcugcuccacgaccuacaaggggguguacgagcuccagacccuggagcuggacauggccagccucaacaugugcaugccgcuguccugcacgaagaacaacagccaccacuacaucauggucggcaacgagaccggccuggagcucacccugaccaacacguccaucaucaaccacaaguucugcaaccugagcgacgcccacaagaagaaccucuacgaccacgcccugauguccaucaucagcaccuuccaccuguccauccccaacuucaaccaguacgaggccaugagcugcgacuucaacgggggcaagaucuccgugcaguacaaccucagccacaccuacgcgaucgacgccgccaaccacugcgggaccaucgccaacggcgugcugcagacguucaugcggauggcguggggcggguccuacaucgcccuggacagcggcaagggguccugggacugcaucaugaccagcuaccaguaccucaucauccagaacaccaccugggaggaccacugccaguucucccgccccagccccaucggcuaccuggggcugcucagccagcggacgcgcgacaucuacaucucccggcgccugcugggcaccuucaccuggacccucagcgacuccgagggcaacgagacgcccgggggcuacugccugacccgguggaugcugaucgaggccgagcucaagugcuucgggaacaccgccgucgccaagugcaacgagaagcacgacgaggaguucugcgacaugcugcgccuguucgacuucugcaagcaggcgauccggcgccucaagaccgaggcccagaugagcauccagcugaucaacaaggccgugaacgcccugaucaacgaccagcucaucaugaagaaccaccuccgggacaucaugggcauccccuacugcaacuacuccaaguacugguaccugaaccacacggugaccgggaagaccagccugccccgcugcuggcuggucuccaacggcagcuaccugaacgagacccacuucuccgacgacaucgagcagcaggccgacaacaugaucacggagcuccugcagaaggaguacauggaccggcagggcaagaccccgcuggggcucguggaccuguucguguucagcaccuccuucuaccugaucagcaucuuccugcaccucguccgcaucccgacccaccggcacgugaucggcaagcccugccccaagccccaccgccugaaccacauggggaucugcuccugcggccuguacaagcacccgggggugcccgucaaguggaagcggugaggacuagucccuguucccagagcccacuuuuuuuucuuuuuuugaaauaaaauagccugucuuucagaucucaaaggcucuuuucagagccaccaaaaaaaaaaaaaaaaaaaaaaaaaaaaaaaaaaaaaaaaaaaaaaaaaaaaaaaaaaaaaaaaaaaaaaaaaaaaaaaaaaaaaaaaaaaaaaaaaaaaa

SEQ ID NO: 36818 - RNA, 1745 nt, Artificial Sequence
  mRNA product Design a-1 (hSL-A100) comprising derived and/or modified sequence from LASV(Lassa virus/H.sapiens-wt/NGA/2018/ISTH_0959;Clade II)__AVV65099__GPCmut10 (opt1)
aggagagucccgcagucggcguccagcggcucugcuuguucgugugugugucguugcaggccuuauucaagcuuaccaugggccagaucaucaccuucuuccaggaggugccccacgucaucgaggaggugaugaacaucgugcugaucgcccucagccugcuggccauccucaaggggaucuacaacgucgugaccugcggccuguucgggcugguguccuuccuccugcugugcggccgcagcugcuccacgaccuacaagggggucuacgagcuccagacccuggagcuggacauggcgagccucaacaugugcaugccgcuguccugcacgaagaacaacagccaccacuacaucauggugggcaacgagaccggccuggagcucacccugaccaacacguccaucaucaaccacaaguucugcaaccugagcgacgcccacaagaagaaccucuacgaccacgcccugauguccaucaucagcaccuuccaccuguccauccccaacuucaaccaguacgaggccaugagcugcgacuucaacgggggcaagaucuccgugcaguacaaccucagccacgccuacgcgaucgacgccgccaaccacugcgggaccaucgccaacggcguccugcagaccuucaugcggauggcguggggcggguccuacaucgcccuggacagcggcaagggguccugggacugcaucaugacgagcuaccaguaccucaucauccagaacaccaccugggaggaccacugccaguucucccgccccagccccaucggcuaccuggggcugcucagccagcggacccgcgacaucuacaucucccggcgccugcugggcacguucaccuggacccucagcgacuccgagggcaacgagacccccgggggcuacugccugacgcgguggaugcugaucgaggccgagcucaagugcuucgggaacaccgccguggccaagugcaacgagaagcacgacgaggaguucugcgacaugcugcgccuguucgacuucugcaagcaggcgauccggcgccucaagaccgaggcccagaugagcauccagcugaucaacaaggccgugaacgcccugaucaacgaccagcucaucaugaagaaccaccuccgggacaucaugggcaucccguacugcaacuacuccaaguacugguaccugaaccacaccgucacggggaagaccagccugccccgcugcuggcugguguccaacggcagcuaccugaacgagacccacuucuccgacgacaucgagcagcaggccgacaacaugaucaccgagcuccugcagaaggaguacaucgaccggcagggcaagacgccccuggggcucguggaccuguucgucuucagcaccuccuucuaccugaucagcaucuuccugcaccucgugaagaucccgacccaccgccacgugaucggcaagcccugccccaagccccaccggcugaaccacauggggaucugcuccugcggccuguacaagcacccggggguccccgugaaguggaagcgcugaggacuagucccuguucccagagcccacuuuuuuuucuuuuuuugaaauaaaauagccugucuuucagaucucaaaggcucuuuucagagccaccaaaaaaaaaaaaaaaaaaaaaaaaaaaaaaaaaaaaaaaaaaaaaaaaaaaaaaaaaaaaaaaaaaaaaaaaaaaaaaaaaaaaaaaaaaaaaaaaaaaaa

SEQ ID NO: 36819 - RNA, 1745 nt, Artificial Sequence
  mRNA product Design a-1 (hSL-A100) comprising derived and/or modified sequence from LASV(LASV003-NIG-2008;Clade II)__AIT17580__GPCmut10 (opt1)
aggagagucccgcagucggcguccagcggcucugcuuguucgugugugugucguugcaggccuuauucaagcuuaccaugggccagaucaucaccuucuuccaggaggugccccacgucaucgaggaggugaugaacaucgugcugaucgcccucagccugcuggccauccucaaggggaucuacaacgucgcgaccugcggccuguucgggcugguguccuuccuccugcugugcggccgcagcugcuccacgaccuacaaggggguguacgagcuccagacccuggagcuggacauggccagccucaacaugugcaugccgcuguccugcacgaagaacaacagccaccacuacaucauggucggcaacgagaccggccuggagcucacccugaccaacacguccaucaucaaccacaaguucugcaaccugagcgacgcccacaagaagaaccucuacgaccacgcccugauguccaucaucagcaccuuccaccuguccauccccaacuucaaccaguacgaggccaugagcugcgacuucaacgggggcaagaucuccgugcaguacaaccucagccacaccuacgcgguggacgccgccaaccacugcgggaccaucgccaacggcguccugcagacguucaugcggauggcguggggcggguccuacaucgcccuggacagcggcaagggguccugggacugcaucaugaccagcuaccaguaccucaucauccagaacaccaccugggaggaccacugccaguucucccgccccagccccaucggcuaccuggggcugcucagccagcggacgcgcgacaucuacaucucccggcgccugcugggcaccuucaccuggacccucagcgacuccgagagcaacgagacgccgggcggguacugccugacccgguggaugcugaucgaggccgagcucaagugcuucggcaacaccgccguggccaagugcaacgagaagcacgacgaggaguucugcgacaugcugcgccuguucgacuucugcaagcaggcgauccggcgccucaaggccgaggcccagauguccauccagcugaucaacaaggccgugaacgcccugaucaacgaccagcucaucaugaagaaccaccuccgggacaucauggggauccccuacugcaacuacagcaaguacugguaccugaaccacaccgucacgggccgcaccucccugccccggugcuggcuggugagcaacggguccuaccugaacgagacccacuucagcgacgacaucgagcagcaggcggacaacaugaucaccgagcuccugcagaaggaguacauggaccgccagggcaagacgccccugggccucguggaccuguucgucuucuccaccagcuucuaccugaucuccaucuuccugcaccucgugaagaucccgacccaccggcacgugaucgggaagcccugccccaagccccaccgccugaaccacaugggcaucugcagcugcgggcuguacaagcacccgggcguccccgugaaguggaagcggugaggacuagucccuguucccagagcccacuuuuuuuucuuuuuuugaaauaaaauagccugucuuucagaucucaaaggcucuuuucagagccaccaaaaaaaaaaaaaaaaaaaaaaaaaaaaaaaaaaaaaaaaaaaaaaaaaaaaaaaaaaaaaaaaaaaaaaaaaaaaaaaaaaaaaaaaaaaaaaaaaaaaa

SEQ ID NO: 36820 - RNA, 1745 nt, Artificial Sequence
  mRNA product Design a-1 (hSL-A100) comprising derived and/or modified sequence from LASV(LASV035-NIG-2009;Clade II)__AIT17588__GPCmut10 (opt1)
aggagagucccgcagucggcguccagcggcucugcuuguucgugugugugucguugcaggccuuauucaagcuuaccaugggccagaucaucaccuucuuccaggaggugccccacgucaucgaggaggugaugaacaucgugcugaucgcccucagccugcuggccauccucaaggggaucuacaacgucgcgaccugcggccuguucgggcugguguccuuccuccugcugugcggccgcagcugcuccacgaccuacaaggggguguacgagcuccagacccuggagcuggacauggccagccucaacaugugcaugccgcuguccugcacgaagaacaacagccaccacuacaucauggucggcaacgagaccggccuggagcucacccugaccaacacguccaucaucaaccacaaguucugcaaccugagcgacgcccacaagaagaaccucuacgaccacgcccugauguccaucaucagcaccuuccaccuguccauccccaacuucaaccaguacgaggccaugagcugcgacuucaacgggggcaagaucuccgugcaguacaaccucagccacgcguacgccguggacgccgccaaccacugcgggaccaucgcgaacggcguccugcagaccuucaugcggauggccuggggcggguccuacaucgcccuggacagcggcaagggguccugggacugcaucaugacgagcuaccaguaccucaucauccagaacaccaccugggaggaccacugccaguucucccgccccagccccaucggcuaccuggggcugcucagccagcggacccgcgacaucuacaucucccggcgccugcugggcacguucaccuggacccucagcgacuccgagggcaacgagacccccgggggcuacugccugacgcgguggaugcugaucgaggccgagcucaagugcuucgggaacaccgccguggcgaagugcaacgagaagcacgacgaggaguucugcgacaugcugcgccuguucgacuucugcaagcaggccauccggcgccucaaggccgaggcccagaugagcauccagcugaucaacaaggccgugaacgcgcugaucaacgaccagcucaucaugaagaaccaccuccgggacaucaugggcauccccuacugcaacuacuccaaguacugguaccugaaccacaccgucaccgggaagacgagccugccccgcugcuggcugguguccaacggcagcuaccugaacgagacccacuucuccgacgacaucgagcagcaggccgacaacaugaucaccgagcuccugcagaaggaguacaucgaccggcagggcaagaccccgcuggggcucguggaccuguucgucuucagcacguccuucuaccugaucagcaucuuccugcaccucgugaagaucccgacccaccgccacgugaucggcaagcccugccccaagccccaccggcugaaccacauggggaucugcuccugcggccuguacaagcacccggggguccccgugaaguggaagcgcugaggacuagucccuguucccagagcccacuuuuuuuucuuuuuuugaaauaaaauagccugucuuucagaucucaaaggcucuuuucagagccaccaaaaaaaaaaaaaaaaaaaaaaaaaaaaaaaaaaaaaaaaaaaaaaaaaaaaaaaaaaaaaaaaaaaaaaaaaaaaaaaaaaaaaaaaaaaaaaaaaaaaa

SEQ ID NO: 36821 - RNA, 1745 nt, Artificial Sequence
  mRNA product Design a-1 (hSL-A100) comprising derived and/or modified sequence from LASV(LASV1000-NIG-2009;Clade II)__AIT17782__GPCmut10 (opt1)
aggagagucccgcagucggcguccagcggcucugcuuguucgugugugugucguugcaggccuuauucaagcuuaccaugggccagaucaucaccuucuuccaggaggugccccacgucaucgaggaggugaugaacaucgugcugaucgcccucagccugcuggccauccucaaggggaucuacaacgucgcgaccugcggccuguucgggcugguguccuuccuccugcugugcggccgcagcugcuccacgaccuacaaggggguguacgagcuccagacccuggagcuggacauggccagccucaacaugugcaugccgcuguccugcacgaagaacaacagccaccacuacaucauggucggcaacgagaccggccuggagcucacccugaccaacacguccaucaucaaccacaaguucugcaaccugagcgacgcccacaagaagaaccucuacgaccacgcccugauguccaucaucagcaccuuccaccuguccauccccaacuucaaccaguacgaggccaugagcugcgacuucaacgggggcaagaucuccgugcaguacaaccucagccacaccuacgcgguggacgccgccaaccacugcgggaccaucgccaacggcguccugcagacguucaugcggauggcguggggcggguccuacaucgcccuggacagcggcaagggguccugggacugcaucaugaccagcuaccaguaccucaucauccagaacaccaccugggaggaccacugccaguucucccgccccagccccaucggcuaccuggggcugcucagccagcggacgcgcgacaucuacaucucccggcgccugcugggcaccuucaccuggacccucagcgacuccgagggcaacgagacgcccgggggcuacugccugacccgguggaugcugaucgaggccgagcucaagugcuucgggaacaccgccguggccaagugcaacgagaagcacgacgaggaguucugcgacaugcugcgccuguucgacuucugcaagcaggcgaucaagcggcucaagaccgaggcccagaugagcauccagcugaucaacaaggccgugaacgcccugaucaacgaccagcucaucaugaagaaccaccuccgcgacaucaugggcauccccuacugcaacuacuccaaguacugguaccugaaccacacggucaccgggaagaccagccugccccggugcuggcugguguccaacggcagcuaccugaacgagacccacuucuccgacgacaucgagcagcaggccgacaacaugaucacggagcuccugcagaaggaguacaucgaccgccagggcaagaccccgcuggggcucguggaccuguucgucuucagcaccuccuucuaccugaucagcaucuuccugcaccucgugaagaucccgacccaccggcacguggucggcaagcccugccccaagccccaccgccugaaccacauggggaucugcuccugcggccuguacaagcacccgggggugcccgugaaguggaagcggugaggacuagucccuguucccagagcccacuuuuuuuucuuuuuuugaaauaaaauagccugucuuucagaucucaaaggcucuuuucagagccaccaaaaaaaaaaaaaaaaaaaaaaaaaaaaaaaaaaaaaaaaaaaaaaaaaaaaaaaaaaaaaaaaaaaaaaaaaaaaaaaaaaaaaaaaaaaaaaaaaaaaa

SEQ ID NO: 36822 - RNA, 1745 nt, Artificial Sequence
  mRNA product Design a-1 (hSL-A100) comprising derived and/or modified sequence from LASV(LASV221-NIG-2010;Clade II)__AIT17624__GPCmut10 (opt1)
aggagagucccgcagucggcguccagcggcucugcuuguucgugugugugucguugcaggccuuauucaagcuuaccaugggccagaucaucaccuucuuccaggaggugccccacgucaucgaggaggugaugaacaucgugcugaucgcccucagccugcuggccauccucaaggggaucuacaacgucgcgaccugcggccuguucgggcugguguccuuccuccugcugugcggccgcagcugcuccacgaccuacaaggggguguacgagcuccagacccuggagcuggacauggccagccucaacaugugcaugccgcuguccugcacgaagaacaacagccaccacuacaucauggucggcaacgagaccggccuggagcucacccugaccaacacguccaucaucaaccacaaguucugcaaccugagcgacgcccacaagaagaaccucuacgaccacgcccugauguccaucaucagcaccuuccaccuguccauccccaacuucaaccaguacgaggccaugagcugcgacuucaacgggggcaagaucuccgugcaguacaaccucagccacaccuacgcgaucgacgccgccaaccacugcgggaccaucgccaacggcgugcugcagacguucaugcggauggcguggggcggguccuacaucgcccuggacagcggcaagggguccugggacugcaucaugaccagcuaccaguaccucaucauccagaacaccaccugggaggaccacugccaguucucccgccccagccccaucggcuaccuggggcugcucagccagcggacgcgcgacaucuacaucucccggcgccugcugggcaccuucaccuggacccucagcgacuccgagggcaacgagacgcccgggggcuacugccugacccgguggaugcugaucgaggccgagcucaagugcuucgggaacaccgccgucgccaagugcaacgagaagcacgacgaggaguucugcgacaugcugcgccuguucgacuucugcaagcaggcgauccggcgccucaagaccgaggcccagaugagcauccagcugaucaacaaggccgugaacgcccugaucaacgaccagcucaucaugaagaaccaccuccgggacaucaugggcauccccuacugcaacuacuccaaguacugguaccugaaccacacggugaccgggaagaccagccugccccgcugcuggcuggucuccaacggcagcuaccugaacgagacccacuucuccgacgacaucgagcagcaggccgacaacaugaucacggagaugcuccagaaggaguacauggaccggcagggcaagaccccgcuggggcugguggaccucuucguguucagcaccuccuucuaccugaucagcaucuuccugcaccuggucaagaucccgacccaccgccacgugaucggcaagcccugccccaagccccaccggcucaaccacauggggaucugcuccugcggccuguacaagcacccgggggugcccgucaaguggaagcgcugaggacuagucccuguucccagagcccacuuuuuuuucuuuuuuugaaauaaaauagccugucuuucagaucucaaaggcucuuuucagagccaccaaaaaaaaaaaaaaaaaaaaaaaaaaaaaaaaaaaaaaaaaaaaaaaaaaaaaaaaaaaaaaaaaaaaaaaaaaaaaaaaaaaaaaaaaaaaaaaaaaaaa

SEQ ID NO: 36823 - RNA, 1745 nt, Artificial Sequence
  mRNA product Design a-1 (hSL-A100) comprising derived and/or modified sequence from LASV(LASV237-NIG-2010;Clade II)__AIT17638__GPCmut10 (opt1)
aggagagucccgcagucggcguccagcggcucugcuuguucgugugugugucguugcaggccuuauucaagcuuaccaugggccagaucaucaccuucuuccaggaggugccccacgucaucgaggaggugaugaacaucgugcugaucgcccucagccugcuggccauccucaaggggaucuacaacgucgcgaccugcggccuguucgggcugguguccuuccuccugcugugcggccgcagcugcuccacgaccuacaaggggguguacgagcuccagacccuggagcuggacauggccagccucaacaugugcaugccgcuguccugcacgaagaacaacagccaccacuacaucauggucggcaacgagaccggccuggagcucacccugaccaacacguccaucaucaaccacaaguucugcaaccugagcgacgcccacaagaaggaccucuacgaccacgcccugauguccaucaucagcaccuuccaccuguccauccccaacuucaaccaguacgaggccaugagcugcgacuucaacgggggcaagaucuccgugcaguacaaccucagccacaccuacgcgguggacgccgccaaccacugcgggaccaucgccaacggcguccugcagacguucaugcggauggcguggggcggguccuacaucgcccuggacagcggcaagggguccugggacugcaucaugaccagcuaccaguaccucaucauccagaacaccaccugggaggaccacugccaguucucccgccccagccccaucggcuaccuggggcugcucagccagcggacgcgcgacaucuacaucucccggcgccugcugggcaccuucaccuggacccucagcgacuccgagggcaacgagacgcccgggggcuacugccugacccgguggaugcugaucgaggccgagcucaagugcuucgggaacaccgccguggccaagugcaacgagaagcacgacgaggaguucugcgacaugcugcgccuguucgacuucugcaagcaggcgauccggcgccucaagaccgaggcccagaugagcauccagcugaucaacaaggccgugaacgcccugaucaacgaccagcucaucaugaagaaccaccuccgggacaucaugggcauccccuacugcaacuacuccaaguacugguaccugaaccacacggucaccgggaagaccagccugccccgcugcuggcugguguccaacggcagcuaccugaacgagacccacuucuccgacgacaucgagcagcaggccgacaacaugaucacggagcuccugcagaaggaguacauggaccggcagggcaagaccccgcuggggcucguggaccuguucgucuucagcaccuccuucuaccugaucagcaucuuccugcaccucaucaagaucccgacccaccgccacaucacgggcaagcccugccccaagccccaccggcugaaccacauggggaucugcuccugcggccuguacaagcacccgggggugcccgugaaguggaagcgcugaggacuagucccuguucccagagcccacuuuuuuuucuuuuuuugaaauaaaauagccugucuuucagaucucaaaggcucuuuucagagccaccaaaaaaaaaaaaaaaaaaaaaaaaaaaaaaaaaaaaaaaaaaaaaaaaaaaaaaaaaaaaaaaaaaaaaaaaaaaaaaaaaaaaaaaaaaaaaaaaaaaaa

SEQ ID NO: 36824 - RNA, 1745 nt, Artificial Sequence
  mRNA product Design a-1 (hSL-A100) comprising derived and/or modified sequence from LASV(LASV253-NIG-2011;Clade II)__AIT17670__GPCmut10 (opt1)
aggagagucccgcagucggcguccagcggcucugcuuguucgugugugugucguugcaggccuuauucaagcuuaccaugggccagaucaucaccuucuuccaggaggugccccacgucaucgaggaggugaugaacaucgugcugaucgcccucagccugcuggccauccucaaggggaucuacaacgucgcgaccugcggccuguucgggcugguguccuuccuccugcugugcggccgcagcugcuccacgaccuacaaggggguguacgagcuccagacccuggagcuggacauggccagccucaacaugugcaugccgcuguccugcacgaagaacaacagccaccacuacaucauggucggcaacgagaccggccuggagcucacccugaccaacacguccaucaucaaccacaaguucugcaaccugagcgacgcccacaagaagaaccucuacgaccacgcccugauguccaucaucagcaccuuccaccuguccauccccaacuucaaccaguacgaggccaugagcugcgacuucaacgggggcaagaucuccgugcaguacaaccucagccacaccuacgcgguggacgccgccaaccacugcgggaccaucgccaacggcguccugcagacguucaugcggauggcguggggcggguccuacaucgcccuggacagcggcaagggguccugggacugcaucaugaccagcuaccaguaccucaucauccagaacaccaccugggaggaccacugccaguucucccgccccagccccaucggcuaccuggggcugcucagccagcggacgcgcgacaucuacaucucccggcgccugcugggcaccuucaccuggacccucagcgacuccgagggcaacgagacgcccgggggcuacugccugacccgguggaugcugaucgaggccgagcucaagugcuucgggaacaccgccguggccaagugcaacgagaagcacgacgaggaguucugcgacaugcugcgccuguucgacuucugcaagcaggcgauccggcgccucaaggccgaggcccagaugagcauccagcugaucaacaaggccgugaacgcccugaucaacgaccagcucaucaugaagaaccaccuccgggacaucaugggcaucccguacugcaacuacuccaaguacugguaccugaaccacaccgucacggggcgcaccagccugccccggugcuggcugguguccaacggcagcuaccugaacgagacccacuucuccgacgacaucgagcagcaggcggacaacaugaucaccgagcuccugcagaaggaguacaucgaccgccagggcaagacgccccuggggcucguggaccuguucgucuucagcaccuccuucuaccugaucagcaucuuccugcaccucgugaagaucccgacccaccggcacaucaucggcaagcccugccccaagccccaccgccugaaccacauggggaucugcuccugcggccuguacaagcacccgggggugcccgucaaguggaagcggugaggacuagucccuguucccagagcccacuuuuuuuucuuuuuuugaaauaaaauagccugucuuucagaucucaaaggcucuuuucagagccaccaaaaaaaaaaaaaaaaaaaaaaaaaaaaaaaaaaaaaaaaaaaaaaaaaaaaaaaaaaaaaaaaaaaaaaaaaaaaaaaaaaaaaaaaaaaaaaaaaaaaa

SEQ ID NO: 36825 - RNA, 1745 nt, Artificial Sequence
  mRNA product Design a-1 (hSL-A100) comprising derived and/or modified sequence from LASV(LASV254-NIG-2011;Clade II)__AIT17674__GPCmut10 (opt1)
aggagagucccgcagucggcguccagcggcucugcuuguucgugugugugucguugcaggccuuauucaagcuuaccaugggccagaucaucaccuucuuccaggaggugccccacgucaucgaggaggugaugaacaucgugcugaucgcccucagccugcuggccauccucaaggggaucuacaacgucgcgaccugcggccuguucgggcugguguccuuccuccugcugugcggccgcagcugcuccacgaccuacaaggggguguacgagcuccagacccuggagcuggacaugaccaaccucaacaugugcaugccgcugagcugcaccaagaacaacucccaccacuacaucauggucggcaacgagaccggccuggagcucacccugacgaacaccagcaucaucaaccacaaguucugcaaccuguccgacgcccacaagaagaaccucuacaaccacgcccugaugagcaucaucuccaccuuccaccugagcauccccaacuucaaccaguacgaggccauguccugcgacuucaacgggggcaagaucagcgugcaguacaaccucucccacagcuacgccguggacgcggccaaccacugcgggaccaucgccaacggcguccugcagacguucaugcggauggccuggggcggguccuacaucgcgcuggacagcggcaaggggaacugggacugcaucaugaccuccuaccaguaccucaucauccagaacaccaccugggaggaccacugccaguucagccgccccucccccaucggcuaccuggggcugcucagccagcggacgcgcgacaucuacaucagccggcgccugcugggcaccuucaccuggacccucuccgacagcgagggcaacgagacgcccgggggcuacugccugacccgguggaugcugaucgaggccgagcucaagugcuucgggaacaccgccguggccaagugcaacgagaagcacgacgaggaguucugcgacaugcugcgccuguucgacuucugcaagcaggccauccggcgccucaagaccgaggcgcaggccaacauccagcugaucaacaaggccgugaacgcccugaucaacgaccagcucaucaugaagaaccaccuccgggacaucaugggcauccccuacugcaacuacuccaaguacugguaccugaaccacacggucaccgggaagaccagccugccccgcugcuggcugguguccaacggcagcuaccugaacgagacccacuucuccgacgacaucgagcagcaggccgacaacaugaucacggagcuccugcagaaggaguacauggaccggcagggcaagaccccgcuggggcucguggaccuguucgucuucagcaccuccuucuaccugaucagcaucuuccugcaccucgugaagaucccgacccaccgccacgugaucggcaagcccugccccaagccccaccggcugaaccacauggggaucugcuccugcggccuguacaagcacccggggguccccgugaaguggaagcgcugaggacuagucccuguucccagagcccacuuuuuuuucuuuuuuugaaauaaaauagccugucuuucagaucucaaaggcucuuuucagagccaccaaaaaaaaaaaaaaaaaaaaaaaaaaaaaaaaaaaaaaaaaaaaaaaaaaaaaaaaaaaaaaaaaaaaaaaaaaaaaaaaaaaaaaaaaaaaaaaaaaaaa

SEQ ID NO: 36826 - RNA, 1745 nt, Artificial Sequence
  mRNA product Design a-1 (hSL-A100) comprising derived and/or modified sequence from LASV(Nig08-A19;Clade III)__ADU56618__GPCmut10 (opt1)
aggagagucccgcagucggcguccagcggcucugcuuguucgugugugugucguugcaggccuuauucaagcuuaccaugggccagaucgugaccuucuuccaggaggucccccacgugaucgaggaggugaugaacaucguccugaucgcccucagcauccuggccauccugaaggggcucuacaacaucgcgaccugcggccugaucgggcuggugacguuccuccugcuguccggccgcagcugcuccaugaccuacaaggggguguacgagcuccagacccuggagcugaacaugaacacccucaacaugugcaugccgcugagcugcaccaagaacaacucccaccacuacaucauggucggcaacgagaccggccuggagcucacccugacgaacaccagccugcuccaccacaaguucugcaaccuguccgacgcccacaagaagaaccuguacgaccacacccucaugagcaucaucuccaccuuccaccugagcauccccaacuucaaccaguacgaggccauguccugcgacuucaacgggggcaagaucacggugcaguacaaccugagccacuccuacgccaucgacgccgcgaaccacugcgggaccguggccaacggcguccuccagaccuucaugcggauggccuggggcgggagcuacaucgcccuggacuccggccgcgggaagugggacugcaucaugaccagcuaccaguaccugaucauccagaacacgaccugggaggaccacugccaguucucccggcccagccccaucggcuaccucgggcugcugucccagcgcacccgggacaucuacaucagccgccggcuccugggcaccuucacguggacccugagcgacuccgagggcaacgagacccccgggggcuacugccucacccgcuggaugcugaucgaggcggagcugaagugcuucgggaacacggccguggccaagugcaacgagaagcacgacgaggaguucugcgacaugcuccggcuguucgacuucugcaagcaggccauccgccggcugaaggccgaggcgcagaugagcauccagcucaucaacaaggccgugaacgcccugaucaacgaccagcugaucaugaagaaccaccuccgcgacaucaugggcauccccuacugcaacuacuccaaguacugguaccugaaccacaccagcaccgggcggaccucccugccccgcugcuggcucgucagcaacggcuccuaccugaacgagacgcacuucagcgacgacaucgagcagcaggccgacaacaugaucaccgagaugcugcagaaggaguaccucgaccggcagggcaagaccccgcuggggcugguggaccuguucguguucuccaccagcuucuaccucaucuccaucuuccugcaccuggucaagaucccgacgcaccgccacaucgugggcaagcccugccccaagccccaccggcucaaccacauggggaucugcagcugcggccuguacaagcagccgggggugcccguccgcuggaagcggugaggacuagucccuguucccagagcccacuuuuuuuucuuuuuuugaaauaaaauagccugucuuucagaucucaaaggcucuuuucagagccaccaaaaaaaaaaaaaaaaaaaaaaaaaaaaaaaaaaaaaaaaaaaaaaaaaaaaaaaaaaaaaaaaaaaaaaaaaaaaaaaaaaaaaaaaaaaaaaaaaaaaa

SEQ ID NO: 36827 - RNA, 1748 nt, Artificial Sequence
  mRNA product Design a-1 (hSL-A100) comprising derived and/or modified sequence from LASV(G1180-SLE-2010;Clade IV)__AIT17168__GPCmut10 (opt1)
aggagagucccgcagucggcguccagcggcucugcuuguucgugugugugucguugcaggccuuauucaagcuuaccaugggccagaucgugaccuucuuccaggaggucccccacgugaucgaggaggugaugaacaucguccugaucgcccucagcauccuggccgugcugaaggggcucuacaacuucgcgaccugcggccugguggggcugcucaccuuccugcugcucugcggccgcuccugcaccgccagccgguacaagggggucuacgagcugcagacccuggagcucaacauggagacccugaacaugugcaugccgcuguccugcaccaagaacaacagccaccacuacaucauggugggcaacgagaccggccucgagcugacccugacgaacaccuccaucaucaaccacaaguucugcaaccucagcgacgcccacaagaagaaccuguacgaccacgcccugauguccaucaucagcaccuuccaccucuccauccccaacuucaaccaguacgaggccaugagcugcgacuucaacgggggcaagaucuccgugcaguacaaccugagccacuccuacgcgggggacgccgccaaccacugcggcaccgucgccaacggggugcugcagacguucaugcgcauggcguggggcggcagcuacaucgcccucgacuccgggcacggcagcugggacugcaucaugaccuccuaccaguaccugaucauccagaacaccaccugggaggaccacugccaguucagccggcccucccccaucggguaccugggccuccugagccagcgcacgcgggacaucuacaucagccgccggcugcucggcaccuucaccuggacccuguccgacagcgaggggaaggacacgccgggcggguacugccugacccgcuggaugcucaucgaggccgagcugaagugcuucggcaacaccgccguggccaagugcaacgagaagcacgacgaggaguucugcgacaugcugcggcuguucgacuucugcaagcaggcgauccagcgccugaaggccgaggcccagauguccauccagcugaucaacaaggccgucaacgcccucaucaacgaccagcugaucaugaagaaccaccuccgggacaucauggggauccccuacugcaacuacagcaaguacugguaccucaaccacaccacgaccggcaagaccucccugcccaagugcuggcuggugagcaacggcuccuaccucaacgagacccacuucagcgacgacaucgagcagcaggcggacaacaugaucacggagaugcugcagaaggaguacauggagcgccaggggaagacgccccugggccucguggaccuguucgucuucuccaccagcuucuaccugaucuccaucuuccugcaccucgugaagaucccgacccaccggcacaucgugggcaagagcugccccaagccccaccgccugaaccacauggggaucugcuccugcgggcuguacaagcagcccggcgucccggugaaguggaagcggugaggacuagucccuguucccagagcccacuuuuuuuucuuuuuuugaaauaaaauagccugucuuucagaucucaaaggcucuuuucagagccaccaaaaaaaaaaaaaaaaaaaaaaaaaaaaaaaaaaaaaaaaaaaaaaaaaaaaaaaaaaaaaaaaaaaaaaaaaaaaaaaaaaaaaaaaaaaaaaaaaaaaa

SEQ ID NO: 36828 - RNA, 1748 nt, Artificial Sequence
  mRNA product Design a-1 (hSL-A100) comprising derived and/or modified sequence from LASV(G1442-SLE-2011;Clade IV)__AIT17180__GPCmut10 (opt1)
aggagagucccgcagucggcguccagcggcucugcuuguucgugugugugucguugcaggccuuauucaagcuuaccaugggccagaucgugaccuucuuccaggaggucccccacgugaucgaggaggugaugaacaucguccugaucgcccucagcauccuggccgugcugaaggggcucuacaacguggcgaccugcggccugaucgggcuggucacguuccuccugcugugcggccgcuccugcaccaccacccucuacaaggggguguacgagcugcagacgcuggagcucaacauggagacccugaacaugugcaugccgcugagcugcaccaagaacaacucccaccacuacauccgggugggcaacgagacgggccucgagcugacccugaccaacaccagcaucaucaaccacaaguucugcaaccucuccgacgcccacaagaagaaccuguacgaccacgcccugaugagcaucaucuccacguuccaccucagcauccccaacuucaaccaguacgaggccauguccugcgacuucaacgggggcaagaucagcguccaguacaaccugucccacagcuacgccggggacgcggccaaccacugcggcaccguggccaacggggugcugcagaccuucaugcgcauggccuggggcggcuccuacaucgcgcucgacagcgggcggggcaacugggacugcaucaugaccuccuaccaguaccugaucauccagaacacgaccugggacgaccacugccaguucagccgccccucccccaucggguaccugggccuccugagccagcggacccgcgacgucuacaucucccggcgccugcucggcaccuucacguggacccugagcgacagcgaggggaaggacaccccgggcggguacugccugacccgguggaugcucaucgaggccgagcugaagugcuucggcaacacggccguggccaagugcaacgagaagcacgacgaggaguucugcgacaugcugcgccucuucgacuucugcaagcaggccauccagcggcugaaggcggaggcccagauguccauccagcugaucaacaaggccgugaacgcccucaucaacgaccagcugaucaugaagaaccaccuccgcgacaucauggggauccccuacugcaacuacagcaaguacugguaccugaacaacaccgccaccggcaagaccucccugcccaagugcuggcugaucagcaacggcuccuaccucaacgagacgcacuucagcgacgacaucgagcaggaggcggacaacaugaucaccgagaugcugcagaaggaguacauggagcggcaggggaagacgccccugggccucgucgaccuguucguguucuccaccagcuucuaccugaucuccaucuuccugcaccucgugaagaucccgacccaccgccacaucgucggcaagagcugccccaagccccaccggcugaaccacauggggaucugcuccugcgggcuguacaagcagcccggcgugccggugcgcuggaagcggugaggacuagucccuguucccagagcccacuuuuuuuucuuuuuuugaaauaaaauagccugucuuucagaucucaaaggcucuuuucagagccaccaaaaaaaaaaaaaaaaaaaaaaaaaaaaaaaaaaaaaaaaaaaaaaaaaaaaaaaaaaaaaaaaaaaaaaaaaaaaaaaaaaaaaaaaaaaaaaaaaaaaa

SEQ ID NO: 36829 - RNA, 1748 nt, Artificial Sequence
  mRNA product Design a-1 (hSL-A100) comprising derived and/or modified sequence from LASV(G3010-SLE-2013;Clade IV)__AIT17344__GPCmut10 (opt1)
aggagagucccgcagucggcguccagcggcucugcuuguucgugugugugucguugcaggccuuauucaagcuuaccaugggccagaucgugaccuucuuccaggaggucccccacgugaucgaggaggugaugaacaucguccugaucgcccucagcauccuggccgugcugaaggggcucuacaacuucgcgaccugcggccugguggggcuggucacguuccuccugcugugcggccgcuccugcaccaccagccucuacaaggggguguacgagcugcagacccuggagcucaacauggagacgcugaacaugugcaugccgcuguccugcaccaagaacaacagccaccacuacaucauggugggcaacgagaccggccucgagcugacgcugaccaacaccuccaucaucaaccacaaguucugcaaccucagcgacgcccacaagaagaaccuguacaaccacgcccugauguccaucaucagcaccuuccaccucuccauccccaacuucaaccaguacgaggccaugagcugcgacuucaacgggggcaagaucuccguccaguacaaccugagccacuccuacgccggggacgcggccagccacugcggcacgguggccaacggggugcugcagaccuucaugcggauggccuggggcggcuccuacaucgcgcucgacagcggguacggcaagugggacugcaucaugaccuccuaccaguaccugaucauccagaacaccacgugggaggaccacugccaguucagccgccccucccccaucggguaccugggccuccugagccagcggacccgcgacaucuacaucagccggcgccugcucggcaccuucaccuggacgcuguccgacagcgaggggaaggacaccccgggcggguacugccugacccgguggaugcucaucgaggccgagcugaagugcuucggcaacaccgccgucgccaagugcaacgagaagcacgacgaggaguucugcgacaugcugcgccucuucgacuucugcaagcaggccauccagcggcugaagacggaggcgcagauguccauccagcugaucaacaaggccgugaacgcccucaucaacgaccagcugaucaugaagaaccaccuccgcgacaucauggggauccccuacugcaacuacagcaaguacugguaccugaaccacaccaccaccggcaagacgucccugcccaagugcuggcuggugagcaacggcuccuaccucaacgagacccacuucagcgacgacaucgagcagcaggccgacaacaugaucaccgagaugcugcagaaggaguacauggagcggcaggggaagacgccccugggccucgucgaccuguucguguucuccaccagcuucuaccugaucuccaucuuccugcaccucgugaagaucccgacccaccgccacaucgucggcaagagcugccccaagccccaccggcugaaccacauggggaucugcuccugcgggcuguacaagcagcccggcgugccggugcgcuggaagcggugaggacuagucccuguucccagagcccacuuuuuuuucuuuuuuugaaauaaaauagccugucuuucagaucucaaaggcucuuuucagagccaccaaaaaaaaaaaaaaaaaaaaaaaaaaaaaaaaaaaaaaaaaaaaaaaaaaaaaaaaaaaaaaaaaaaaaaaaaaaaaaaaaaaaaaaaaaaaaaaaaaaaa

SEQ ID NO: 36830 - RNA, 1748 nt, Artificial Sequence
  mRNA product Design a-1 (hSL-A100) comprising derived and/or modified sequence from LASV(G502-SLE-2009;Clade IV)__AIT17126__GPCmut10 (opt1)
aggagagucccgcagucggcguccagcggcucugcuuguucgugugugugucguugcaggccuuauucaagcuuaccaugggccagaucgugaccuucuuccaggaggucccccacgugaucgaggaggugaugaacaucguccugaucgcccucagcauccuggccgugcugaaggggcucuacaacuucgcgaccugcggccugguggggcugcucacguuccugcugcucugcggccgcuccugcaccaccgggcuguacaagggcgucuacgagcugcagacccucgagcugaacauggagacgcugaacaugugcaugccgcucagcugcaccaagaacaacucccaccacuacaucauggugggcaacgagaccgggcuggagcugacgcucaccaacaccagcaucaucaaccacaaguucugcaaccuguccgacgcccacaagaagaaccuguacgaccacgcccucaugagcaucaucuccaccuuccaccugagcauccccaacuucaaccaguacgaggccauguccugcgacuucaacggcgggaagaucagcgugcaguacaaccugucccacagcuacgccggcgacgcggccgaccacugcgggacggucgccaacggcgugcuccagaccuucaugcggauggccuggggcggguccuacaucgcgcuggacagcggccgcgggcggugggacugcaucaugaccuccuaccaguaccugaucauccagaacaccacgugggaggaccacugccaguucagccgccccucccccaucggcuaccucggccugcugagccagcggacccgcgacaucuacaucucccggcgccuccuggggaccuucaccuggacgcugagcgacagcgagggcaaggacacccccgggggcuacugccucacccgguggaugcugaucgaggccgagcugaagugcuucgggaacaccgccguggccaagugcaacgagaagcacgacgaggaguucugcgacaugcuccgccuguucgacuucugcaagcaggccauccagcggcugaaggcggaggcccagauguccauccagcucaucaacaaggccgucaacgcccugaucaacgaccagcuggugaugaagaaccaccuccgcgacaucaugggcauccccuacugcaacuacagccgguacugguaccugaaccacacgaccaccggccgcaccucccugcccaagugcuggcucgugagcaacggguccuaccugaacgagacgcacuucagcgacgacaucgagcagcaggccgacaacaugaucaccgagaugcugcagaaggaguacauggagcggcagggcaagaccccgcucgggcuggucgaccuguucguguucuccaccagcuucuaccugaucuccaucuuccuccaccuggugaagaucccgacgcaccgccacaucgucggcaagagcugccccaagccccaccggcugaaccacauggggaucugcuccugcggccucuacaagcagcccggcgugccggugaaguggaagcgcugaggacuagucccuguucccagagcccacuuuuuuuucuuuuuuugaaauaaaauagccugucuuucagaucucaaaggcucuuuucagagccaccaaaaaaaaaaaaaaaaaaaaaaaaaaaaaaaaaaaaaaaaaaaaaaaaaaaaaaaaaaaaaaaaaaaaaaaaaaaaaaaaaaaaaaaaaaaaaaaaaaaaa

SEQ ID NO: 36831 - RNA, 1748 nt, Artificial Sequence
  mRNA product Design a-1 (hSL-A100) comprising derived and/or modified sequence from LASV(G733-SLE-2010;Clade IV)__AIT17154__GPCmut10 (opt1)
aggagagucccgcagucggcguccagcggcucugcuuguucgugugugugucguugcaggccuuauucaagcuuaccaugggccagaucgugaccuucuuccaggaggucccccacgugaucgaggaggugaugaacaucguccugaucgcccucagcauccuggccgugcugaaggggcucuacaacuucgcgaccugcggcaucguggggcuggucuccuuccugcuccugugcggccgcagcugcacgaccucccuguacaaggggguguacgagcuccagacccuggagcugaacauggagacccucaacaugugcaugccgcugagcugcaccaagaacaacucccaccacuacaucauggugggcaacgagaccggccuggagcucacccugacgaacaccagcaucaucaaccacaaguucugcaaccuguccgacgcccacaagaagaaccucuacgaccacgcccugaugagcaucaucuccaccuuccaccugagcauccccaacuucaaccaguacgaggccauguccugcgacuucaacgggggcaagaucagcguccaguacaaccucucccacagcuacgccggggacgcggccaaccacugcggcaccaucgccaacggggugcugcagacguucaugcggauggccuggggcggcuccuacaucgcgcuggacagcgggcgcgaccggugggacugcaucaugaccuccuaccaguaccucaucauccagaacaccaccugggaggaccacugccaguucagccgccccucccccaucggcuaccuggggcugcucagccagcggacgcgcgacaucuacaucagccggcgccugcugggcaccuucaccuggacccucuccgacagcgagggcaaggacacgcccgggggcuacugccugacccgguggaugcugaucgaggccgagcucaagugcuucgggaacaccgccguggccaagugcaacgagaagcacgacgaggaguucugcgacaugcugcgccuguucgacuucugcaagcaggccauccagcggcucaaggcggaggcccagauguccauccagcugaucaacaaggccgucaacgcccugaucaacgaccagcucaucaugaagaaccaccuccgcgacaucaugggcauccccuacugcaacuacagcaaguacugguaccugaaccacaccacgaccgggaagaccucccugcccaagugcuggcuggugagcaacggcuccuaccugaacgagacccacuucagcgacgacaucgagcagcaggccgacaacaugaucacggagaugcuccagaaggaguacauggagcggcagggcaagaccccgcuggggcugguggaccucuucgucuucuccaccagcuucuaccugaucuccaucuuccugcaccuggugaagaucccgacccaccgccacguggucggcaagagcugccccaagccccaccggcucaaccacauggggaucugcuccugcggccuguacgggcagcccggcgugccggugaaguggaagcgcugaggacuagucccuguucccagagcccacuuuuuuuucuuuuuuugaaauaaaauagccugucuuucagaucucaaaggcucuuuucagagccaccaaaaaaaaaaaaaaaaaaaaaaaaaaaaaaaaaaaaaaaaaaaaaaaaaaaaaaaaaaaaaaaaaaaaaaaaaaaaaaaaaaaaaaaaaaaaaaaaaaaaa

SEQ ID NO: 36832 - RNA, 1748 nt, Artificial Sequence
  mRNA product Design a-1 (hSL-A100) comprising derived and/or modified sequence from MOPV/LASV reassortant(IGS-1;Clade IV)__AFY05576__GPCmut10 (opt1)
aggagagucccgcagucggcguccagcggcucugcuuguucgugugugugucguugcaggccuuauucaagcuuaccaugggccagaucgugaccuucuuccaggaggucccccacgugaucgaggaggugaugaacaucguccugaucgcccucagcgugcuggccgugcugaaggggcucuacaacuucgcgaccugcggccuggucgggcuggugacguuccuccugcugugcggccgcuccugcaccaccagccucuacaaggggguguacgagcugcagacccuggagcucaacauggagacgcugaacaugugcaugccgcuguccugcaccaagaacaacagccaccacuacaucauggucggcaacgagaccggccucgagcugacgcugaccaacaccuccaucaucaaccacaaguucugcaaccucagcgacgcccacaagaagaaccuguacgaccacgcccugauguccaucaucagcaccuuccaccucuccauccccaacuucaaccaguacgaggccaugagcugcgacuucaacgggggcaagaucuccgugcaguacaaccugagccacuccuacgccggggacgcggccaaccacugcggcacgguggccaacgggguccugcagaccuucaugcggauggccuggggcggcagcuacaucgcgcucgacuccgggcgcggcaacugggacugcaucaugaccagcuaccaguaccugaucauccagaacaccacgugggaggaccacugccaguucucccggcccagccccaucggguaccugggccuccugucccagcgcacccgggacaucuacaucagccgccggcugcucggcaccuucaccuggacgcugagcgacuccgagggggaggacaccccgggcggguacugccugacccgcuggaugcucaucgaggccgagcugaagugcuucggcaacaccgccguggccaagugcaacgagaagcacgacgaggaguucugcgacaugcugcggcuguucgacuucugcaagcaggccauccagcgccugaaggcggaggcccagaugagcauccagcugaucaacaaggccgugaacgcccucaucaacgaccagcugaucaugaagaaccaccuccgggacaucauggggauccccuacugcaacuacuccaaguacugguaccucaaccacacgaccaccggccgcaccagccugcccaagugcuggcuggucuccaacggcagcuaccucaacgagacgcacuucuccgacgacaucgagcagcaggccgacaacaugaucaccgagaugcugcagaaggaguacauggagcggcaggggaagacgccccugggccucguggaccuguucguguucagcaccuccuucuaccugaucagcaucuuccugcaccucgucaagaucccgacccaccgccacaucguggggaaguccugccccaagccccaccggcugaaccacaugggcaucugcagcugcgggcuguacaagcagcccggcgugccggucaaguggaagcgcugaggacuagucccuguucccagagcccacuuuuuuuucuuuuuuugaaauaaaauagccugucuuucagaucucaaaggcucuuuucagagccaccaaaaaaaaaaaaaaaaaaaaaaaaaaaaaaaaaaaaaaaaaaaaaaaaaaaaaaaaaaaaaaaaaaaaaaaaaaaaaaaaaaaaaaaaaaaaaaaaaaaaa

SEQ ID NO: 36833 - RNA, 1748 nt, Artificial Sequence
  mRNA product Design a-1 (hSL-A100) comprising derived and/or modified sequence from LASV(LM765-SLE-2012;Clade IV)__AIT17814__GPCmut10 (opt1)
aggagagucccgcagucggcguccagcggcucugcuuguucgugugugugucguugcaggccuuauucaagcuuaccaugggccagaucgugaccuucuuccaggaggucccccacgugaucgaggaggugaugaacaucguccugaucgcccucagcauccuggccgugcugaaggggcucuacaacuucgcgaccugcggccugguggggcuggucacguuccuccugcugugcggccgcuccugcaccaccagccucuacaaggggguguacgagcugcagacccuggagcucaacauggagacgcugaacaugugcaugccgcuguccugcaccaagaacaacagccaccacuacaucauggugggcaacgagaccggccucgagcugacgcugaccaacaccuccaucaucgaccacaaguucugcaaccucagcgacgcccaccggaagaaccuguacgaccacgcccugauguccaucaucagcaccuuccaccucuccauccccaacuucaaccaguacgaggccaugagcugcgacuucaacgggggcaagaucuccguccaguacaaccugagccacuccuacgccaaggacgcggccgaccacugcgggacgguggccaacggcgugcugcagaccuucaugcgcauggccuggggcgggagcuacaucgcgcucgacuccggccgggggcgcugggacugcaucaugaccagcuaccaguaccugaucauccagaacaccacgugggaggaccacugccaguucucccggcccagccccaucggcuaccuggggcuccugucccagcgcacccgggacaucuacaucagccgccggcugcucggcaccuucaccuggacgcugagcgacuccgagggcaaggacacccccgggggcuacugccugacccgcuggaugcucaucgaggccgagcugaagugcuucgggaacaccgccgucgccaagugcaacgagaagcacgacgaggaguucugcgacaugcugcggcuguucgacuucugcaagcaggccauccagcgccugaaggcggaggcccagaugagcauccagcugaucaacaaggccgugaacgcccucaucaacgaccagcugaucaugaagaaccaccuccgggacaucaugggcauccccuacugcaacuacuccaaguacugguaccucaaccacacgaccaccgggaagaccagccugcccaagugcuggcugguguccaacggcagcuaccucaacgagacgcacuucuccgacgacaucgagcagcaggccgacaacaugaucaccgagaugcugcagaaggaguacauggagcgccagggcaagaccccgcuggggcucgucgaccuguucguguucagcaccuccuucuaccugaucagcaucuuccugcaccucgugaagaucccgacgcaccggcacaucgucggcaagcccugccccaagccccaccgccugaaccacauggggaucugcuccugcggccuguacaagcagccgggggugcccgugaaguggaagcggugaggacuagucccuguucccagagcccacuuuuuuuucuuuuuuugaaauaaaauagccugucuuucagaucucaaaggcucuuuucagagccaccaaaaaaaaaaaaaaaaaaaaaaaaaaaaaaaaaaaaaaaaaaaaaaaaaaaaaaaaaaaaaaaaaaaaaaaaaaaaaaaaaaaaaaaaaaaaaaaaaaaaa

SEQ ID NO: 36834 - RNA, 1748 nt, Artificial Sequence
  mRNA product Design a-1 (hSL-A100) comprising derived and/or modified sequence from LASV(LM776-SLE-2012;Clade IV)__AIT17824__GPCmut10 (opt1)
aggagagucccgcagucggcguccagcggcucugcuuguucgugugugugucguugcaggccuuauucaagcuuaccaugggccagaucgugaccuucuuccaggaggucccccacgugaucgaggaggugaugaacaucguccugaucgcccucagcauccuggccgugcugaaggggcucuacaacuucgcgaccugcggccugguggggcuggucacguuccuccugcugugcggccgcuccugcaccaccagcguguacaaggggguguacgagcuccagacccuggagcugaacauggagacgcucaacaugugcaugccgcuguccugcaccaagaacaacagccaccacuacaucauggucggcaacgagaccggccuggagcucacgcugaccaacaccuccaucaucaaccacaaguucugcaaccugagcgacgcccacaagaagaaccucuacgaccacgcccugauguccaucaucagcaccuuccaccuguccauccccaacuucaaccaguacgaggccaugagcugcgacuucaacgggggcaagaucuccgugcaguacaaccucagccacuccuacgccggggacgcggccaaccacugcggcacgguggccaacgggguccugcagaccuucaugcggauggccuggggcggcagcuacaucgcgcuggacuccgggcacggcaagugggacugcaucaugaccagcuaccaguaccucaucauccagaacaccacgugggaggaccacugccaguucucccgccccagccccaucggguaccugggccugcucucccagcggacccgcgacaucuacaucagccggcgccugcugggcaccuucaccuggacgcucagcgacuccgaggggaaggacaccccgggcggguacugccugacccgguggaugcugaucgaggccgagcucaagugcuucggcaacaccgccguggccaagugcaacgagaagcacgacgaggaguucugcgacaugcugcgccuguucgacuucugcaagcaggccauccagcggcucaaggcggaggcccagaugagcauccagcugaucaacaaggccgugaacgcccugaucaacgaccagcucaucaugaagaaccaccuccgcgacaucauggggauccccuacugcaacuacuccaaguacugguaccugaaccacacgaccaccggcaagaccagccugcccaagugcuggcuggucuccaacggcagcuaccugaacgagacgcacuucuccgacgacaucgagcagcaggccgacaacaugaucaccgagaugcuccagaaggaguacauggagcggcaggggaagacgccccugggccugguggaccucuucguguucagcaccuccuucuaccugaucagcaucuuccugcaccuggucaagaucccgacccaccgccacaucguggggaaguccugccccaagccccaccggcucaaccacaugggcaucugcagcugcgggcuguacaagcagcccggcgugccgguccgcuggaagcggugaggacuagucccuguucccagagcccacuuuuuuuucuuuuuuugaaauaaaauagccugucuuucagaucucaaaggcucuuuucagagccaccaaaaaaaaaaaaaaaaaaaaaaaaaaaaaaaaaaaaaaaaaaaaaaaaaaaaaaaaaaaaaaaaaaaaaaaaaaaaaaaaaaaaaaaaaaaaaaaaaaaaa

SEQ ID NO: 36835 - RNA, 1748 nt, Artificial Sequence
  mRNA product Design a-1 (hSL-A100) comprising derived and/or modified sequence from LASV(Mad39;Clade IV)__ANH09722__GPCmut10 (opt1)
aggagagucccgcagucggcguccagcggcucugcuuguucgugugugugucguugcaggccuuauucaagcuuaccaugggccagaucgugaccuucuuccaggaggucccccacgugaucgaggaggugaugaacaucguccugaucgcccucagcauccuggccgugcugaaggggcucuacaacguggcgaccugcggccugaucgggcuggucacguuccuccugcugugcggccgcuccugcaccaccacccucuacaaggggguguacgagcugcaggcccuggagcucaacauggagacgcugaacaugugcaugccgcugagcugcaccaagaacaacucccaccacuacauccgggugggcaacgagaccggccucgagcugacgcugaccaacaccagccucaucaaccacaaguucugcaaccuguccgacgcccacaagaagaaccuguacgaccacgcccucaugagcaucaucuccaccuuccaccugagcauccccaacuucaaccaguacgaggccauguccugcgacuucaacgacgggaagaucagcguccaguacaaccugucccacacguacgcgggcgacaccgccaaccacugcgggaccguggccaacggcgugcuccagaccuucaugcgcauggccuggggcgggagcuacaucgcgcuggacuccggccgcgggggcugggacugcaucaugacgagcuaccaguaccugaucauccagaacaccaccugggaggaccacugccaguucucccggcccagccccaucggguaccucggccugcugucccagcggacccgcgacaucuacaucagccggcgccuccugggcacguucaccuggacccuguccgacagcgaggggaaggacaccccgggcggguacugccucacgcgguggaugcugaucgaggccgagcugaagugcuucggcaacaccgccgucgccaagugcaacgagaagcacgacgaggaguucugcgacaugcuccgccuguucgacuucugcaagcaggccauccagcggcugaaggcggaggcccagaugagcauccagcucaucaacaaggccgugaacgcccugaucaacgaccagcugaucaugaagaaccaccuccgcgacaucauggggauccccuacugcaacuacuccaaguacugguaccugaaccacaccgugaccggcaagacgagccugcccaagugcuggcucgucuccaacggcagcuaccugaacgagacccacuucuccgacgacaucgagcagcaggccgacaacaugaucaccgagaugcugcagaaggaguacauggagcggcaggggaagacgccccucggccugguggaccuguucguguucagcaccuccuucuaccugaucagcaucuuccuccaccuggucaagaucccgacccaccgccacgugguggggaagcccugccccaagccccaccggcugaaccacaugggcaucugcuccugcggguucuacaagcagccgggcguccccgugcgcuggaagcggugaggacuagucccuguucccagagcccacuuuuuuuucuuuuuuugaaauaaaauagccugucuuucagaucucaaaggcucuuuucagagccaccaaaaaaaaaaaaaaaaaaaaaaaaaaaaaaaaaaaaaaaaaaaaaaaaaaaaaaaaaaaaaaaaaaaaaaaaaaaaaaaaaaaaaaaaaaaaaaaaaaaaa

SEQ ID NO: 36836 - RNA, 1748 nt, Artificial Sequence
  mRNA product Design a-1 (hSL-A100) comprising derived and/or modified sequence from LASV(Z0947-SLE-2011;Clade IV)__AIT17840__GPCmut10 (opt1)
aggagagucccgcagucggcguccagcggcucugcuuguucgugugugugucguugcaggccuuauucaagcuuaccaugggccagaucgugaccuucuuccaggaggucccccacgugaucgaggaggugaugaacaucguccugaucgcccucagcauccuggccgugcugaaggggcucuacaacuucgcgaccugcggccugguggggcuggucacguuccuccugcugugcggccgcuccugcaccaucagccucuacaaggggguguacgagcugcagacccuggagcucaacauggagacccugaacaugugcaugccgcuguccugcaccaagaacaacagccaccacuacaucauggugggcaacgagaccggccucgagcugacccugacgaacaccuccaucaucaaccacaaguucugcaaccucagcgacgcccacaagaagaaccuguacgaccacgcccugauguccaucaucagcaccuuccaccucuccauccccaacuucaaccaguacgaggccaugagcugcgacuucaacgggggcaagaucuccguccaguacaaccugagccacuccuacgccggggacgcggccaaccacugcggcaccguggccaacggggugcugcagacguucaugcggauggccuggggcggcagcuacaucgcgcucgacuccgggcgcgaccggugggacugcaucaugaccagcuaccaguaccugaucauccagaacaccaccugggaggaccacugccaguucucccgccccagccccaucggcuaccuggggcuccugucccagcggacgcgcgacaucuacaucagccggcgccugcucggcaccuucaccuggacccugagcgacuccgagggcaaggacacgcccgggggcuacugccugacccgguggaugcucaucgaggccgagcugaagugcuucgggaacaccgccgucgccaagugcaacgagaagcacgacgaggaguucugcgacaugcugcgccucuucgacuucugcaagcaggccauccagcggcugaaggcggaggcccagaugagcauccagcugaucaacaaggccgugaacgcccucaucaacgaccagcugaucaugaagaaccaccuccgcgacaucaugggcauccccuacugcaacuacuccaaguacugguaccugaaccacaccacgaccgggaagaccagccugcccaagugcuggcugguguccaacggcagcuaccucaacgagacccacuucuccgacgacaucgagcagcaggccgacaacaugaucacggagaugcugcagaaggaguacauggagcggcagggcaagaccccgcuggggcucgucgaccuguucguguucagcaccuccuucuaccugaucagcaucuuccugcaccucgugaagaucccgacccaccgccacaucgucggcaagcccugccccaagccccaccggcugaaccacauggggaucugcuccugcggccuguacaagcagccgggggugcccgugaaguggaagcgcugaggacuagucccuguucccagagcccacuuuuuuuucuuuuuuugaaauaaaauagccugucuuucagaucucaaaggcucuuuucagagccaccaaaaaaaaaaaaaaaaaaaaaaaaaaaaaaaaaaaaaaaaaaaaaaaaaaaaaaaaaaaaaaaaaaaaaaaaaaaaaaaaaaaaaaaaaaaaaaaaaaaaa

SEQ ID NO: 36837 - RNA, 1748 nt, Artificial Sequence
  mRNA product Design a-1 (hSL-A100) comprising derived and/or modified sequence from LASV(Josiah;Clade IV)__NP_694870__GPCmut10 (opt1)
aggagagucccgcagucggcguccagcggcucugcuuguucgugugugugucguugcaggccuuauucaagcuuaccaugggccagaucgugaccuucuuccaggaggucccccacgugaucgaggaggugaugaacaucguccugaucgcccucagcgugcuggccgugcugaaggggcucuacaacuucgcgaccugcggccuggucgggcuggugaccuuccuccugcugugcggccgcuccugcaccaccagccucuacaaggggguguacgagcugcagacccuggagcucaacauggagacgcugaacaugugcaugccgcuguccugcaccaagaacaacagccaccacuacaucauggucggcaacgagaccggccucgagcugacccugacgaacaccuccaucaucaaccacaaguucugcaaccucagcgacgcccacaagaagaaccuguacgaccacgcccugauguccaucaucagcaccuuccaccucuccauccccaacuucaaccaguacgaggccaugagcugcgacuucaacgggggcaagaucuccgugcaguacaaccugagccacuccuacgccggggacgcggccaaccacugcggcaccguggccaacgggguccugcagacguucaugcggauggccuggggcggcagcuacaucgcgcucgacuccgggcgcggcaacugggacugcaucaugaccagcuaccaguaccugaucauccagaacaccaccugggaggaccacugccaguucucccggcccagccccaucggguaccugggccuccugucccagcgcacgcgggacaucuacaucagccgccggcugcucggcaccuucaccuggacccugagcgacuccgaggggaaggacacgccgggcggguacugccugacccgcuggaugcucaucgaggccgagcugaagugcuucggcaacaccgccguggccaagugcaacgagaagcacgacgaggaguucugcgacaugcugcggcuguucgacuucugcaagcaggccauccagcgccugaaggcggaggcccagaugagcauccagcugaucaacaaggccgugaacgcccucaucaacgaccagcugaucaugaagaaccaccuccgggacaucauggggauccccuacugcaacuacuccaaguacugguaccucaaccacaccacgaccggccgcaccagccugcccaagugcuggcuggucuccaacggcagcuaccucaacgagacccacuucuccgacgacaucgagcagcaggccgacaacaugaucacggagaugcugcagaaggaguacauggagcggcaggggaagacgccccugggccugguggaccucuucguguucagcaccuccuucuaccugaucagcaucuuccugcaccucgucaagaucccgacccaccgccacaucguggggaaguccugccccaagccccaccggcugaaccacaugggcaucugcagcugcgggcuguacaagcagcccggcgugccggucaaguggaagcgcugaggacuagucccuguucccagagcccacuuuuuuuucuuuuuuugaaauaaaauagccugucuuucagaucucaaaggcucuuuucagagccaccaaaaaaaaaaaaaaaaaaaaaaaaaaaaaaaaaaaaaaaaaaaaaaaaaaaaaaaaaaaaaaaaaaaaaaaaaaaaaaaaaaaaaaaaaaaaaaaaaaaaa

SEQ ID NO: 36838 - RNA, 1745 nt, Artificial Sequence
  mRNA product Design a-1 (hSL-A100) comprising derived and/or modified sequence from LASV(LP;Clade I)__AAF86701__GPCmut10 (opt1)
aggagagucccgcagucggcguccagcggcucugcuuguucgugugugugucguugcaggccuuauucaagcuuaccaugggccagaucaucaccuucuuccaggaggugccccacgucaucgaggaggugaugaacaucgugcugaucgcccucagccugcuggccauccucaaggggcuguacaacaucgcgaccugcggcaucaucgggcuggucgccuuccucuuccugugcggcaaguccugcagccugacgcucaagggcggguacgagcugcagacccuggagcucaacauggagacccugaacaugugcaugccgcuguccugcaccaagaacagcucccaccacuacauccgcgugggcaacgagacggggcucgagcugacccugaccaacaccagcaucaucaaccacaaguucugcaaccucuccgacgcccacaagaagaaccuguacgaccacgcccugaugagcaucaucuccacguuccaccucagcauccccaacuucaaccaguacgaggccauguccugcgacuucaacggcgggaagaucagcgugcaguacaaccugucccacagcuacgcgggcgacgccgccgagcacugcgggaccgucgccaacggcgugcugcagaccuucaugcggauggcguggggcgggcgcuacaucgcccucgacuccggcaaggggaacugggacugcaucaugaccagcuaccaguaccugaucauccagaacacgaccugggaggaccacugccaguucucccggcccagccccaucggcuaccugggccuccugucccagcgcacccgggacaucuacaucagccgccggcugcucgggaccuucacguggacccugagcgacuccgagggcaacgagacccccgggggcuacugccugacccgcuggaugcucaucgaggccgagcugaagugcuucgggaacacggccguggccaagugcaacgagaagcacgacgaggaguucugcgacaugcugcggcuguucgacuucugcaagcaggcgauccgccggcugaaggccgaggcccagaugagcauccagcugaucaacaaggccgucaacgcccucaucaacgaccagcugaucaugaagaaccaccuccgcgacaucaugggcauccccuacugcaacuacuccaaguacugguaccucaaccacaccagcuccggccggaccagccugcccaagugcuggcugaucuccaacgggagcuaccucaacgagacccaguucuccgacgacaucgagcagcaggcggacaacaugaucacggagaugcugcagaaggaguacaucgagcgccagggcaagaccccgcuggggcugguggacaucuucaucuucagcaccuccuucuaccucaucagcaucuuccugcaccugaucaagaucccgacccaccggcacaucgugggcaagcccugccccaagccccaccgccucaaccacaugggggucugcuccugcggccuguacaagcacccgggcgugcccacgaaguggaagcggugaggacuagucccuguucccagagcccacuuuuuuuucuuuuuuugaaauaaaauagccugucuuucagaucucaaaggcucuuuucagagccaccaaaaaaaaaaaaaaaaaaaaaaaaaaaaaaaaaaaaaaaaaaaaaaaaaaaaaaaaaaaaaaaaaaaaaaaaaaaaaaaaaaaaaaaaaaaaaaaaaaaaa

SEQ ID NO: 36839 - RNA, 1745 nt, Artificial Sequence
  mRNA product Design a-1 (hSL-A100) comprising derived and/or modified sequence from LASV(803213;Clade II)__AAF86703__GPCmut10 (opt1)
aggagagucccgcagucggcguccagcggcucugcuuguucgugugugugucguugcaggccuuauucaagcuuaccaugggccagaucaucaccuucuuccaggaggugccccacgucaucgaggaggugaugaacaucgugcugaucgcccucagccugcuggccauccucaaggggaucuacaacgucgcgaccugcggccuguucgggcugaucuccuuccuccugcugugcggccgcagcugcuccgugacguacaaggggguguacgagcuccagacccuggagcugaacauggccaaccucaacaugugcaugccgcugagcugcaccaagaacaacucccaccacuacaucauggucggcaacgagaccggccuggagcucacgcugaccaacaccagcaucaucaaccacaaguucugcaaccuguccgacgcccacaagaagaaccucuacgaccacgcccugaugagcaucaucuccaccuuccaccugagcauccccaacuucaaccaguacgaggccauguccugcgacuucaacgggggcaagaucagcgugcaguacaaccucucccacagcuucgcgguggacgccgccaaccacugcgggacgaucgccaacggcguccugcagaccuucaugcggauggcguggggcggguccuacaucgcccuggacagcggcaaggggaacugggacugcaucaugaccuccuaccaguaccucaucauccagaacaccacgugggaggaccacugccaguucagccgccccucccccaucggcuaccuggggcugcucagccagcggacccgcgacaucuacaucagccggcgccugcugggcaccuucaccuggacgcucuccgacagcgagggcaacgaggcccccgggggcuacugccugacccgguggaugcugaucgaggccgagcucaagugcuucgggaacaccgccguggcgaagugcaacgagaagcacgacgaggaguucugcgacaugcugcgccuguucgacuucugcaagcaggccaucaagcggcucaagaccgaggcccagauguccauccagcugaucaacaaggccgugaacgcccugaucaacgaccagcucaucaugaagaaccaccuccgcgacaucaugggcauccccuacugcaacuacagccgguacugguaccugaaccacacggucaccgggaagaccucccugccccgcugcuggcuggugagcaacggcuccuaccugaacgagacccacuucagcgacgacaucgagcagcaggcggacaacaugaucacggagaugcuccagaaggaguacauggaccggcagggcaagaccccgcuggggcugguggaccuguucgucuucuccaccagcuucuaccucaucuccaucuuccugcaccuggugaagaucccgacccaccgccacaucgugggcaagcccugccccaagccccaccggcucaaccacauggggaucugcagcugcggccuguacaagcacccggggguccccgugaaguggaagcgcugaggacuagucccuguucccagagcccacuuuuuuuucuuuuuuugaaauaaaauagccugucuuucagaucucaaaggcucuuuucagagccaccaaaaaaaaaaaaaaaaaaaaaaaaaaaaaaaaaaaaaaaaaaaaaaaaaaaaaaaaaaaaaaaaaaaaaaaaaaaaaaaaaaaaaaaaaaaaaaaaaaaaa

SEQ ID NO: 36840 - RNA, 1745 nt, Artificial Sequence
  mRNA product Design a-1 (hSL-A100) comprising derived and/or modified sequence from LASV(GA391;Clade III)__CAA36645__GPCmut10 (opt1)
aggagagucccgcagucggcguccagcggcucugcuuguucgugugugugucguugcaggccuuauucaagcuuaccaugggccagaucgugaccuucuuccaggaggucccccacgugaucgaggaggugaugaacaucguccugaucgcccucagcauccuggccauccugaaggggcucuacaacguggcgaccugcggccugaucgggcuggugaccuuccuccugcuguccggccgcagcugcucccucaucuacaaggggaccuacgagcugcagacccuggagcucaacauggagacccugaacaugugcaugccgcugagcugcacgaagaacaacucccaccacuacauccgggucggcaacgagaccggccucgagcugacccugaccaacacgagcauccucaaccacaaguucugcaaccuguccgacgcccacaagcgcaaccuguacgaccacagccucauguccaucaucagcaccuuccaccuguccauccccaacuucaaccaguacgaggccaugagcugcgacuucaacgggggcaagaucaccgugcaguacaaccugucccacagcuucgccguggacgccgcggggcacugcggcacccucgccaacgggguccugcagacguucaugcggauggccuggggcggcuccuacaucgcccuggacagcgggcgcggcaacugggacugcaucaugaccuccuaccaguaccucaucauccagaacaccaccugggacgaccacugccaguucagccggcccucccccaucggguaccugggccugcucagccagcgcacgcgggacaucuacaucagccgccggcugcugggcaccuucaccuggacccucuccgacagcgaggggaacgagacgccgggcggguacugccugacccgcuggaugcugaucgaggcggagcucaagugcuucggcaacaccgccguggccaagugcaacgagaagcacgacgaggaguucugcgacaugcugcggcuguucgacuucugcaagcaggccauccgccggcucaagaccgaggcccagauguccauccagcugaucaacaaggcggugaacgcccugaucaacgaccagcucaucaugaagaaccaccuccgcgacaucauggggauccccuacugcaacuacagccgguacugguaccugaaccacacguccaccggcaagaccagccugccccgcugcuggcugaucuccaacggcagcuaccugaacgagaccaaguucuccgacgacaucgagcagcaggccgacaacaugaucacggagaugcugcagaaggaguacaucgaccggcaggggaagacgccccucggccuggucgaccuguucguguucagcaccuccuucuaccucaucagcaucuuccugcaccuggugaagaucccgacccaccgccacaucgucgggaagcccugccccaagccccaccggcucaaccacaugggcaucugcuccugcgggcuguacaagcagccgggcgugcccgugcgcuggaagcggugaggacuagucccuguucccagagcccacuuuuuuuucuuuuuuugaaauaaaauagccugucuuucagaucucaaaggcucuuuucagagccaccaaaaaaaaaaaaaaaaaaaaaaaaaaaaaaaaaaaaaaaaaaaaaaaaaaaaaaaaaaaaaaaaaaaaaaaaaaaaaaaaaaaaaaaaaaaaaaaaaaaaa

SEQ ID NO: 36841 - RNA, 1748 nt, Artificial Sequence
  mRNA product Design a-1 (hSL-A100) comprising derived and/or modified sequence from LASV(AV;Clade V)__CCA30314__GPCmut10 (opt1)
aggagagucccgcagucggcguccagcggcucugcuuguucgugugugugucguugcaggccuuauucaagcuuaccaugggccagaucgugaccuucuuccaggaggucccccacgugaucgaggaggugaugaacaucguccugaucgcccucagcauccuggccgugcugaaggggcucuacaacaucgcgaccugcggccugaucgggcugaucacguuccuccugcugugcggccgcuccugcagcuccaaccucuacaaggggguguacgagcugcagagccuggaccucaacauggagacccugaacaugugcaugccgcuguccugcaccaagaacaacagccaccacuacauccgggucggcaacgacaccggccucgagcugacgcugaccaacaccuccauccucaaccacaaguucugcaaccugagcgacgcccacaagaaggaccuguacgaccacgcccucauguccaucaucagcaccuuccaccuguccauccccaacuucaaccaguacgaggccaugagcugcgacuucaacgggggcaagaucuccgugcaguacaaccugagccacuccuacgccaucgacgcggccaaccacugcgggacgguggccaacggcauccuccagaccuucaugcgcauggccuggggcgggagcuacaucgcgcuggacuccggccgggggaacugggacugcaucaugaccagcuaccaguaccugaucauccagaacaccacgugggagaaccacugccaguucucccgccccagccccaucggcuaccucgggcugcugagccagcggacccgcgacaucuacaucucccggcgccuccugggcaccuucaccuggacgcugagcgacuccgagggcaacgccacccccgggggcuacugccucacccgguggaugcugaucgaggccgagcugaagugcuucgggaacaccgccgucgccaagugcaacgagaagcacgacgaggaguucugcgacaugcuccgccuguucgacuucugcaagcaggcgaucagccggcugaaguccgaggcccagaugagcauccagcucaucaacaaggccgugaacgcccugaucaacgaccagcugaucaugaagaaccaccuccgcgacaucaugggcauccccuacugcaacuacuccaaguacugguaccugaaccacacgaucaccgggaagaccagccugcccaagugcuggcucguguccaacggcagcuaccugaacgagacccacuucuccgacgacaucgagcagcaggccgacaacaugaucacggagaugcugcagaaggaguacauggagcggcagggcaagaccccgcuggggcucgucgaccuguucguguucagcaccuccuucuaccugaucagcaucuuccuccgccuggugaagaucccgacccaccggcacaucgucggcaagcccugccccaagccccaccgccugaaccacauggggaucugcuccugcggccucuacaagcagccgggggugcccgugcgguggaagcgcugaggacuagucccuguucccagagcccacuuuuuuuucuuuuuuugaaauaaaauagccugucuuucagaucucaaaggcucuuuucagagccaccaaaaaaaaaaaaaaaaaaaaaaaaaaaaaaaaaaaaaaaaaaaaaaaaaaaaaaaaaaaaaaaaaaaaaaaaaaaaaaaaaaaaaaaaaaaaaaaaaaaaa

SEQ ID NO: 36842 - RNA, 1745 nt, Artificial Sequence
  mRNA product Design a-1 (hSL-A100) comprising derived and/or modified sequence from LASV(Togo/2016/7082;Clade VI)__AMR44577__GPCmut10 (opt1)
aggagagucccgcagucggcguccagcggcucugcuuguucgugugugugucguugcaggccuuauucaagcuuaccaugggccagaucaucaccuucuuccaggaggugccccacgucaucgaggaggugaugaacaucgugcugaucgcccucagccugcuggccauccucaagggggucuacaacguggcgaccugcggcaucaucgggcuggugacguuccuguuccucugcggccgcuccugcagccugaucuacaagggguccuacgagcugcagacccucgagcugaacauggagacccugaacaugugcaugccgcucagcugcaccaagaacuccagccaccacuacauccgggucggcaacgagacgggccuggagcugacccucaccaacaccuccaucaucaaccacaaguucugcaaccugagcgacgcccacaagcgcaaccuguacgaccacgcccucauguccauccugagcacguuccaccuguccauccccaacuucaaccaguacgaggccaugagcugcgacuucaacgggggcaagaucuccgugcaguacaaccucagccacgccuacgcgguggacgccgccgagcacugcgggaccgucgccaacggcgugcugcagaccuucaugcggauggcguggggcggguccuacaucgcccuggacagcggccgcgggaacugggacugcaucaugaccuccuaccaguaccucaucauccagaacacgaccugggaggaccacugccaguucagccggcccucccccaucggcuaccuggggcugcucagccagcgcacccgggacaucuacaucagccgccggcugcugggcaccuucacguggacccucuccgacagcgagggcaacgagacccccgggggcuacugccugacccgcuggaugcugaucgaggccgagcucaagugcuucgggaacacggccguggccaagugcaacgagaagcacgacgaggaguucugcgacaugcugcggcuguucgacuucugcaagcaggcgauccagcgccucaaguccgaggcccagaugagcauccagcugaucaacaaggccgucaacgcccugaucaacgaccagcucaucaugaagaaccaccuccgggacaugaugggcauccccuacugcaacuacuccaaguacugguaccugaaccacaccagcuccgggcgcaccagccugcccaagugcuggcugguguccaacggcagcuaccugaacgagacccacuucuccgacgacaucgagcagcaggccgacaacaugaucacggagaugcuccagaaggaguacaucgaccggcagggcaagaccccgcuggggcugguggaccuguucgucuucagcaccuccuucuaccucaucagcaucuuccugcaccugaucaagaucccgacccaccgccacaucgugggcaagcccugccccaagccccaccggcucaaccacauggggaucugcuccugcggccuguacaagcagccgggggugcccacgcgcuggaagcggugaggacuagucccuguucccagagcccacuuuuuuuucuuuuuuugaaauaaaauagccugucuuucagaucucaaaggcucuuuucagagccaccaaaaaaaaaaaaaaaaaaaaaaaaaaaaaaaaaaaaaaaaaaaaaaaaaaaaaaaaaaaaaaaaaaaaaaaaaaaaaaaaaaaaaaaaaaaaaaaaaaaaa

SEQ ID NO: 36843 - RNA, 1745 nt, Artificial Sequence
  mRNA product Design a-1 (hSL-A100) comprising derived and/or modified sequence from LASV(KAK-428;Clade n.d. (VII))__ANH09740__GPCmut10 (opt1)
aggagagucccgcagucggcguccagcggcucugcuuguucgugugugugucguugcaggccuuauucaagcuuaccaugggccagaucgugaccuucuuccaggaggucccccacgugaucgaggaggugaugaacaucguccugaucgcccucagccugcuggccauccucaaggggcuguacaacuucgcgaccugcggcgugaucgggcugaucacguuccuccugcugugcggccgcuccugcagcgccaccuacaaggggcaguacgagcuccagacccuggagcugaacauggagucccucaacaugugcaugccgcugagcugcaccaagaacaacucccaccacuacauccgggccggcaacaacacgggccuggagcucacccugaccaacaccagcaucaucucccacaaguucugcaaccugagcgacgcccacaagaagaaccucuacgaccacacgcugauguccaucaucaccaccuuccaccugagcauccccaacuucaaccaguacgaggccauguccugcgacuucaacgggggcaagaucagcauccaguacaaccucucccacagcuacgcgggggacgccgcccagcacugcggcaccguggccaacgggguccugcagacguucaugcgcauggcguggggcggcuccuaccuggcccucgacagcgggcggcgcggcugggacugcaucaucuccagcuaccaguaccugaucauccagaacaccaccugggacgaccacugccaguucucccggcccagccccaucggguaccugggcuucgugagccagaagacccgcgacaucuacaucucccggcgccuccugggcacguucaccuggacccugagcgacuccgaggggcacgacaugccgggcggguacugccucacccgguggaugcugaucgaggccgaccugaagugcuucggcaacacggccguggccaagugcaacgagaagcacgacgaggaguucugcgacauguggcgccucuucgacuucugcaagcaggcgauccagcggcugaaggccgaggcccagaugaacauccagcugaucaacaaggccgucaacgcccucaucaacgaccagcugaugaugaagaaccaccuccgcgacaucauggggauccccuacugcaacuacagcaaguucugguaccugaacaacaccaccaccggccggacgucccugccccgcugcuggcugaucagcaacggcuccuaccucaacgagacccacuucagcgacgacaucgagcagcaggcggacaacaugaucaccgagaugcugcagaaggaguacauggaccggcaggggaagacgccccugggccucguggaccuguucguguucuccaccagcuucuaccugaucaccaucuuccugcaccucgucaagaucccgacccaccgccacaucguggggaagcccugccccaagccccaccggcugaaccacaugggcaucugcuccugcgggcuguacaagcagccgggcgugcccguccgcuggaagcggugaggacuagucccuguucccagagcccacuuuuuuuucuuuuuuugaaauaaaauagccugucuuucagaucucaaaggcucuuuucagagccaccaaaaaaaaaaaaaaaaaaaaaaaaaaaaaaaaaaaaaaaaaaaaaaaaaaaaaaaaaaaaaaaaaaaaaaaaaaaaaaaaaaaaaaaaaaaaaaaaaaaaa

SEQ ID NO: 36844 - RNA, 1745 nt, Artificial Sequence; identical to SEQ ID NO: 36838
  mRNA product Design a-1 (hSL-A100) comprising derived and/or modified sequence from LASV(Pinneo-NIG-1969;Clade I)__AIT17836__GPCmut10 (opt1)

SEQ ID NO: 36845 - RNA, 1745 nt, Artificial Sequence
  mRNA product Design a-1 (hSL-A100) comprising derived and/or modified sequence from LASV(ISTH0009-NIG-2011;Clade II)__AIT17404__GPCmut10 (opt1)
aggagagucccgcagucggcguccagcggcucugcuuguucgugugugugucguugcaggccuuauucaagcuuaccaugggccagaucaucaccuucuuccaggaggugccccacgucaucgaggaggugaugaacaucgugcugaucgcccucagccugcuggccauccucaaggggaucuacaacgucgcgaccugcggccuguucgggcugguguccuuccuccugcugugcggccgcagcugcuccacgaccuacaaggggguguacgagcuccagacccuggagcuggacauggccagccucaacaugugcaugccgcuguccugcaccaagaacaacagccaccacuacaucauggucggcaacgagacgggccuggagcucacccugaccaacaccuccaucaucaaccacaaguucugcaaccugagcgacgcccacaagaagaaccucuacgaccacgcccugauguccaucaucagcacguuccaccuguccauccccaacuucaaccaguacgaggccaugagcugcgacuucaacgggggcaagaucuccgugcaguacaaccucagccacgcguacgccguggacgccgccaaccacugcgggaccaucgcgaacggcguccugcagaccuucaugcggauggccuggggcggguccuacaucgcccuggacagcggcaagggguccugggacugcaucaugaccagcuaccaguaccucaucauccagaacacgaccugggaggaccacugccaguucucccgccccagccccaucggcuaccuggggcugcucagccagcggacccgcgacaucuacaucucccggcgccugcugggcaccuucacguggacccucagcgacuccgagggcaacgagacccccgggggcuacugccugacccgguggaugcugaucgaggccgagcucaagugcuucgggaacacggccguggcgaagugcaacgagaagcacgacgaggaguucugcgacaugcugcgccuguucgacuucugcaagcaggccauccggcgccucaagaccgaggcccagaugagcauccagcugaucaacaaggccgugaacgcccugaucaacgaccagcucaucaugaagaaccaccuccgggacaucaugggcauccccuacugcaacuacuccaaguacugguaccugaaccacaccgucaccgggaagacgagccugccccgcugcuggcugguguccaacggcagcuaccugaacgagacccacuucuccgacgacaucgagcagcaggcggacaacaugaucaccgagcuccugcagaaggaguacauggaccggcagggcaagaccccgcuggggcugguggaccucuucgucuucagcacguccuucuaccugaucagcaucuuccugcaccucaucaagaucccgacccaccgccacaucaccggcaagcccugccccaagccccaccggcugaaccacauggggaucugcuccugcggccuguacaagcacccgggggugcccgugaaguggaagcgcugaggacuagucccuguucccagagcccacuuuuuuuucuuuuuuugaaauaaaauagccugucuuucagaucucaaaggcucuuuucagagccaccaaaaaaaaaaaaaaaaaaaaaaaaaaaaaaaaaaaaaaaaaaaaaaaaaaaaaaaaaaaaaaaaaaaaaaaaaaaaaaaaaaaaaaaaaaaaaaaaaaaaa

SEQ ID NO: 36846 - RNA, 1745 nt, Artificial Sequence
  mRNA product Design a-1 (hSL-A100) comprising derived and/or modified sequence from LASV(ISTH2010-NIG-2012;Clade II)__AIT17482__GPCmut10 (opt1)
aggagagucccgcagucggcguccagcggcucugcuuguucgugugugugucguugcaggccuuauucaagcuuaccaugggccagaucaucaccuucuuccaggaggugccccacgucaucgaggaggugaugaacaucgugcugaucgcccucagccugcuggccauccucaaggggaucuacaacgucgcgaccugcggccuguucgggcugguguccuuccuccugcugugcggccgcagcugcuccacgaccuacaaggggguguacgagcuccagacccuggagcuggacauggccagccucaacaugugcaugccgcuguccugcaccaagaacaacagccaccacuacaucauggucggcaacgagacgggccuggagcucacccugaccaacaccuccaucaucaaccacaaguucugcaaccugagcgacgcccacaagaagaaccucuacgaccacgcccugauguccaucaucagcacguuccaccuguccauccccaacuucaaccaguacgaggccaugagcugcgacuucaacgggggcaagaucuccgugcaguacaaccucagccacgcguacgccguggacgccgccaaccacugcgggaccaucgcgaacggcguccugcagaccuucaugcggauggccuggggcggguccuacaucgcccuggacagcggcaagggguccugggacugcaucaugaccagcuaccaguaccucaucauccagaacaucacgugggaggaccacugccaguucucccgccccagccccaucggcuaccuggggcugcucagccagcggacccgcgacaucuacaucucccggcgccugcugggcaccuucaccuggacgcucagcgacuccgagggcaacgagacccccgggggcuacugccugacccgguggaugcugaucgaggccgagcucaagugcuucgggaacaccgccguggcgaagugcaacgagaagcacgacgaggaguucugcgacaugcugcgccuguucgacuucugcaagcaggccauccggcgccucaagacggaggcccagaugagcauccagcugaucaacaaggccgugaacgcccugaucaacgaccagcucaucaugaagaaccaccuccgggacaucaugggcauccccuacugcaacuacuccaaguacugguaccugaaccacaccgucaccgggaagaccagccugccccgcugcuggcugguguccaacggcagcuaccugaacgagacgcacuucuccgacgacaucgagcagcaggcggacaacaugaucaccgagcuccugcagaaggaguacaucgaccggcagggcaagaccccgcuggggcugguggaccucuucgucuucagcaccuccuucuaccugaucagcaucuuccugcaccucgugaagaucccgacgcaccgccacguggucggcaagcccugccccaagccccaccggcugaaccacauggggaucugcuccugcggccuguacaagcacccgggggugcccgugaaguggaagcgcugaggacuagucccuguucccagagcccacuuuuuuuucuuuuuuugaaauaaaauagccugucuuucagaucucaaaggcucuuuucagagccaccaaaaaaaaaaaaaaaaaaaaaaaaaaaaaaaaaaaaaaaaaaaaaaaaaaaaaaaaaaaaaaaaaaaaaaaaaaaaaaaaaaaaaaaaaaaaaaaaaaaaa

SEQ ID NO: 36847 - RNA, 1745 nt, Artificial Sequence
  mRNA product Design a-1 (hSL-A100) comprising derived and/or modified sequence from LASV(Lassa virus/H.sapiens-wt/NGA/2015/ISTH_0543;Clade II)__AVO03639__GPCmut10 (opt1)
aggagagucccgcagucggcguccagcggcucugcuuguucgugugugugucguugcaggccuuauucaagcuuaccaugggccagaucaucaccuucuuccaggaggugccccacgucaucgaggaggugaugaacaucgugcugaucgcccucagccugcuggccauccucaaggggaucuacaacgucgcgaccugcggccuguucgggcugguguccuuccuccugcugugcggccgcagcugcuccacgaccuacaaggggguguacgagcuccagacccuggagcuggacauggccaaccucaacaugugcaugccgcugagcugcaccaagaacaacucccaccacuacaucauggucggcaacgagacgggccuggagcucacccugaccaacaccagcaucaucaaccacaaguucugcaaccuguccgacgcccacaagaagaaccucuacgaccacgcccugaugagcaucaucuccacguuccaccugagcauccccaacuucaaccaguacgaggccauguccugcgacuucaacgggggcaagaucagcgugcaguacaaccucucccacaccuacgcgguggacgccgccaaccacugcgggaccaucgccaacggcguccugcagaccuucaugcggauggcguggggcgggagcuacaucgcccuggacuccggcaaggggagcugggacugcaucaugacguccuaccaguaccucgugauccagaacaccaccugggaggaccacugccaguucagccgccccucccccaucggcuaccuggggcugcucagccagcggacccgcgacaucuacaucagccggcgccugcugggcacguucaccuggacccucuccgacagcgagggcaacgagacccccgggggcuacugccugacgcgguggaugcugaucgaggccgagcucaagugcuucgggaacaccgccguggccaagugcaacgagaagcacgacgaggaguucugcgacaugcugcgccuguucgacuucugcaagcaggcgauccggcgccucaagaccgaggcccagauguccauccagcugaucaacaaggccgucaacgcccugaucaacgaccagcucaucaugaagaaccaccuccgggacaucaugggcaucccguacugcaacuacagcaaguacugguaccugaaccacaccgugacggggaagaccucccugccccgcugcuggcuggugagcaacggcuccuaccugaacgagacccacuucagcgacgacaucgagcagcaggccgacaacaugaucaccgagcuccugcagaaggaguacaucgaccggcagggcaagacgccccuggggcuggucgaccucuucguguucuccaccagcuucuaccugaucuccaucuuccugcaccucgugaagaucccgacccaccgccacaucaccggcaagcccugccccaagccccaccggcugaaccacauggggaucugcagcugcggccuguacaagcacccggggguccccgugaaguggaagcgcugaggacuagucccuguucccagagcccacuuuuuuuucuuuuuuugaaauaaaauagccugucuuucagaucucaaaggcucuuuucagagccaccaaaaaaaaaaaaaaaaaaaaaaaaaaaaaaaaaaaaaaaaaaaaaaaaaaaaaaaaaaaaaaaaaaaaaaaaaaaaaaaaaaaaaaaaaaaaaaaaaaaaa

SEQ ID NO: 36848 - RNA, 1745 nt, Artificial Sequence
  mRNA product Design a-1 (hSL-A100) comprising derived and/or modified sequence from LASV(Lassa virus/H.sapiens-wt/NGA/2016/ISTH_0009;Clade II)__AVO03571__GPCmut10 (opt1)
aggagagucccgcagucggcguccagcggcucugcuuguucgugugugugucguugcaggccuuauucaagcuuaccaugggccagaucaucaccuucuuccaggaggugccccacgucaucgaggaggugaugaacaucgugcugaucgcccucagccugcuggccauccucaaggggaucuacaacgucgcgaccugcggccugcuggggcucguguccuuccugcugcucugcggccgcagcugcuccacgaccuacaaggggguguacgagcugcagacccuggagcucgacauggccagccugaacaugugcaugccgcuguccugcaccaagaacaacagccaccacuacaucauggucggcaacgagacgggccucgagcugacccugaccaacaccuccaucaucaaccacaaguucugcaaccucagcgacgcccacaagaagaaccuguacgaccacgcccugauguccaucaucagcacguuccaccucuccauccccaacuucaaccaguacgaggccaugagcugcgacuucaacgggggccggaucuccgugcaguacaaccugagccacuccuacgcgguggacgccgccaaccacugcgggaccaucgccaacggcguccugcagaccuucaugcgcauggcguggggcgggagcuacaucgcccucgacuccggcaaggggagcugggacugcaucaugaccuccuaccaguaccugaucauccagaacacgaccugggaggaccacugccaguucagccggcccagccccaucggcuaccuggggcuccugucccagcgcacccgggacaucuacaucagccgccggcugcucggcaccuucacguggacccuguccgacagcgagggcaacgagacccccgggggcuacugccugacccgcuggaugcucaucgaggccgagcugaagugcuucgggaacacggccguggccaagugcaacgagaagcacgacgaggaguucugcgacaugcugcggcuguucgacuucugcaagcaggcgauccgccggcugaagaccgaggcccagauguccauccagcugaucaacaaggccgugaacgcccucaucaacgaccagcugaucaugaagaaccaccuccgcgacaucaugggcauccccuacugcaacuacagcaaguacugguaccucaaccacaccgucaccgggaagacgucccugccccggugcuggcuggugagcaacggcuccuaccucaacgagacccacuucagcgacgacaucgagcagcaggccgacaacaugaucaccgagcugcugcagaaggaguacaucgaccgccagggcaagaccccgcuggggcucguggaccuguucgucuucuccacgagcuucuaccugaucuccaucuuccuccaccuggugaagaucccgacccaccggcacaucaccggcaagcccugccccaagccccaccgccugaaccacauggggaucugcagcugcggccucuacaaccacccgggggugcccgucaaguggaagcggugaggacuagucccuguucccagagcccacuuuuuuuucuuuuuuugaaauaaaauagccugucuuucagaucucaaaggcucuuuucagagccaccaaaaaaaaaaaaaaaaaaaaaaaaaaaaaaaaaaaaaaaaaaaaaaaaaaaaaaaaaaaaaaaaaaaaaaaaaaaaaaaaaaaaaaaaaaaaaaaaaaaaa

SEQ ID NO: 36849 - RNA, 1745 nt, Artificial Sequence
  mRNA product Design a-1 (hSL-A100) comprising derived and/or modified sequence from LASV(Lassa virus/H.sapiens-wt/NGA/2016/ISTH_0017;Clade II)__AVO03567__GPCmut10 (opt1)
aggagagucccgcagucggcguccagcggcucugcuuguucgugugugugucguugcaggccuuauucaagcuuaccaugggccagaucaucaccuucuuccaggaggugccccacgucaucgaggaggugaugaacaucgugcugaucgcccucagccugcuggccauccucaaggggaucuacaacgucgcgaccugcggccuguucgggcugguguccuuccuccugcugugcggccgcagcugcuccacgaccuacaaggggguguacgagcuccagacccuggagcuggacauggccagccucaacaugugcaugccgcuguccugcaccaagaacaacagccaccacuacaucauggucggcaacgagacgggccuggagcucacccugaccaacaccuccaucaucaaccacaaguucugcaaccugagcgacgcccacaagaagaaccucuacgaccacgcccugauguccaucaucagcacguuccaccuguccauccccaacuucaaccaguacgaggccaugagcugcgacuucaacgggggcaagaucuccgugcaguacaaccucagccacaccuacgcgaucgacgccgccaaccacugcgggaccaucgccaacggcgugcugcagaccuucaugcggauggcguggggcggguccuacaucgcccuggacagcggcaagggguccugggacugcaucaugacgagcuaccaguaccucaucauccagaacaccaccugggaggaccacugccaguucucccgccccagccccaucggcuaccuggggcugcucagccagcggacccgcgacaucuacaucucccggcgccugcugggcacguucaccuggacccucagcgacuccgagggcaacgagacccccgggggcuacugccugacgcgguggaugcugaucgaggccgagcucaagugcuucgggaacaccgccgucgccaagugcaacgagaagcacgacgaggaguucugcgacaugcugcgccuguucgacuucugcaagcaggcgauccggcgccucaagaccgaggcccagaugagcauccagcugaucaacaaggccgugaacgcccugaucaacgaccagcucaucaugaagaaccaccuccgggacaucaugggcaucccguacugcaacuacuccaaguacugguaccugaaccacaccgugacggggaagaccagccugccccgcugcuggcuggucuccaacggcagcuaccugaacgagacccacuucuccgacgacaucgagcagcaggccgacaacaugaucaccgagcuccugcagaaggaguacauggaccggcagggcaagacgccccuggggcugguggaccucuucguguucagcaccuccuucuaccugaucagcaucuuccugcaccucguccgcaucccgacccaccggcacgugaucggcaagcccugccccaagccccaccgccugaaccacauggggaucugcuccugcggccuguacaagcacccgggggugcccgucaaguggaagcggugaggacuagucccuguucccagagcccacuuuuuuuucuuuuuuugaaauaaaauagccugucuuucagaucucaaaggcucuuuucagagccaccaaaaaaaaaaaaaaaaaaaaaaaaaaaaaaaaaaaaaaaaaaaaaaaaaaaaaaaaaaaaaaaaaaaaaaaaaaaaaaaaaaaaaaaaaaaaaaaaaaaaa

SEQ ID NO: 36850 - RNA, 1745 nt, Artificial Sequence
  mRNA product Design a-1 (hSL-A100) comprising derived and/or modified sequence from LASV(Lassa virus/H.sapiens-wt/NGA/2018/ISTH_0959;Clade II)__AVV65099__GPCmut10 (opt1)
aggagagucccgcagucggcguccagcggcucugcuuguucgugugugugucguugcaggccuuauucaagcuuaccaugggccagaucaucaccuucuuccaggaggugccccacgucaucgaggaggugaugaacaucgugcugaucgcccucagccugcuggccauccucaaggggaucuacaacgucgugaccugcggccuguucgggcugguguccuuccuccugcugugcggccgcagcugcuccacgaccuacaagggggucuacgagcuccagacccuggagcuggacauggcgagccucaacaugugcaugccgcuguccugcaccaagaacaacagccaccacuacaucauggugggcaacgagacgggccuggagcucacccugaccaacaccuccaucaucaaccacaaguucugcaaccugagcgacgcccacaagaagaaccucuacgaccacgcccugauguccaucaucagcacguuccaccuguccauccccaacuucaaccaguacgaggccaugagcugcgacuucaacgggggcaagaucuccgugcaguacaaccucagccacgccuacgcgaucgacgccgccaaccacugcgggaccaucgccaacggcguccugcagaccuucaugcggauggcguggggcggguccuacaucgcccuggacagcggcaagggguccugggacugcaucaugaccagcuaccaguaccucaucauccagaacacgaccugggaggaccacugccaguucucccgccccagccccaucggcuaccuggggcugcucagccagcggacccgcgacaucuacaucucccggcgccugcugggcaccuucacguggacccucagcgacuccgagggcaacgagacccccgggggcuacugccugacccgguggaugcugaucgaggccgagcucaagugcuucgggaacacggccguggccaagugcaacgagaagcacgacgaggaguucugcgacaugcugcgccuguucgacuucugcaagcaggcgauccggcgccucaagaccgaggcccagaugagcauccagcugaucaacaaggccgugaacgcccugaucaacgaccagcucaucaugaagaaccaccuccgggacaucaugggcauccccuacugcaacuacuccaaguacugguaccugaaccacaccgucaccgggaagacgagccugccccgcugcuggcugguguccaacggcagcuaccugaacgagacccacuucuccgacgacaucgagcagcaggccgacaacaugaucaccgagcuccugcagaaggaguacaucgaccggcagggcaagaccccgcuggggcugguggaccucuucgucuucagcacguccuucuaccugaucagcaucuuccugcaccucgugaagaucccgacccaccgccacgugaucggcaagcccugccccaagccccaccggcugaaccacauggggaucugcuccugcggccuguacaagcacccggggguccccgugaaguggaagcgcugaggacuagucccuguucccagagcccacuuuuuuuucuuuuuuugaaauaaaauagccugucuuucagaucucaaaggcucuuuucagagccaccaaaaaaaaaaaaaaaaaaaaaaaaaaaaaaaaaaaaaaaaaaaaaaaaaaaaaaaaaaaaaaaaaaaaaaaaaaaaaaaaaaaaaaaaaaaaaaaaaaaaa

SEQ ID NO: 36851 - RNA, 1745 nt, Artificial Sequence
  mRNA product Design a-1 (hSL-A100) comprising derived and/or modified sequence from LASV(LASV003-NIG-2008;Clade II)__AIT17580__GPCmut10 (opt1)
aggagagucccgcagucggcguccagcggcucugcuuguucgugugugugucguugcaggccuuauucaagcuuaccaugggccagaucaucaccuucuuccaggaggugccccacgucaucgaggaggugaugaacaucgugcugaucgcccucagccugcuggccauccucaaggggaucuacaacgucgcgaccugcggccuguucgggcugguguccuuccuccugcugugcggccgcagcugcuccacgaccuacaaggggguguacgagcuccagacccuggagcuggacauggccagccucaacaugugcaugccgcuguccugcaccaagaacaacagccaccacuacaucauggucggcaacgagacgggccuggagcucacccugaccaacaccuccaucaucaaccacaaguucugcaaccugagcgacgcccacaagaagaaccucuacgaccacgcccugauguccaucaucagcacguuccaccuguccauccccaacuucaaccaguacgaggccaugagcugcgacuucaacgggggcaagaucuccgugcaguacaaccucagccacaccuacgcgguggacgccgccaaccacugcgggaccaucgccaacggcguccugcagaccuucaugcggauggcguggggcggguccuacaucgcccuggacagcggcaagggguccugggacugcaucaugacgagcuaccaguaccucaucauccagaacaccaccugggaggaccacugccaguucucccgccccagccccaucggcuaccuggggcugcucagccagcggacccgcgacaucuacaucucccggcgccugcugggcacguucaccuggacccucagcgacuccgagagcaacgagaccccgggcggguacugccugacgcgguggaugcugaucgaggccgagcucaagugcuucggcaacaccgccguggccaagugcaacgagaagcacgacgaggaguucugcgacaugcugcgccuguucgacuucugcaagcaggcgauccggcgccucaaggccgaggcccagauguccauccagcugaucaacaaggccgugaacgcccugaucaacgaccagcucaucaugaagaaccaccuccgggacaucauggggauccccuacugcaacuacagcaaguacugguaccugaaccacaccgucaccggccgcacgucccugccccggugcuggcuggugagcaacggguccuaccugaacgagacccacuucagcgacgacaucgagcagcaggcggacaacaugaucaccgagcuccugcagaaggaguacauggaccgccagggcaagacgccccugggccugguggaccucuucgucuucuccaccagcuucuaccugaucuccaucuuccugcaccucgugaagaucccgacccaccggcacgugaucgggaagcccugccccaagccccaccgccugaaccacaugggcaucugcagcugcgggcuguacaagcacccgggcguccccgugaaguggaagcggugaggacuagucccuguucccagagcccacuuuuuuuucuuuuuuugaaauaaaauagccugucuuucagaucucaaaggcucuuuucagagccaccaaaaaaaaaaaaaaaaaaaaaaaaaaaaaaaaaaaaaaaaaaaaaaaaaaaaaaaaaaaaaaaaaaaaaaaaaaaaaaaaaaaaaaaaaaaaaaaaaaaaa

SEQ ID NO: 36852 - RNA, 1745 nt, Artificial Sequence
  mRNA product Design a-1 (hSL-A100) comprising derived and/or modified sequence from LASV(LASV035-NIG-2009;Clade II)__AIT17588__GPCmut10 (opt1)
aggagagucccgcagucggcguccagcggcucugcuuguucgugugugugucguugcaggccuuauucaagcuuaccaugggccagaucaucaccuucuuccaggaggugccccacgucaucgaggaggugaugaacaucgugcugaucgcccucagccugcuggccauccucaaggggaucuacaacgucgcgaccugcggccuguucgggcugguguccuuccuccugcugugcggccgcagcugcuccacgaccuacaaggggguguacgagcuccagacccuggagcuggacauggccagccucaacaugugcaugccgcuguccugcaccaagaacaacagccaccacuacaucauggucggcaacgagacgggccuggagcucacccugaccaacaccuccaucaucaaccacaaguucugcaaccugagcgacgcccacaagaagaaccucuacgaccacgcccugauguccaucaucagcacguuccaccuguccauccccaacuucaaccaguacgaggccaugagcugcgacuucaacgggggcaagaucuccgugcaguacaaccucagccacgcguacgccguggacgccgccaaccacugcgggaccaucgcgaacggcguccugcagaccuucaugcggauggccuggggcggguccuacaucgcccuggacagcggcaagggguccugggacugcaucaugaccagcuaccaguaccucaucauccagaacacgaccugggaggaccacugccaguucucccgccccagccccaucggcuaccuggggcugcucagccagcggacccgcgacaucuacaucucccggcgccugcugggcaccuucacguggacccucagcgacuccgagggcaacgagacccccgggggcuacugccugacccgguggaugcugaucgaggccgagcucaagugcuucgggaacacggccguggcgaagugcaacgagaagcacgacgaggaguucugcgacaugcugcgccuguucgacuucugcaagcaggccauccggcgccucaaggccgaggcccagaugagcauccagcugaucaacaaggccgugaacgcgcugaucaacgaccagcucaucaugaagaaccaccuccgggacaucaugggcauccccuacugcaacuacuccaaguacugguaccugaaccacaccgucaccgggaagaccagccugccccgcugcuggcugguguccaacggcagcuaccugaacgagacgcacuucuccgacgacaucgagcagcaggccgacaacaugaucaccgagcuccugcagaaggaguacaucgaccggcagggcaagaccccgcuggggcugguggaccucuucgucuucagcaccuccuucuaccugaucagcaucuuccugcaccucgugaagaucccgacgcaccgccacgugaucggcaagcccugccccaagccccaccggcugaaccacauggggaucugcuccugcggccuguacaagcacccggggguccccgugaaguggaagcgcugaggacuagucccuguucccagagcccacuuuuuuuucuuuuuuugaaauaaaauagccugucuuucagaucucaaaggcucuuuucagagccaccaaaaaaaaaaaaaaaaaaaaaaaaaaaaaaaaaaaaaaaaaaaaaaaaaaaaaaaaaaaaaaaaaaaaaaaaaaaaaaaaaaaaaaaaaaaaaaaaaaaaa

SEQ ID NO: 36853 - RNA, 1745 nt, Artificial Sequence
  mRNA product Design a-1 (hSL-A100) comprising derived and/or modified sequence from LASV(LASV1000-NIG-2009;Clade II)__AIT17782__GPCmut10 (opt1)
aggagagucccgcagucggcguccagcggcucugcuuguucgugugugugucguugcaggccuuauucaagcuuaccaugggccagaucaucaccuucuuccaggaggugccccacgucaucgaggaggugaugaacaucgugcugaucgcccucagccugcuggccauccucaaggggaucuacaacgucgcgaccugcggccuguucgggcugguguccuuccuccugcugugcggccgcagcugcuccacgaccuacaaggggguguacgagcuccagacccuggagcuggacauggccagccucaacaugugcaugccgcuguccugcaccaagaacaacagccaccacuacaucauggucggcaacgagacgggccuggagcucacccugaccaacaccuccaucaucaaccacaaguucugcaaccugagcgacgcccacaagaagaaccucuacgaccacgcccugauguccaucaucagcacguuccaccuguccauccccaacuucaaccaguacgaggccaugagcugcgacuucaacgggggcaagaucuccgugcaguacaaccucagccacaccuacgcgguggacgccgccaaccacugcgggaccaucgccaacggcguccugcagaccuucaugcggauggcguggggcggguccuacaucgcccuggacagcggcaagggguccugggacugcaucaugacgagcuaccaguaccucaucauccagaacaccaccugggaggaccacugccaguucucccgccccagccccaucggcuaccuggggcugcucagccagcggacccgcgacaucuacaucucccggcgccugcugggcacguucaccuggacccucagcgacuccgagggcaacgagacccccgggggcuacugccugacgcgguggaugcugaucgaggccgagcucaagugcuucgggaacaccgccguggccaagugcaacgagaagcacgacgaggaguucugcgacaugcugcgccuguucgacuucugcaagcaggcgaucaagcggcucaagaccgaggcccagaugagcauccagcugaucaacaaggccgugaacgcccugaucaacgaccagcucaucaugaagaaccaccuccgcgacaucaugggcaucccguacugcaacuacuccaaguacugguaccugaaccacaccgucacggggaagaccagccugccccggugcuggcugguguccaacggcagcuaccugaacgagacccacuucuccgacgacaucgagcagcaggccgacaacaugaucaccgagcuccugcagaaggaguacaucgaccgccagggcaagacgccccuggggcugguggaccucuucgucuucagcaccuccuucuaccugaucagcaucuuccugcaccucgugaagaucccgacccaccggcacguggucggcaagcccugccccaagccccaccgccugaaccacauggggaucugcuccugcggccuguacaagcacccgggggugcccgugaaguggaagcggugaggacuagucccuguucccagagcccacuuuuuuuucuuuuuuugaaauaaaauagccugucuuucagaucucaaaggcucuuuucagagccaccaaaaaaaaaaaaaaaaaaaaaaaaaaaaaaaaaaaaaaaaaaaaaaaaaaaaaaaaaaaaaaaaaaaaaaaaaaaaaaaaaaaaaaaaaaaaaaaaaaaaa

SEQ ID NO: 36854 - RNA, 1745 nt, Artificial Sequence
  mRNA product Design a-1 (hSL-A100) comprising derived and/or modified sequence from LASV(LASV221-NIG-2010;Clade II)__AIT17624__GPCmut10 (opt1)
aggagagucccgcagucggcguccagcggcucugcuuguucgugugugugucguugcaggccuuauucaagcuuaccaugggccagaucaucaccuucuuccaggaggugccccacgucaucgaggaggugaugaacaucgugcugaucgcccucagccugcuggccauccucaaggggaucuacaacgucgcgaccugcggccuguucgggcugguguccuuccuccugcugugcggccgcagcugcuccacgaccuacaaggggguguacgagcuccagacccuggagcuggacauggccagccucaacaugugcaugccgcuguccugcaccaagaacaacagccaccacuacaucauggucggcaacgagacgggccuggagcucacccugaccaacaccuccaucaucaaccacaaguucugcaaccugagcgacgcccacaagaagaaccucuacgaccacgcccugauguccaucaucagcacguuccaccuguccauccccaacuucaaccaguacgaggccaugagcugcgacuucaacgggggcaagaucuccgugcaguacaaccucagccacaccuacgcgaucgacgccgccaaccacugcgggaccaucgccaacggcgugcugcagaccuucaugcggauggcguggggcggguccuacaucgcccuggacagcggcaagggguccugggacugcaucaugacgagcuaccaguaccucaucauccagaacaccaccugggaggaccacugccaguucucccgccccagccccaucggcuaccuggggcugcucagccagcggacccgcgacaucuacaucucccggcgccugcugggcacguucaccuggacccucagcgacuccgagggcaacgagacccccgggggcuacugccugacgcgguggaugcugaucgaggccgagcucaagugcuucgggaacaccgccgucgccaagugcaacgagaagcacgacgaggaguucugcgacaugcugcgccuguucgacuucugcaagcaggcgauccggcgccucaagaccgaggcccagaugagcauccagcugaucaacaaggccgugaacgcccugaucaacgaccagcucaucaugaagaaccaccuccgggacaucaugggcaucccguacugcaacuacuccaaguacugguaccugaaccacaccgugacggggaagaccagccugccccgcugcuggcuggucuccaacggcagcuaccugaacgagacccacuucuccgacgacaucgagcagcaggccgacaacaugaucaccgagaugcuccagaaggaguacauggaccggcagggcaagacgccccuggggcugguggaccuguucguguucagcaccuccuucuaccucaucagcaucuuccugcaccuggucaagaucccgacccaccgccacgugaucggcaagcccugccccaagccccaccggcucaaccacauggggaucugcuccugcggccuguacaagcacccgggggugcccgucaaguggaagcgcugaggacuagucccuguucccagagcccacuuuuuuuucuuuuuuugaaauaaaauagccugucuuucagaucucaaaggcucuuuucagagccaccaaaaaaaaaaaaaaaaaaaaaaaaaaaaaaaaaaaaaaaaaaaaaaaaaaaaaaaaaaaaaaaaaaaaaaaaaaaaaaaaaaaaaaaaaaaaaaaaaaaaa

SEQ ID NO: 36855 - RNA, 1745 nt, Artificial Sequence
  mRNA product Design a-1 (hSL-A100) comprising derived and/or modified sequence from LASV(LASV237-NIG-2010;Clade II)__AIT17638__GPCmut10 (opt1)
aggagagucccgcagucggcguccagcggcucugcuuguucgugugugugucguugcaggccuuauucaagcuuaccaugggccagaucaucaccuucuuccaggaggugccccacgucaucgaggaggugaugaacaucgugcugaucgcccucagccugcuggccauccucaaggggaucuacaacgucgcgaccugcggccuguucgggcugguguccuuccuccugcugugcggccgcagcugcuccacgaccuacaaggggguguacgagcuccagacccuggagcuggacauggccagccucaacaugugcaugccgcuguccugcaccaagaacaacagccaccacuacaucauggucggcaacgagacgggccuggagcucacccugaccaacaccuccaucaucaaccacaaguucugcaaccugagcgacgcccacaagaaggaccucuacgaccacgcccugauguccaucaucagcacguuccaccuguccauccccaacuucaaccaguacgaggccaugagcugcgacuucaacgggggcaagaucuccgugcaguacaaccucagccacaccuacgcgguggacgccgccaaccacugcgggaccaucgccaacggcguccugcagaccuucaugcggauggcguggggcggguccuacaucgcccuggacagcggcaagggguccugggacugcaucaugacgagcuaccaguaccucaucauccagaacaccaccugggaggaccacugccaguucucccgccccagccccaucggcuaccuggggcugcucagccagcggacccgcgacaucuacaucucccggcgccugcugggcacguucaccuggacccucagcgacuccgagggcaacgagacccccgggggcuacugccugacgcgguggaugcugaucgaggccgagcucaagugcuucgggaacaccgccguggccaagugcaacgagaagcacgacgaggaguucugcgacaugcugcgccuguucgacuucugcaagcaggcgauccggcgccucaagaccgaggcccagaugagcauccagcugaucaacaaggccgugaacgcccugaucaacgaccagcucaucaugaagaaccaccuccgggacaucaugggcaucccguacugcaacuacuccaaguacugguaccugaaccacaccgucacggggaagaccagccugccccgcugcuggcugguguccaacggcagcuaccugaacgagacccacuucuccgacgacaucgagcagcaggccgacaacaugaucaccgagcuccugcagaaggaguacauggaccggcagggcaagacgccccuggggcugguggaccucuucgucuucagcaccuccuucuaccugaucagcaucuuccugcaccucaucaagaucccgacccaccgccacaucaccggcaagcccugccccaagccccaccggcugaaccacauggggaucugcuccugcggccuguacaagcacccgggggugcccgugaaguggaagcgcugaggacuagucccuguucccagagcccacuuuuuuuucuuuuuuugaaauaaaauagccugucuuucagaucucaaaggcucuuuucagagccaccaaaaaaaaaaaaaaaaaaaaaaaaaaaaaaaaaaaaaaaaaaaaaaaaaaaaaaaaaaaaaaaaaaaaaaaaaaaaaaaaaaaaaaaaaaaaaaaaaaaaa

SEQ ID NO: 36856 - RNA, 1745 nt, Artificial Sequence
  mRNA product Design a-1 (hSL-A100) comprising derived and/or modified sequence from LASV(LASV253-NIG-2011;Clade II)__AIT17670__GPCmut10 (opt1)
aggagagucccgcagucggcguccagcggcucugcuuguucgugugugugucguugcaggccuuauucaagcuuaccaugggccagaucaucaccuucuuccaggaggugccccacgucaucgaggaggugaugaacaucgugcugaucgcccucagccugcuggccauccucaaggggaucuacaacgucgcgaccugcggccuguucgggcugguguccuuccuccugcugugcggccgcagcugcuccacgaccuacaaggggguguacgagcuccagacccuggagcuggacauggccagccucaacaugugcaugccgcuguccugcaccaagaacaacagccaccacuacaucauggucggcaacgagacgggccuggagcucacccugaccaacaccuccaucaucaaccacaaguucugcaaccugagcgacgcccacaagaagaaccucuacgaccacgcccugauguccaucaucagcacguuccaccuguccauccccaacuucaaccaguacgaggccaugagcugcgacuucaacgggggcaagaucuccgugcaguacaaccucagccacaccuacgcgguggacgccgccaaccacugcgggaccaucgccaacggcguccugcagaccuucaugcggauggcguggggcggguccuacaucgcccuggacagcggcaagggguccugggacugcaucaugacgagcuaccaguaccucaucauccagaacaccaccugggaggaccacugccaguucucccgccccagccccaucggcuaccuggggcugcucagccagcggacccgcgacaucuacaucucccggcgccugcugggcacguucaccuggacccucagcgacuccgagggcaacgagacccccgggggcuacugccugacgcgguggaugcugaucgaggccgagcucaagugcuucgggaacaccgccguggccaagugcaacgagaagcacgacgaggaguucugcgacaugcugcgccuguucgacuucugcaagcaggcgauccggcgccucaaggccgaggcccagaugagcauccagcugaucaacaaggccgugaacgcccugaucaacgaccagcucaucaugaagaaccaccuccgggacaucaugggcauccccuacugcaacuacuccaaguacugguaccugaaccacaccgucaccgggcgcacgagccugccccggugcuggcugguguccaacggcagcuaccugaacgagacccacuucuccgacgacaucgagcagcaggcggacaacaugaucaccgagcuccugcagaaggaguacaucgaccgccagggcaagaccccgcuggggcugguggaccucuucgucuucagcacguccuucuaccugaucagcaucuuccugcaccucgugaagaucccgacccaccggcacaucaucggcaagcccugccccaagccccaccgccugaaccacauggggaucugcuccugcggccuguacaagcacccgggggugcccgucaaguggaagcggugaggacuagucccuguucccagagcccacuuuuuuuucuuuuuuugaaauaaaauagccugucuuucagaucucaaaggcucuuuucagagccaccaaaaaaaaaaaaaaaaaaaaaaaaaaaaaaaaaaaaaaaaaaaaaaaaaaaaaaaaaaaaaaaaaaaaaaaaaaaaaaaaaaaaaaaaaaaaaaaaaaaaa

SEQ ID NO: 36857 - RNA, 1745 nt, Artificial Sequence
  mRNA product Design a-1 (hSL-A100) comprising derived and/or modified sequence from LASV(LASV254-NIG-2011;Clade II)__AIT17674__GPCmut10 (opt1)
aggagagucccgcagucggcguccagcggcucugcuuguucgugugugugucguugcaggccuuauucaagcuuaccaugggccagaucaucaccuucuuccaggaggugccccacgucaucgaggaggugaugaacaucgugcugaucgcccucagccugcuggccauccucaaggggaucuacaacgucgcgaccugcggccuguucgggcugguguccuuccuccugcugugcggccgcagcugcuccacgaccuacaaggggguguacgagcuccagacccuggagcuggacaugaccaaccucaacaugugcaugccgcugagcugcacgaagaacaacucccaccacuacaucauggucggcaacgagaccggccuggagcucacccugaccaacacgagcaucaucaaccacaaguucugcaaccuguccgacgcccacaagaagaaccucuacaaccacgcccugaugagcaucaucuccaccuuccaccugagcauccccaacuucaaccaguacgaggccauguccugcgacuucaacgggggcaagaucagcgugcaguacaaccucucccacagcuacgccguggacgcggccaaccacugcgggaccaucgccaacggcguccugcagaccuucaugcggauggccuggggcggguccuacaucgcgcuggacagcggcaaggggaacugggacugcaucaugacguccuaccaguaccucaucauccagaacaccaccugggaggaccacugccaguucagccgccccucccccaucggcuaccuggggcugcucagccagcggacccgcgacaucuacaucagccggcgccugcugggcacguucaccuggacccucuccgacagcgagggcaacgagacccccgggggcuacugccugacgcgguggaugcugaucgaggccgagcucaagugcuucgggaacaccgccguggccaagugcaacgagaagcacgacgaggaguucugcgacaugcugcgccuguucgacuucugcaagcaggccauccggcgccucaagaccgaggcgcaggccaacauccagcugaucaacaaggccgugaacgcccugaucaacgaccagcucaucaugaagaaccaccuccgggacaucaugggcaucccguacugcaacuacuccaaguacugguaccugaaccacaccgucacggggaagaccagccugccccgcugcuggcugguguccaacggcagcuaccugaacgagacccacuucuccgacgacaucgagcagcaggccgacaacaugaucaccgagcuccugcagaaggaguacauggaccggcagggcaagacgccccuggggcugguggaccucuucgucuucagcaccuccuucuaccugaucagcaucuuccugcaccucgugaagaucccgacccaccgccacgugaucggcaagcccugccccaagccccaccggcugaaccacauggggaucugcuccugcggccuguacaagcacccggggguccccgugaaguggaagcgcugaggacuagucccuguucccagagcccacuuuuuuuucuuuuuuugaaauaaaauagccugucuuucagaucucaaaggcucuuuucagagccaccaaaaaaaaaaaaaaaaaaaaaaaaaaaaaaaaaaaaaaaaaaaaaaaaaaaaaaaaaaaaaaaaaaaaaaaaaaaaaaaaaaaaaaaaaaaaaaaaaaaaa

SEQ ID NO: 36858 - RNA, 1745 nt, Artificial Sequence
  mRNA product Design a-1 (hSL-A100) comprising derived and/or modified sequence from LASV(Nig08-A19;Clade III)__ADU56618__GPCmut10 (opt1)
aggagagucccgcagucggcguccagcggcucugcuuguucgugugugugucguugcaggccuuauucaagcuuaccaugggccagaucgugaccuucuuccaggaggucccccacgugaucgaggaggugaugaacaucguccugaucgcccucagcauccuggccauccugaaggggcucuacaacaucgcgaccugcggccugaucgggcuggugacguuccuccugcuguccggccgcagcugcuccaugaccuacaaggggguguacgagcuccagacccuggagcugaacaugaacacccucaacaugugcaugccgcugagcugcacgaagaacaacucccaccacuacaucauggucggcaacgagaccggccuggagcucacccugaccaacacgagccugcuccaccacaaguucugcaaccuguccgacgcccacaagaagaaccuguacgaccacacccucaugagcaucaucuccaccuuccaccugagcauccccaacuucaaccaguacgaggccauguccugcgacuucaacgggggcaagaucaccgugcaguacaaccugagccacuccuacgccaucgacgccgcgaaccacugcgggacgguggccaacggcguccuccagaccuucaugcggauggccuggggcgggagcuacaucgcccuggacuccggccgcgggaagugggacugcaucaugaccagcuaccaguaccugaucauccagaacaccacgugggaggaccacugccaguucucccggcccagccccaucggcuaccucgggcugcugucccagcgcacccgggacaucuacaucagccgccggcuccugggcaccuucaccuggacgcugagcgacuccgagggcaacgagacccccgggggcuacugccucacccgcuggaugcugaucgaggcggagcugaagugcuucgggaacaccgccguggccaagugcaacgagaagcacgacgaggaguucugcgacaugcuccggcuguucgacuucugcaagcaggccauccgccggcugaaggccgaggcgcagaugagcauccagcucaucaacaaggccgugaacgcccugaucaacgaccagcugaucaugaagaaccaccuccgcgacaucaugggcauccccuacugcaacuacuccaaguacugguaccugaaccacacgagcaccgggcggaccucccugccccgcugcuggcucgucagcaacggcuccuaccugaacgagacccacuucagcgacgacaucgagcagcaggccgacaacaugaucacggagaugcugcagaaggaguaccuggaccggcagggcaagaccccgcucgggcugguggaccuguucguguucuccaccagcuucuaccucaucuccaucuuccugcaccuggucaagaucccgacccaccgccacaucgugggcaagcccugccccaagccccaccggcucaaccacauggggaucugcagcugcggccuguacaagcagccgggggugcccguccgcuggaagcggugaggacuagucccuguucccagagcccacuuuuuuuucuuuuuuugaaauaaaauagccugucuuucagaucucaaaggcucuuuucagagccaccaaaaaaaaaaaaaaaaaaaaaaaaaaaaaaaaaaaaaaaaaaaaaaaaaaaaaaaaaaaaaaaaaaaaaaaaaaaaaaaaaaaaaaaaaaaaaaaaaaaaa

SEQ ID NO: 36859 - RNA, 1748 nt, Artificial Sequence
  mRNA product Design a-1 (hSL-A100) comprising derived and/or modified sequence from LASV(G1180-SLE-2010;Clade IV)__AIT17168__GPCmut10 (opt1)
aggagagucccgcagucggcguccagcggcucugcuuguucgugugugugucguugcaggccuuauucaagcuuaccaugggccagaucgugaccuucuuccaggaggucccccacgugaucgaggaggugaugaacaucguccugaucgcccucagcauccuggccgugcugaaggggcucuacaacuucgcgaccugcggccugguggggcugcucacguuccugcugcucugcggccgcuccugcaccgccagccgguacaagggggucuacgagcugcagacccuggagcucaacauggagacccugaacaugugcaugccgcuguccugcacgaagaacaacagccaccacuacaucauggugggcaacgagaccggccucgagcugacccugaccaacacguccaucaucaaccacaaguucugcaaccucagcgacgcccacaagaagaaccuguacgaccacgcccugauguccaucaucagcaccuuccaccucuccauccccaacuucaaccaguacgaggccaugagcugcgacuucaacgggggcaagaucuccgugcaguacaaccugagccacuccuacgcgggggacgccgccaaccacugcggcaccgucgccaacggggugcugcagaccuucaugcgcauggcguggggcggcagcuacaucgcccucgacuccgggcacggcagcugggacugcaucaugacguccuaccaguaccugaucauccagaacaccaccugggaggaccacugccaguucagccggcccucccccaucggguaccugggccuccugagccagcgcacccgggacaucuacaucagccgccggcugcucggcacguucaccuggacccuguccgacagcgaggggaaggacaccccgggcggguacugccugacgcgcuggaugcucaucgaggccgagcugaagugcuucggcaacaccgccguggccaagugcaacgagaagcacgacgaggaguucugcgacaugcugcggcuguucgacuucugcaagcaggcgauccagcgccugaaggccgaggcccagauguccauccagcugaucaacaaggccgucaacgcccucaucaacgaccagcugaucaugaagaaccaccuccgggacaucauggggauccccuacugcaacuacagcaaguacugguaccucaaccacaccaccacgggcaagaccucccugcccaagugcuggcuggugagcaacggcuccuaccucaacgagacccacuucagcgacgacaucgagcagcaggcggacaacaugaucaccgagaugcugcagaaggaguacauggagcgccaggggaagacgccccugggccugguggaccucuucgucuucuccaccagcuucuaccugaucuccaucuuccugcaccucgugaagaucccgacccaccggcacaucgugggcaagagcugccccaagccccaccgccugaaccacauggggaucugcuccugcgggcuguacaagcagcccggcgucccggugaaguggaagcggugaggacuagucccuguucccagagcccacuuuuuuuucuuuuuuugaaauaaaauagccugucuuucagaucucaaaggcucuuuucagagccaccaaaaaaaaaaaaaaaaaaaaaaaaaaaaaaaaaaaaaaaaaaaaaaaaaaaaaaaaaaaaaaaaaaaaaaaaaaaaaaaaaaaaaaaaaaaaaaaaaaaaa

SEQ ID NO: 36860 - RNA, 1748 nt, Artificial Sequence
  mRNA product Design a-1 (hSL-A100) comprising derived and/or modified sequence from LASV(G1442-SLE-2011;Clade IV)__AIT17180__GPCmut10 (opt1)
aggagagucccgcagucggcguccagcggcucugcuuguucgugugugugucguugcaggccuuauucaagcuuaccaugggccagaucgugaccuucuuccaggaggucccccacgugaucgaggaggugaugaacaucguccugaucgcccucagcauccuggccgugcugaaggggcucuacaacguggcgaccugcggccugaucgggcuggucaccuuccuccugcugugcggccgcuccugcaccaccacccucuacaaggggguguacgagcugcagacgcuggagcucaacauggagacccugaacaugugcaugccgcugagcugcaccaagaacaacucccaccacuacauccgggugggcaacgagaccggccucgagcugacgcugaccaacaccagcaucaucaaccacaaguucugcaaccucuccgacgcccacaagaagaaccuguacgaccacgcccugaugagcaucaucuccaccuuccaccucagcauccccaacuucaaccaguacgaggccauguccugcgacuucaacgggggcaagaucagcguccaguacaaccugucccacagcuacgccggggacgcggccaaccacugcggcacgguggccaacggggugcugcagaccuucaugcgcauggccuggggcggcuccuacaucgcgcucgacagcgggcggggcaacugggacugcaucaugaccuccuaccaguaccugaucauccagaacaccacgugggacgaccacugccaguucagccgccccucccccaucggguaccugggccuccugagccagcggacccgcgacgucuacaucucccggcgccugcucggcaccuucaccuggacgcugagcgacagcgaggggaaggacaccccgggcggguacugccugacccgguggaugcucaucgaggccgagcugaagugcuucggcaacaccgccguggccaagugcaacgagaagcacgacgaggaguucugcgacaugcugcgccucuucgacuucugcaagcaggccauccagcggcugaaggcggaggcccagauguccauccagcugaucaacaaggccgugaacgcccucaucaacgaccagcugaucaugaagaaccaccuccgcgacaucauggggauccccuacugcaacuacagcaaguacugguaccugaacaacacggccaccggcaagaccucccugcccaagugcuggcugaucagcaacggcuccuaccucaacgagacccacuucagcgacgacaucgagcaggaggcggacaacaugaucacggagaugcugcagaaggaguacauggagcggcaggggaagacgccccugggccuggucgaccucuucguguucuccaccagcuucuaccugaucuccaucuuccugcaccucgugaagaucccgacccaccgccacaucgucggcaagagcugccccaagccccaccggcugaaccacauggggaucugcuccugcgggcuguacaagcagcccggcgugccggugcgcuggaagcggugaggacuagucccuguucccagagcccacuuuuuuuucuuuuuuugaaauaaaauagccugucuuucagaucucaaaggcucuuuucagagccaccaaaaaaaaaaaaaaaaaaaaaaaaaaaaaaaaaaaaaaaaaaaaaaaaaaaaaaaaaaaaaaaaaaaaaaaaaaaaaaaaaaaaaaaaaaaaaaaaaaaaa

SEQ ID NO: 36861 - RNA, 1748 nt, Artificial Sequence
  mRNA product Design a-1 (hSL-A100) comprising derived and/or modified sequence from LASV(G3010-SLE-2013;Clade IV)__AIT17344__GPCmut10 (opt1)
aggagagucccgcagucggcguccagcggcucugcuuguucgugugugugucguugcaggccuuauucaagcuuaccaugggccagaucgugaccuucuuccaggaggucccccacgugaucgaggaggugaugaacaucguccugaucgcccucagcauccuggccgugcugaaggggcucuacaacuucgcgaccugcggccugguggggcuggucacguuccuccugcugugcggccgcuccugcaccaccagccucuacaaggggguguacgagcugcagacccuggagcucaacauggagacgcugaacaugugcaugccgcuguccugcaccaagaacaacagccaccacuacaucauggugggcaacgagaccggccucgagcugacccugacgaacaccuccaucaucaaccacaaguucugcaaccucagcgacgcccacaagaagaaccuguacaaccacgcccugauguccaucaucagcaccuuccaccucuccauccccaacuucaaccaguacgaggccaugagcugcgacuucaacgggggcaagaucuccguccaguacaaccugagccacuccuacgccggggacgcggccagccacugcggcaccguggccaacggggugcugcagacguucaugcggauggccuggggcggcuccuacaucgcgcucgacagcggguacggcaagugggacugcaucaugaccuccuaccaguaccugaucauccagaacaccaccugggaggaccacugccaguucagccgccccucccccaucggguaccugggccuccugagccagcggacgcgcgacaucuacaucagccggcgccugcucggcaccuucaccuggacccuguccgacagcgaggggaaggacacgccgggcggguacugccugacccgguggaugcucaucgaggccgagcugaagugcuucggcaacaccgccgucgccaagugcaacgagaagcacgacgaggaguucugcgacaugcugcgccucuucgacuucugcaagcaggccauccagcggcugaagaccgaggcgcagauguccauccagcugaucaacaaggccgugaacgcccucaucaacgaccagcugaucaugaagaaccaccuccgcgacaucauggggauccccuacugcaacuacagcaaguacugguaccugaaccacacgaccaccggcaagaccucccugcccaagugcuggcuggugagcaacggcuccuaccucaacgagacgcacuucagcgacgacaucgagcagcaggccgacaacaugaucaccgagaugcugcagaaggaguacauggagcggcaggggaagacgccccugggccuggucgaccucuucguguucuccaccagcuucuaccugaucuccaucuuccugcaccucgugaagaucccgacccaccgccacaucgucggcaagagcugccccaagccccaccggcugaaccacauggggaucugcuccugcgggcuguacaagcagcccggcgugccggugcgcuggaagcggugaggacuagucccuguucccagagcccacuuuuuuuucuuuuuuugaaauaaaauagccugucuuucagaucucaaaggcucuuuucagagccaccaaaaaaaaaaaaaaaaaaaaaaaaaaaaaaaaaaaaaaaaaaaaaaaaaaaaaaaaaaaaaaaaaaaaaaaaaaaaaaaaaaaaaaaaaaaaaaaaaaaaa

SEQ ID NO: 36862 - RNA, 1748 nt, Artificial Sequence
  mRNA product Design a-1 (hSL-A100) comprising derived and/or modified sequence from LASV(G502-SLE-2009;Clade IV)__AIT17126__GPCmut10 (opt1)
aggagagucccgcagucggcguccagcggcucugcuuguucgugugugugucguugcaggccuuauucaagcuuaccaugggccagaucgugaccuucuuccaggaggucccccacgugaucgaggaggugaugaacaucguccugaucgcccucagcauccuggccgugcugaaggggcucuacaacuucgcgaccugcggccugguggggcugcucacguuccugcugcucugcggccgcuccugcaccaccgggcuguacaagggcgucuacgagcugcagacccucgagcugaacauggagacgcugaacaugugcaugccgcucagcugcaccaagaacaacucccaccacuacaucauggugggcaacgagaccgggcuggagcugacccucacgaacaccagcaucaucaaccacaaguucugcaaccuguccgacgcccacaagaagaaccuguacgaccacgcccucaugagcaucaucuccaccuuccaccugagcauccccaacuucaaccaguacgaggccauguccugcgacuucaacggcgggaagaucagcgugcaguacaaccugucccacagcuacgccggcgacgcggccgaccacugcgggaccgucgccaacggcgugcuccagacguucaugcggauggccuggggcggguccuacaucgcgcuggacagcggccgcgggcggugggacugcaucaugaccuccuaccaguaccugaucauccagaacaccaccugggaggaccacugccaguucagccgccccucccccaucggcuaccucggccugcugagccagcggacgcgcgacaucuacaucucccggcgccuccuggggaccuucaccuggacccugagcgacagcgagggcaaggacacgcccgggggcuacugccucacccgguggaugcugaucgaggccgagcugaagugcuucgggaacaccgccguggccaagugcaacgagaagcacgacgaggaguucugcgacaugcuccgccuguucgacuucugcaagcaggccauccagcggcugaaggcggaggcccagauguccauccagcucaucaacaaggccgucaacgcccugaucaacgaccagcuggugaugaagaaccaccuccgcgacaucaugggcauccccuacugcaacuacagccgguacugguaccugaaccacaccacgaccggccgcaccucccugcccaagugcuggcucgugagcaacggguccuaccugaacgagacccacuucagcgacgacaucgagcagcaggccgacaacaugaucacggagaugcugcagaaggaguacauggagcggcagggcaagaccccgcuggggcucgucgaccuguucguguucuccaccagcuucuaccugaucuccaucuuccuccaccuggugaagaucccgacccaccgccacaucgucggcaagagcugccccaagccccaccggcugaaccacauggggaucugcuccugcggccucuacaagcagcccggcgugccggugaaguggaagcgcugaggacuagucccuguucccagagcccacuuuuuuuucuuuuuuugaaauaaaauagccugucuuucagaucucaaaggcucuuuucagagccaccaaaaaaaaaaaaaaaaaaaaaaaaaaaaaaaaaaaaaaaaaaaaaaaaaaaaaaaaaaaaaaaaaaaaaaaaaaaaaaaaaaaaaaaaaaaaaaaaaaaaa

SEQ ID NO: 36863 - RNA, 1748 nt, Artificial Sequence
  mRNA product Design a-1 (hSL-A100) comprising derived and/or modified sequence from LASV(G733-SLE-2010;Clade IV)__AIT17154__GPCmut10 (opt1)
aggagagucccgcagucggcguccagcggcucugcuuguucgugugugugucguugcaggccuuauucaagcuuaccaugggccagaucgugaccuucuuccaggaggucccccacgugaucgaggaggugaugaacaucguccugaucgcccucagcauccuggccgugcugaaggggcucuacaacuucgcgaccugcggcaucguggggcuggucuccuuccugcuccugugcggccgcagcugcacgaccucccuguacaaggggguguacgagcuccagacccuggagcugaacauggagacccucaacaugugcaugccgcugagcugcacgaagaacaacucccaccacuacaucauggugggcaacgagaccggccuggagcucacccugaccaacacgagcaucaucaaccacaaguucugcaaccuguccgacgcccacaagaagaaccucuacgaccacgcccugaugagcaucaucuccaccuuccaccugagcauccccaacuucaaccaguacgaggccauguccugcgacuucaacgggggcaagaucagcguccaguacaaccucucccacagcuacgccggggacgcggccaaccacugcggcaccaucgccaacggggugcugcagaccuucaugcggauggccuggggcggcuccuacaucgcgcuggacagcgggcgcgaccggugggacugcaucaugacguccuaccaguaccucaucauccagaacaccaccugggaggaccacugccaguucagccgccccucccccaucggcuaccuggggcugcucagccagcggacccgcgacaucuacaucagccggcgccugcugggcacguucaccuggacccucuccgacagcgagggcaaggacacccccgggggcuacugccugacgcgguggaugcugaucgaggccgagcucaagugcuucgggaacaccgccguggccaagugcaacgagaagcacgacgaggaguucugcgacaugcugcgccuguucgacuucugcaagcaggccauccagcggcucaaggcggaggcccagauguccauccagcugaucaacaaggccgucaacgcccugaucaacgaccagcucaucaugaagaaccaccuccgcgacaucaugggcaucccguacugcaacuacagcaaguacugguaccugaaccacaccaccacggggaagaccucccugcccaagugcuggcuggugagcaacggcuccuaccugaacgagacccacuucagcgacgacaucgagcagcaggccgacaacaugaucaccgagaugcuccagaaggaguacauggagcggcagggcaagacgccccuggggcugguggaccuguucgucuucuccaccagcuucuaccucaucuccaucuuccugcaccuggugaagaucccgacccaccgccacguggucggcaagagcugccccaagccccaccggcucaaccacauggggaucugcuccugcggccuguacgggcagcccggcgugccggugaaguggaagcgcugaggacuagucccuguucccagagcccacuuuuuuuucuuuuuuugaaauaaaauagccugucuuucagaucucaaaggcucuuuucagagccaccaaaaaaaaaaaaaaaaaaaaaaaaaaaaaaaaaaaaaaaaaaaaaaaaaaaaaaaaaaaaaaaaaaaaaaaaaaaaaaaaaaaaaaaaaaaaaaaaaaaaa

SEQ ID NO: 36864 - RNA, 1748 nt, Artificial Sequence
  mRNA product Design a-1 (hSL-A100) comprising derived and/or modified sequence from MOPV/LASV reassortant(IGS-1;Clade IV)__AFY05576__GPCmut10 (opt1)
aggagagucccgcagucggcguccagcggcucugcuuguucgugugugugucguugcaggccuuauucaagcuuaccaugggccagaucgugaccuucuuccaggaggucccccacgugaucgaggaggugaugaacaucguccugaucgcccucagcgugcuggccgugcugaaggggcucuacaacuucgcgaccugcggccuggucgggcuggugaccuuccuccugcugugcggccgcuccugcaccaccagccucuacaaggggguguacgagcugcagacccuggagcucaacauggagacgcugaacaugugcaugccgcuguccugcaccaagaacaacagccaccacuacaucauggucggcaacgagaccggccucgagcugacccugacgaacaccuccaucaucaaccacaaguucugcaaccucagcgacgcccacaagaagaaccuguacgaccacgcccugauguccaucaucagcaccuuccaccucuccauccccaacuucaaccaguacgaggccaugagcugcgacuucaacgggggcaagaucuccgugcaguacaaccugagccacuccuacgccggggacgcggccaaccacugcggcaccguggccaacgggguccugcagacguucaugcggauggccuggggcggcagcuacaucgcgcucgacuccgggcgcggcaacugggacugcaucaugaccagcuaccaguaccugaucauccagaacaccaccugggaggaccacugccaguucucccggcccagccccaucggguaccugggccuccugucccagcgcacgcgggacaucuacaucagccgccggcugcucggcaccuucaccuggacccugagcgacuccgagggggaggacacgccgggcggguacugccugacccgcuggaugcucaucgaggccgagcugaagugcuucggcaacaccgccguggccaagugcaacgagaagcacgacgaggaguucugcgacaugcugcggcuguucgacuucugcaagcaggccauccagcgccugaaggcggaggcccagaugagcauccagcugaucaacaaggccgugaacgcccucaucaacgaccagcugaucaugaagaaccaccuccgggacaucauggggauccccuacugcaacuacuccaaguacugguaccucaaccacaccacgaccggccgcaccagccugcccaagugcuggcuggucuccaacggcagcuaccucaacgagacccacuucuccgacgacaucgagcagcaggccgacaacaugaucacggagaugcugcagaaggaguacauggagcggcaggggaagacgccccugggccugguggaccucuucguguucagcaccuccuucuaccugaucagcaucuuccugcaccucgucaagaucccgacccaccgccacaucguggggaaguccugccccaagccccaccggcugaaccacaugggcaucugcagcugcgggcuguacaagcagcccggcgugccggucaaguggaagcgcugaggacuagucccuguucccagagcccacuuuuuuuucuuuuuuugaaauaaaauagccugucuuucagaucucaaaggcucuuuucagagccaccaaaaaaaaaaaaaaaaaaaaaaaaaaaaaaaaaaaaaaaaaaaaaaaaaaaaaaaaaaaaaaaaaaaaaaaaaaaaaaaaaaaaaaaaaaaaaaaaaaaaa

SEQ ID NO: 36865 - RNA, 1748 nt, Artificial Sequence
  mRNA product Design a-1 (hSL-A100) comprising derived and/or modified sequence from LASV(LM765-SLE-2012;Clade IV)__AIT17814__GPCmut10 (opt1)
aggagagucccgcagucggcguccagcggcucugcuuguucgugugugugucguugcaggccuuauucaagcuuaccaugggccagaucgugaccuucuuccaggaggucccccacgugaucgaggaggugaugaacaucguccugaucgcccucagcauccuggccgugcugaaggggcucuacaacuucgcgaccugcggccugguggggcuggucacguuccuccugcugugcggccgcuccugcaccaccagccucuacaaggggguguacgagcugcagacccuggagcucaacauggagacgcugaacaugugcaugccgcuguccugcaccaagaacaacagccaccacuacaucauggugggcaacgagaccggccucgagcugacccugacgaacaccuccaucaucgaccacaaguucugcaaccucagcgacgcccaccggaagaaccuguacgaccacgcccugauguccaucaucagcaccuuccaccucuccauccccaacuucaaccaguacgaggccaugagcugcgacuucaacgggggcaagaucuccguccaguacaaccugagccacuccuacgccaaggacgcggccgaccacugcgggaccguggccaacggcgugcugcagacguucaugcgcauggccuggggcgggagcuacaucgcgcucgacuccggccgggggcgcugggacugcaucaugaccagcuaccaguaccugaucauccagaacaccaccugggaggaccacugccaguucucccggcccagccccaucggcuaccuggggcuccugucccagcgcacgcgggacaucuacaucagccgccggcugcucggcaccuucaccuggacccugagcgacuccgagggcaaggacacgcccgggggcuacugccugacccgcuggaugcucaucgaggccgagcugaagugcuucgggaacaccgccgucgccaagugcaacgagaagcacgacgaggaguucugcgacaugcugcggcuguucgacuucugcaagcaggccauccagcgccugaaggcggaggcccagaugagcauccagcugaucaacaaggccgugaacgcccucaucaacgaccagcugaucaugaagaaccaccuccgggacaucaugggcauccccuacugcaacuacuccaaguacugguaccucaaccacaccacgaccgggaagaccagccugcccaagugcuggcugguguccaacggcagcuaccucaacgagacccacuucuccgacgacaucgagcagcaggccgacaacaugaucacggagaugcugcagaaggaguacauggagcgccagggcaagaccccgcuggggcuggucgaccucuucguguucagcaccuccuucuaccugaucagcaucuuccugcaccucgugaagaucccgacccaccggcacaucgucggcaagcccugccccaagccccaccgccugaaccacauggggaucugcuccugcggccuguacaagcagccgggggugcccgugaaguggaagcggugaggacuagucccuguucccagagcccacuuuuuuuucuuuuuuugaaauaaaauagccugucuuucagaucucaaaggcucuuuucagagccaccaaaaaaaaaaaaaaaaaaaaaaaaaaaaaaaaaaaaaaaaaaaaaaaaaaaaaaaaaaaaaaaaaaaaaaaaaaaaaaaaaaaaaaaaaaaaaaaaaaaaa

SEQ ID NO: 36866 - RNA, 1748 nt, Artificial Sequence
  mRNA product Design a-1 (hSL-A100) comprising derived and/or modified sequence from LASV(LM776-SLE-2012;Clade IV)__AIT17824__GPCmut10 (opt1)
aggagagucccgcagucggcguccagcggcucugcuuguucgugugugugucguugcaggccuuauucaagcuuaccaugggccagaucgugaccuucuuccaggaggucccccacgugaucgaggaggugaugaacaucguccugaucgcccucagcauccuggccgugcugaaggggcucuacaacuucgcgaccugcggccugguggggcuggucaccuuccuccugcugugcggccgcuccugcaccaccagcguguacaaggggguguacgagcuccagacccuggagcugaacauggagacgcucaacaugugcaugccgcuguccugcaccaagaacaacagccaccacuacaucauggucggcaacgagaccggccuggagcucacccugacgaacaccuccaucaucaaccacaaguucugcaaccugagcgacgcccacaagaagaaccucuacgaccacgcccugauguccaucaucagcaccuuccaccuguccauccccaacuucaaccaguacgaggccaugagcugcgacuucaacgggggcaagaucuccgugcaguacaaccucagccacuccuacgccggggacgcggccaaccacugcggcaccguggccaacgggguccugcagacguucaugcggauggccuggggcggcagcuacaucgcgcuggacuccgggcacggcaagugggacugcaucaugaccagcuaccaguaccucaucauccagaacaccaccugggaggaccacugccaguucucccgccccagccccaucggguaccugggccugcucucccagcggacgcgcgacaucuacaucagccggcgccugcugggcaccuucaccuggacccucagcgacuccgaggggaaggacacgccgggcggguacugccugacccgguggaugcugaucgaggccgagcucaagugcuucggcaacaccgccguggccaagugcaacgagaagcacgacgaggaguucugcgacaugcugcgccuguucgacuucugcaagcaggccauccagcggcucaaggcggaggcccagaugagcauccagcugaucaacaaggccgugaacgcccugaucaacgaccagcucaucaugaagaaccaccuccgcgacaucauggggauccccuacugcaacuacuccaaguacugguaccugaaccacaccacgaccggcaagaccagccugcccaagugcuggcuggucuccaacggcagcuaccugaacgagacccacuucuccgacgacaucgagcagcaggccgacaacaugaucacggagaugcuccagaaggaguacauggagcggcaggggaagacgccccugggccugguggaccuguucguguucagcaccuccuucuaccucaucagcaucuuccugcaccuggucaagaucccgacccaccgccacaucguggggaaguccugccccaagccccaccggcucaaccacaugggcaucugcagcugcgggcuguacaagcagcccggcgugccgguccgcuggaagcggugaggacuagucccuguucccagagcccacuuuuuuuucuuuuuuugaaauaaaauagccugucuuucagaucucaaaggcucuuuucagagccaccaaaaaaaaaaaaaaaaaaaaaaaaaaaaaaaaaaaaaaaaaaaaaaaaaaaaaaaaaaaaaaaaaaaaaaaaaaaaaaaaaaaaaaaaaaaaaaaaaaaaa

SEQ ID NO: 36867 - RNA, 1748 nt, Artificial Sequence
  mRNA product Design a-1 (hSL-A100) comprising derived and/or modified sequence from LASV(Mad39;Clade IV)__ANH09722__GPCmut10 (opt1)
aggagagucccgcagucggcguccagcggcucugcuuguucgugugugugucguugcaggccuuauucaagcuuaccaugggccagaucgugaccuucuuccaggaggucccccacgugaucgaggaggugaugaacaucguccugaucgcccucagcauccuggccgugcugaaggggcucuacaacguggcgaccugcggccugaucgggcuggucacguuccuccugcugugcggccgcuccugcaccaccacccucuacaaggggguguacgagcugcaggcccuggagcucaacauggagacgcugaacaugugcaugccgcugagcugcaccaagaacaacucccaccacuacauccgggugggcaacgagaccggccucgagcugacccugacgaacaccagccucaucaaccacaaguucugcaaccuguccgacgcccacaagaagaaccuguacgaccacgcccucaugagcaucaucuccaccuuccaccugagcauccccaacuucaaccaguacgaggccauguccugcgacuucaacgacgggaagaucagcguccaguacaaccugucccacaccuacgcgggcgacacggccaaccacugcgggaccguggccaacggcgugcuccagaccuucaugcgcauggccuggggcgggagcuacaucgcgcuggacuccggccgcgggggcugggacugcaucaugaccagcuaccaguaccugaucauccagaacacgaccugggaggaccacugccaguucucccggcccagccccaucggguaccucggccugcugucccagcggacccgcgacaucuacaucagccggcgccuccugggcaccuucacguggacccuguccgacagcgaggggaaggacaccccgggcggguacugccucacccgguggaugcugaucgaggccgagcugaagugcuucggcaacacggccgucgccaagugcaacgagaagcacgacgaggaguucugcgacaugcuccgccuguucgacuucugcaagcaggccauccagcggcugaaggcggaggcccagaugagcauccagcucaucaacaaggccgugaacgcccugaucaacgaccagcugaucaugaagaaccaccuccgcgacaucauggggauccccuacugcaacuacuccaaguacugguaccugaaccacaccgugaccggcaagaccagccugcccaagugcuggcucgucuccaacggcagcuaccugaacgagacgcacuucuccgacgacaucgagcagcaggccgacaacaugaucaccgagaugcugcagaaggaguacauggagcggcaggggaagacgccccugggccucguggaccuguucguguucagcaccuccuucuaccugaucagcaucuuccuccaccuggucaagaucccgacccaccgccacgugguggggaagcccugccccaagccccaccggcugaaccacaugggcaucugcuccugcggguucuacaagcagccgggcguccccgugcgcuggaagcggugaggacuagucccuguucccagagcccacuuuuuuuucuuuuuuugaaauaaaauagccugucuuucagaucucaaaggcucuuuucagagccaccaaaaaaaaaaaaaaaaaaaaaaaaaaaaaaaaaaaaaaaaaaaaaaaaaaaaaaaaaaaaaaaaaaaaaaaaaaaaaaaaaaaaaaaaaaaaaaaaaaaaa

SEQ ID NO: 36868 - RNA, 1748 nt, Artificial Sequence
  mRNA product Design a-1 (hSL-A100) comprising derived and/or modified sequence from LASV(Z0947-SLE-2011;Clade IV)__AIT17840__GPCmut10 (opt1)
aggagagucccgcagucggcguccagcggcucugcuuguucgugugugugucguugcaggccuuauucaagcuuaccaugggccagaucgugaccuucuuccaggaggucccccacgugaucgaggaggugaugaacaucguccugaucgcccucagcauccuggccgugcugaaggggcucuacaacuucgcgaccugcggccugguggggcuggucacguuccuccugcugugcggccgcuccugcaccaucagccucuacaaggggguguacgagcugcagacccuggagcucaacauggagacccugaacaugugcaugccgcuguccugcacgaagaacaacagccaccacuacaucauggugggcaacgagaccggccucgagcugacccugaccaacacguccaucaucaaccacaaguucugcaaccucagcgacgcccacaagaagaaccuguacgaccacgcccugauguccaucaucagcaccuuccaccucuccauccccaacuucaaccaguacgaggccaugagcugcgacuucaacgggggcaagaucuccguccaguacaaccugagccacuccuacgccggggacgcggccaaccacugcggcaccguggccaacggggugcugcagaccuucaugcggauggccuggggcggcagcuacaucgcgcucgacuccgggcgcgaccggugggacugcaucaugacgagcuaccaguaccugaucauccagaacaccaccugggaggaccacugccaguucucccgccccagccccaucggcuaccuggggcuccugucccagcggacccgcgacaucuacaucagccggcgccugcucggcacguucaccuggacccugagcgacuccgagggcaaggacacccccgggggcuacugccugacgcgguggaugcucaucgaggccgagcugaagugcuucgggaacaccgccgucgccaagugcaacgagaagcacgacgaggaguucugcgacaugcugcgccucuucgacuucugcaagcaggccauccagcggcugaaggcggaggcccagaugagcauccagcugaucaacaaggccgugaacgcccucaucaacgaccagcugaucaugaagaaccaccuccgcgacaucaugggcaucccguacugcaacuacuccaaguacugguaccugaaccacaccaccacggggaagaccagccugcccaagugcuggcugguguccaacggcagcuaccucaacgagacccacuucuccgacgacaucgagcagcaggccgacaacaugaucaccgagaugcugcagaaggaguacauggagcggcagggcaagacgccccuggggcuggucgaccucuucguguucagcaccuccuucuaccugaucagcaucuuccugcaccucgugaagaucccgacccaccgccacaucgucggcaagcccugccccaagccccaccggcugaaccacauggggaucugcuccugcggccuguacaagcagccgggggugcccgugaaguggaagcgcugaggacuagucccuguucccagagcccacuuuuuuuucuuuuuuugaaauaaaauagccugucuuucagaucucaaaggcucuuuucagagccaccaaaaaaaaaaaaaaaaaaaaaaaaaaaaaaaaaaaaaaaaaaaaaaaaaaaaaaaaaaaaaaaaaaaaaaaaaaaaaaaaaaaaaaaaaaaaaaaaaaaaa

SEQ ID NO: 36869 - RNA, 1748 nt, Artificial Sequence
  mRNA product Design a-1 (hSL-A100) comprising derived and/or modified sequence from LASV(Josiah;Clade IV)__NP_694870__GPCmut10 (opt4)
aggagagucccgcagucggcguccagcggcucugcuuguucgugugugugucguugcaggccuuauucaagcuuaccaugggccagaucgugaccuucuuccaggaggugccccacgugaucgaggaggugaugaacaucgugcugaucgcccugagcgugcuggccgugcugaagggccuguacaacuucgccaccugcggccuggugggccuggugaccuuccugcugcugugcggcagaagcugcaccaccagccuguacaagggcguguacgagcugcagacccuggagcugaacauggagacccugaacaugugcaugccccugagcugcaccaagaacaacagccaccacuacaucauggugggcaacgagaccggccuggagcugacccugaccaacaccagcaucaucaaccacaaguucugcaaccugagcgacgcccacaagaagaaccuguacgaccacgcccugaugagcaucaucagcaccuuccaccugagcauccccaacuucaaccaguacgaggccaugagcugcgacuucaacggcggcaagaucagcgugcaguacaaccugagccacagcuacgccggcgacgccgccaaccacugcggcaccguggccaacggcgugcugcagaccuucaugagaauggccuggggcggcagcuacaucgcccuggacagcggcagaggcaacugggacugcaucaugaccagcuaccaguaccugaucauccagaacaccaccugggaggaccacugccaguucagcagacccagccccaucggcuaccugggccugcugagccagagaaccagagacaucuacaucagcagaagacugcugggcaccuucaccuggacccugagcgacagcgagggcaaggacacccccggcggcuacugccugaccagauggaugcugaucgaggccgagcugaagugcuucggcaacaccgccguggccaagugcaacgagaagcacgacgaggaguucugcgacaugcugagacuguucgacuucugcaagcaggccauccagagacugaaggccgaggcccagaugagcauccagcugaucaacaaggccgugaacgcccugaucaacgaccagcugaucaugaagaaccaccugagagacaucaugggcauccccuacugcaacuacagcaaguacugguaccugaaccacaccaccaccggcagaaccagccugcccaagugcuggcuggugagcaacggcagcuaccugaacgagacccacuucagcgacgacaucgagcagcaggccgacaacaugaucaccgagaugcugcagaaggaguacauggagagacagggcaagaccccccugggccugguggaccuguucguguucagcaccagcuucuaccugaucagcaucuuccugcaccuggugaagauccccacccacagacacaucgugggcaagagcugccccaagccccacagacugaaccacaugggcaucugcagcugcggccuguacaagcagcccggcgugcccgugaaguggaagagaugaggacuagucccuguucccagagcccacuuuuuuuucuuuuuuugaaauaaaauagccugucuuucagaucucaaaggcucuuuucagagccaccaaaaaaaaaaaaaaaaaaaaaaaaaaaaaaaaaaaaaaaaaaaaaaaaaaaaaaaaaaaaaaaaaaaaaaaaaaaaaaaaaaaaaaaaaaaaaaaaaaaaa

SEQ ID NO: 36870 - RNA, 1745 nt, Artificial Sequence
  mRNA product Design a-1 (hSL-A100) comprising derived and/or modified sequence from LASV(LP;Clade I)__AAF86701__GPCmut10 (opt4)
aggagagucccgcagucggcguccagcggcucugcuuguucgugugugugucguugcaggccuuauucaagcuuaccaugggccagaucaucaccuucuuccaggaggugccccacgugaucgaggaggugaugaacaucgugcugaucgcccugagccugcuggccauccugaagggccuguacaacaucgccaccugcggcaucaucggccugguggccuuccuguuccugugcggcaagagcugcagccugacccugaagggcggcuacgagcugcagacccuggagcugaacauggagacccugaacaugugcaugccccugagcugcaccaagaacagcagccaccacuacaucagagugggcaacgagaccggccuggagcugacccugaccaacaccagcaucaucaaccacaaguucugcaaccugagcgacgcccacaagaagaaccuguacgaccacgcccugaugagcaucaucagcaccuuccaccugagcauccccaacuucaaccaguacgaggccaugagcugcgacuucaacggcggcaagaucagcgugcaguacaaccugagccacagcuacgccggcgacgccgccgagcacugcggcaccguggccaacggcgugcugcagaccuucaugagaauggccuggggcggcagauacaucgcccuggacagcggcaagggcaacugggacugcaucaugaccagcuaccaguaccugaucauccagaacaccaccugggaggaccacugccaguucagcagacccagccccaucggcuaccugggccugcugagccagagaaccagagacaucuacaucagcagaagacugcugggcaccuucaccuggacccugagcgacagcgagggcaacgagacccccggcggcuacugccugaccagauggaugcugaucgaggccgagcugaagugcuucggcaacaccgccguggccaagugcaacgagaagcacgacgaggaguucugcgacaugcugagacuguucgacuucugcaagcaggccaucagaagacugaaggccgaggcccagaugagcauccagcugaucaacaaggccgugaacgcccugaucaacgaccagcugaucaugaagaaccaccugagagacaucaugggcauccccuacugcaacuacagcaaguacugguaccugaaccacaccagcagcggcagaaccagccugcccaagugcuggcugaucagcaacggcagcuaccugaacgagacccaguucagcgacgacaucgagcagcaggccgacaacaugaucaccgagaugcugcagaaggaguacaucgagagacagggcaagaccccccugggccugguggacaucuucaucuucagcaccagcuucuaccugaucagcaucuuccugcaccugaucaagauccccacccacagacacaucgugggcaagcccugccccaagccccacagacugaaccacaugggcgugugcagcugcggccuguacaagcaccccggcgugcccaccaaguggaagagaugaggacuagucccuguucccagagcccacuuuuuuuucuuuuuuugaaauaaaauagccugucuuucagaucucaaaggcucuuuucagagccaccaaaaaaaaaaaaaaaaaaaaaaaaaaaaaaaaaaaaaaaaaaaaaaaaaaaaaaaaaaaaaaaaaaaaaaaaaaaaaaaaaaaaaaaaaaaaaaaaaaaaa

SEQ ID NO: 36871 - RNA, 1745 nt, Artificial Sequence
  mRNA product Design a-1 (hSL-A100) comprising derived and/or modified sequence from LASV(803213;Clade II)__AAF86703__GPCmut10 (opt4)
aggagagucccgcagucggcguccagcggcucugcuuguucgugugugugucguugcaggccuuauucaagcuuaccaugggccagaucaucaccuucuuccaggaggugccccacgugaucgaggaggugaugaacaucgugcugaucgcccugagccugcuggccauccugaagggcaucuacaacguggccaccugcggccuguucggccugaucagcuuccugcugcugugcggcagaagcugcagcgugaccuacaagggcguguacgagcugcagacccuggagcugaacauggccaaccugaacaugugcaugccccugagcugcaccaagaacaacagccaccacuacaucauggugggcaacgagaccggccuggagcugacccugaccaacaccagcaucaucaaccacaaguucugcaaccugagcgacgcccacaagaagaaccuguacgaccacgcccugaugagcaucaucagcaccuuccaccugagcauccccaacuucaaccaguacgaggccaugagcugcgacuucaacggcggcaagaucagcgugcaguacaaccugagccacagcuucgccguggacgccgccaaccacugcggcaccaucgccaacggcgugcugcagaccuucaugagaauggccuggggcggcagcuacaucgcccuggacagcggcaagggcaacugggacugcaucaugaccagcuaccaguaccugaucauccagaacaccaccugggaggaccacugccaguucagcagacccagccccaucggcuaccugggccugcugagccagagaaccagagacaucuacaucagcagaagacugcugggcaccuucaccuggacccugagcgacagcgagggcaacgaggcccccggcggcuacugccugaccagauggaugcugaucgaggccgagcugaagugcuucggcaacaccgccguggccaagugcaacgagaagcacgacgaggaguucugcgacaugcugagacuguucgacuucugcaagcaggccaucaagagacugaagaccgaggcccagaugagcauccagcugaucaacaaggccgugaacgcccugaucaacgaccagcugaucaugaagaaccaccugagagacaucaugggcauccccuacugcaacuacagcagauacugguaccugaaccacaccgugaccggcaagaccagccugcccagaugcuggcuggugagcaacggcagcuaccugaacgagacccacuucagcgacgacaucgagcagcaggccgacaacaugaucaccgagaugcugcagaaggaguacauggacagacagggcaagaccccccugggccugguggaccuguucguguucagcaccagcuucuaccugaucagcaucuuccugcaccuggugaagauccccacccacagacacaucgugggcaagcccugccccaagccccacagacugaaccacaugggcaucugcagcugcggccuguacaagcaccccggcgugcccgugaaguggaagagaugaggacuagucccuguucccagagcccacuuuuuuuucuuuuuuugaaauaaaauagccugucuuucagaucucaaaggcucuuuucagagccaccaaaaaaaaaaaaaaaaaaaaaaaaaaaaaaaaaaaaaaaaaaaaaaaaaaaaaaaaaaaaaaaaaaaaaaaaaaaaaaaaaaaaaaaaaaaaaaaaaaaaa

SEQ ID NO: 36872 - RNA, 1745 nt, Artificial Sequence
  mRNA product Design a-1 (hSL-A100) comprising derived and/or modified sequence from LASV(GA391;Clade III)__CAA36645__GPCmut10 (opt4)
aggagagucccgcagucggcguccagcggcucugcuuguucgugugugugucguugcaggccuuauucaagcuuaccaugggccagaucgugaccuucuuccaggaggugccccacgugaucgaggaggugaugaacaucgugcugaucgcccugagcauccuggccauccugaagggccuguacaacguggccaccugcggccugaucggccuggugaccuuccugcugcugagcggcagaagcugcagccugaucuacaagggcaccuacgagcugcagacccuggagcugaacauggagacccugaacaugugcaugccccugagcugcaccaagaacaacagccaccacuacaucagagugggcaacgagaccggccuggagcugacccugaccaacaccagcauccugaaccacaaguucugcaaccugagcgacgcccacaagagaaaccuguacgaccacagccugaugagcaucaucagcaccuuccaccugagcauccccaacuucaaccaguacgaggccaugagcugcgacuucaacggcggcaagaucaccgugcaguacaaccugagccacagcuucgccguggacgccgccggccacugcggcacccuggccaacggcgugcugcagaccuucaugagaauggccuggggcggcagcuacaucgcccuggacagcggcagaggcaacugggacugcaucaugaccagcuaccaguaccugaucauccagaacaccaccugggacgaccacugccaguucagcagacccagccccaucggcuaccugggccugcugagccagagaaccagagacaucuacaucagcagaagacugcugggcaccuucaccuggacccugagcgacagcgagggcaacgagacccccggcggcuacugccugaccagauggaugcugaucgaggccgagcugaagugcuucggcaacaccgccguggccaagugcaacgagaagcacgacgaggaguucugcgacaugcugagacuguucgacuucugcaagcaggccaucagaagacugaagaccgaggcccagaugagcauccagcugaucaacaaggccgugaacgcccugaucaacgaccagcugaucaugaagaaccaccugagagacaucaugggcauccccuacugcaacuacagcagauacugguaccugaaccacaccagcaccggcaagaccagccugcccagaugcuggcugaucagcaacggcagcuaccugaacgagaccaaguucagcgacgacaucgagcagcaggccgacaacaugaucaccgagaugcugcagaaggaguacaucgacagacagggcaagaccccccugggccugguggaccuguucguguucagcaccagcuucuaccugaucagcaucuuccugcaccuggugaagauccccacccacagacacaucgugggcaagcccugccccaagccccacagacugaaccacaugggcaucugcagcugcggccuguacaagcagcccggcgugcccgugagauggaagagaugaggacuagucccuguucccagagcccacuuuuuuuucuuuuuuugaaauaaaauagccugucuuucagaucucaaaggcucuuuucagagccaccaaaaaaaaaaaaaaaaaaaaaaaaaaaaaaaaaaaaaaaaaaaaaaaaaaaaaaaaaaaaaaaaaaaaaaaaaaaaaaaaaaaaaaaaaaaaaaaaaaaaa

SEQ ID NO: 36873 - RNA, 1748 nt, Artificial Sequence
  mRNA product Design a-1 (hSL-A100) comprising derived and/or modified sequence from LASV(AV;Clade V)__CCA30314__GPCmut10 (opt4)
aggagagucccgcagucggcguccagcggcucugcuuguucgugugugugucguugcaggccuuauucaagcuuaccaugggccagaucgugaccuucuuccaggaggugccccacgugaucgaggaggugaugaacaucgugcugaucgcccugagcauccuggccgugcugaagggccuguacaacaucgccaccugcggccugaucggccugaucaccuuccugcugcugugcggcagaagcugcagcagcaaccuguacaagggcguguacgagcugcagagccuggaccugaacauggagacccugaacaugugcaugccccugagcugcaccaagaacaacagccaccacuacaucagagugggcaacgacaccggccuggagcugacccugaccaacaccagcauccugaaccacaaguucugcaaccugagcgacgcccacaagaaggaccuguacgaccacgcccugaugagcaucaucagcaccuuccaccugagcauccccaacuucaaccaguacgaggccaugagcugcgacuucaacggcggcaagaucagcgugcaguacaaccugagccacagcuacgccaucgacgccgccaaccacugcggcaccguggccaacggcauccugcagaccuucaugagaauggccuggggcggcagcuacaucgcccuggacagcggcagaggcaacugggacugcaucaugaccagcuaccaguaccugaucauccagaacaccaccugggagaaccacugccaguucagcagacccagccccaucggcuaccugggccugcugagccagagaaccagagacaucuacaucagcagaagacugcugggcaccuucaccuggacccugagcgacagcgagggcaacgccacccccggcggcuacugccugaccagauggaugcugaucgaggccgagcugaagugcuucggcaacaccgccguggccaagugcaacgagaagcacgacgaggaguucugcgacaugcugagacuguucgacuucugcaagcaggccaucagcagacugaagagcgaggcccagaugagcauccagcugaucaacaaggccgugaacgcccugaucaacgaccagcugaucaugaagaaccaccugagagacaucaugggcauccccuacugcaacuacagcaaguacugguaccugaaccacaccaucaccggcaagaccagccugcccaagugcuggcuggugagcaacggcagcuaccugaacgagacccacuucagcgacgacaucgagcagcaggccgacaacaugaucaccgagaugcugcagaaggaguacauggagagacagggcaagaccccccugggccugguggaccuguucguguucagcaccagcuucuaccugaucagcaucuuccugagacuggugaagauccccacccacagacacaucgugggcaagcccugccccaagccccacagacugaaccacaugggcaucugcagcugcggccuguacaagcagcccggcgugcccgugagauggaagagaugaggacuagucccuguucccagagcccacuuuuuuuucuuuuuuugaaauaaaauagccugucuuucagaucucaaaggcucuuuucagagccaccaaaaaaaaaaaaaaaaaaaaaaaaaaaaaaaaaaaaaaaaaaaaaaaaaaaaaaaaaaaaaaaaaaaaaaaaaaaaaaaaaaaaaaaaaaaaaaaaaaaaa

SEQ ID NO: 36874 - RNA, 1745 nt, Artificial Sequence
  mRNA product Design a-1 (hSL-A100) comprising derived and/or modified sequence from LASV(Togo/2016/7082;Clade VI)__AMR44577__GPCmut10 (opt4)
aggagagucccgcagucggcguccagcggcucugcuuguucgugugugugucguugcaggccuuauucaagcuuaccaugggccagaucaucaccuucuuccaggaggugccccacgugaucgaggaggugaugaacaucgugcugaucgcccugagccugcuggccauccugaagggcguguacaacguggccaccugcggcaucaucggccuggugaccuuccuguuccugugcggcagaagcugcagccugaucuacaagggcagcuacgagcugcagacccuggagcugaacauggagacccugaacaugugcaugccccugagcugcaccaagaacagcagccaccacuacaucagagugggcaacgagaccggccuggagcugacccugaccaacaccagcaucaucaaccacaaguucugcaaccugagcgacgcccacaagagaaaccuguacgaccacgcccugaugagcauccugagcaccuuccaccugagcauccccaacuucaaccaguacgaggccaugagcugcgacuucaacggcggcaagaucagcgugcaguacaaccugagccacgccuacgccguggacgccgccgagcacugcggcaccguggccaacggcgugcugcagaccuucaugagaauggccuggggcggcagcuacaucgcccuggacagcggcagaggcaacugggacugcaucaugaccagcuaccaguaccugaucauccagaacaccaccugggaggaccacugccaguucagcagacccagccccaucggcuaccugggccugcugagccagagaaccagagacaucuacaucagcagaagacugcugggcaccuucaccuggacccugagcgacagcgagggcaacgagacccccggcggcuacugccugaccagauggaugcugaucgaggccgagcugaagugcuucggcaacaccgccguggccaagugcaacgagaagcacgacgaggaguucugcgacaugcugagacuguucgacuucugcaagcaggccauccagagacugaagagcgaggcccagaugagcauccagcugaucaacaaggccgugaacgcccugaucaacgaccagcugaucaugaagaaccaccugagagacaugaugggcauccccuacugcaacuacagcaaguacugguaccugaaccacaccagcagcggcagaaccagccugcccaagugcuggcuggugagcaacggcagcuaccugaacgagacccacuucagcgacgacaucgagcagcaggccgacaacaugaucaccgagaugcugcagaaggaguacaucgacagacagggcaagaccccccugggccugguggaccuguucguguucagcaccagcuucuaccugaucagcaucuuccugcaccugaucaagauccccacccacagacacaucgugggcaagcccugccccaagccccacagacugaaccacaugggcaucugcagcugcggccuguacaagcagcccggcgugcccaccagauggaagagaugaggacuagucccuguucccagagcccacuuuuuuuucuuuuuuugaaauaaaauagccugucuuucagaucucaaaggcucuuuucagagccaccaaaaaaaaaaaaaaaaaaaaaaaaaaaaaaaaaaaaaaaaaaaaaaaaaaaaaaaaaaaaaaaaaaaaaaaaaaaaaaaaaaaaaaaaaaaaaaaaaaaaa

SEQ ID NO: 36875 - RNA, 1745 nt, Artificial Sequence
  mRNA product Design a-1 (hSL-A100) comprising derived and/or modified sequence from LASV(KAK-428;Clade n.d. (VII))__ANH09740__GPCmut10 (opt4)
aggagagucccgcagucggcguccagcggcucugcuuguucgugugugugucguugcaggccuuauucaagcuuaccaugggccagaucgugaccuucuuccaggaggugccccacgugaucgaggaggugaugaacaucgugcugaucgcccugagccugcuggccauccugaagggccuguacaacuucgccaccugcggcgugaucggccugaucaccuuccugcugcugugcggcagaagcugcagcgccaccuacaagggccaguacgagcugcagacccuggagcugaacauggagagccugaacaugugcaugccccugagcugcaccaagaacaacagccaccacuacaucagagccggcaacaacaccggccuggagcugacccugaccaacaccagcaucaucagccacaaguucugcaaccugagcgacgcccacaagaagaaccuguacgaccacacccugaugagcaucaucaccaccuuccaccugagcauccccaacuucaaccaguacgaggccaugagcugcgacuucaacggcggcaagaucagcauccaguacaaccugagccacagcuacgccggcgacgccgcccagcacugcggcaccguggccaacggcgugcugcagaccuucaugagaauggccuggggcggcagcuaccuggcccuggacagcggcagaagaggcugggacugcaucaucagcagcuaccaguaccugaucauccagaacaccaccugggacgaccacugccaguucagcagacccagccccaucggcuaccugggcuucgugagccagaagaccagagacaucuacaucagcagaagacugcugggcaccuucaccuggacccugagcgacagcgagggccacgacaugcccggcggcuacugccugaccagauggaugcugaucgaggccgaccugaagugcuucggcaacaccgccguggccaagugcaacgagaagcacgacgaggaguucugcgacauguggagacuguucgacuucugcaagcaggccauccagagacugaaggccgaggcccagaugaacauccagcugaucaacaaggccgugaacgcccugaucaacgaccagcugaugaugaagaaccaccugagagacaucaugggcauccccuacugcaacuacagcaaguucugguaccugaacaacaccaccaccggcagaaccagccugcccagaugcuggcugaucagcaacggcagcuaccugaacgagacccacuucagcgacgacaucgagcagcaggccgacaacaugaucaccgagaugcugcagaaggaguacauggacagacagggcaagaccccccugggccugguggaccuguucguguucagcaccagcuucuaccugaucaccaucuuccugcaccuggugaagauccccacccacagacacaucgugggcaagcccugccccaagccccacagacugaaccacaugggcaucugcagcugcggccuguacaagcagcccggcgugcccgugagauggaagagaugaggacuagucccuguucccagagcccacuuuuuuuucuuuuuuugaaauaaaauagccugucuuucagaucucaaaggcucuuuucagagccaccaaaaaaaaaaaaaaaaaaaaaaaaaaaaaaaaaaaaaaaaaaaaaaaaaaaaaaaaaaaaaaaaaaaaaaaaaaaaaaaaaaaaaaaaaaaaaaaaaaaaa

SEQ ID NO: 36876 - RNA, 1745 nt, Artificial Sequence; identical to SEQ ID NO: 36870
  mRNA product Design a-1 (hSL-A100) comprising derived and/or modified sequence from LASV(Pinneo-NIG-1969;Clade I)__AIT17836__GPCmut10 (opt4)

SEQ ID NO: 36877 - RNA, 1745 nt, Artificial Sequence
  mRNA product Design a-1 (hSL-A100) comprising derived and/or modified sequence from LASV(ISTH0009-NIG-2011;Clade II)__AIT17404__GPCmut10 (opt4)
aggagagucccgcagucggcguccagcggcucugcuuguucgugugugugucguugcaggccuuauucaagcuuaccaugggccagaucaucaccuucuuccaggaggugccccacgugaucgaggaggugaugaacaucgugcugaucgcccugagccugcuggccauccugaagggcaucuacaacguggccaccugcggccuguucggccuggugagcuuccugcugcugugcggcagaagcugcagcaccaccuacaagggcguguacgagcugcagacccuggagcuggacauggccagccugaacaugugcaugccccugagcugcaccaagaacaacagccaccacuacaucauggugggcaacgagaccggccuggagcugacccugaccaacaccagcaucaucaaccacaaguucugcaaccugagcgacgcccacaagaagaaccuguacgaccacgcccugaugagcaucaucagcaccuuccaccugagcauccccaacuucaaccaguacgaggccaugagcugcgacuucaacggcggcaagaucagcgugcaguacaaccugagccacgccuacgccguggacgccgccaaccacugcggcaccaucgccaacggcgugcugcagaccuucaugagaauggccuggggcggcagcuacaucgcccuggacagcggcaagggcagcugggacugcaucaugaccagcuaccaguaccugaucauccagaacaccaccugggaggaccacugccaguucagcagacccagccccaucggcuaccugggccugcugagccagagaaccagagacaucuacaucagcagaagacugcugggcaccuucaccuggacccugagcgacagcgagggcaacgagacccccggcggcuacugccugaccagauggaugcugaucgaggccgagcugaagugcuucggcaacaccgccguggccaagugcaacgagaagcacgacgaggaguucugcgacaugcugagacuguucgacuucugcaagcaggccaucagaagacugaagaccgaggcccagaugagcauccagcugaucaacaaggccgugaacgcccugaucaacgaccagcugaucaugaagaaccaccugagagacaucaugggcauccccuacugcaacuacagcaaguacugguaccugaaccacaccgugaccggcaagaccagccugcccagaugcuggcuggugagcaacggcagcuaccugaacgagacccacuucagcgacgacaucgagcagcaggccgacaacaugaucaccgagcugcugcagaaggaguacauggacagacagggcaagaccccccugggccugguggaccuguucguguucagcaccagcuucuaccugaucagcaucuuccugcaccugaucaagauccccacccacagacacaucaccggcaagcccugccccaagccccacagacugaaccacaugggcaucugcagcugcggccuguacaagcaccccggcgugcccgugaaguggaagagaugaggacuagucccuguucccagagcccacuuuuuuuucuuuuuuugaaauaaaauagccugucuuucagaucucaaaggcucuuuucagagccaccaaaaaaaaaaaaaaaaaaaaaaaaaaaaaaaaaaaaaaaaaaaaaaaaaaaaaaaaaaaaaaaaaaaaaaaaaaaaaaaaaaaaaaaaaaaaaaaaaaaaa

SEQ ID NO: 36878 - RNA, 1745 nt, Artificial Sequence
  mRNA product Design a-1 (hSL-A100) comprising derived and/or modified sequence from LASV(ISTH2010-NIG-2012;Clade II)__AIT17482__GPCmut10 (opt4)
aggagagucccgcagucggcguccagcggcucugcuuguucgugugugugucguugcaggccuuauucaagcuuaccaugggccagaucaucaccuucuuccaggaggugccccacgugaucgaggaggugaugaacaucgugcugaucgcccugagccugcuggccauccugaagggcaucuacaacguggccaccugcggccuguucggccuggugagcuuccugcugcugugcggcagaagcugcagcaccaccuacaagggcguguacgagcugcagacccuggagcuggacauggccagccugaacaugugcaugccccugagcugcaccaagaacaacagccaccacuacaucauggugggcaacgagaccggccuggagcugacccugaccaacaccagcaucaucaaccacaaguucugcaaccugagcgacgcccacaagaagaaccuguacgaccacgcccugaugagcaucaucagcaccuuccaccugagcauccccaacuucaaccaguacgaggccaugagcugcgacuucaacggcggcaagaucagcgugcaguacaaccugagccacgccuacgccguggacgccgccaaccacugcggcaccaucgccaacggcgugcugcagaccuucaugagaauggccuggggcggcagcuacaucgcccuggacagcggcaagggcagcugggacugcaucaugaccagcuaccaguaccugaucauccagaacaucaccugggaggaccacugccaguucagcagacccagccccaucggcuaccugggccugcugagccagagaaccagagacaucuacaucagcagaagacugcugggcaccuucaccuggacccugagcgacagcgagggcaacgagacccccggcggcuacugccugaccagauggaugcugaucgaggccgagcugaagugcuucggcaacaccgccguggccaagugcaacgagaagcacgacgaggaguucugcgacaugcugagacuguucgacuucugcaagcaggccaucagaagacugaagaccgaggcccagaugagcauccagcugaucaacaaggccgugaacgcccugaucaacgaccagcugaucaugaagaaccaccugagagacaucaugggcauccccuacugcaacuacagcaaguacugguaccugaaccacaccgugaccggcaagaccagccugcccagaugcuggcuggugagcaacggcagcuaccugaacgagacccacuucagcgacgacaucgagcagcaggccgacaacaugaucaccgagcugcugcagaaggaguacaucgacagacagggcaagaccccccugggccugguggaccuguucguguucagcaccagcuucuaccugaucagcaucuuccugcaccuggugaagauccccacccacagacacguggugggcaagcccugccccaagccccacagacugaaccacaugggcaucugcagcugcggccuguacaagcaccccggcgugcccgugaaguggaagagaugaggacuagucccuguucccagagcccacuuuuuuuucuuuuuuugaaauaaaauagccugucuuucagaucucaaaggcucuuuucagagccaccaaaaaaaaaaaaaaaaaaaaaaaaaaaaaaaaaaaaaaaaaaaaaaaaaaaaaaaaaaaaaaaaaaaaaaaaaaaaaaaaaaaaaaaaaaaaaaaaaaaaa

SEQ ID NO: 36879 - RNA, 1745 nt, Artificial Sequence
  mRNA product Design a-1 (hSL-A100) comprising derived and/or modified sequence from LASV(Lassa virus/H.sapiens-wt/NGA/2015/ISTH_0543;Clade II)__AVO03639__GPCmut10 (opt4)
aggagagucccgcagucggcguccagcggcucugcuuguucgugugugugucguugcaggccuuauucaagcuuaccaugggccagaucaucaccuucuuccaggaggugccccacgugaucgaggaggugaugaacaucgugcugaucgcccugagccugcuggccauccugaagggcaucuacaacguggccaccugcggccuguucggccuggugagcuuccugcugcugugcggcagaagcugcagcaccaccuacaagggcguguacgagcugcagacccuggagcuggacauggccaaccugaacaugugcaugccccugagcugcaccaagaacaacagccaccacuacaucauggugggcaacgagaccggccuggagcugacccugaccaacaccagcaucaucaaccacaaguucugcaaccugagcgacgcccacaagaagaaccuguacgaccacgcccugaugagcaucaucagcaccuuccaccugagcauccccaacuucaaccaguacgaggccaugagcugcgacuucaacggcggcaagaucagcgugcaguacaaccugagccacaccuacgccguggacgccgccaaccacugcggcaccaucgccaacggcgugcugcagaccuucaugagaauggccuggggcggcagcuacaucgcccuggacagcggcaagggcagcugggacugcaucaugaccagcuaccaguaccuggugauccagaacaccaccugggaggaccacugccaguucagcagacccagccccaucggcuaccugggccugcugagccagagaaccagagacaucuacaucagcagaagacugcugggcaccuucaccuggacccugagcgacagcgagggcaacgagacccccggcggcuacugccugaccagauggaugcugaucgaggccgagcugaagugcuucggcaacaccgccguggccaagugcaacgagaagcacgacgaggaguucugcgacaugcugagacuguucgacuucugcaagcaggccaucagaagacugaagaccgaggcccagaugagcauccagcugaucaacaaggccgugaacgcccugaucaacgaccagcugaucaugaagaaccaccugagagacaucaugggcauccccuacugcaacuacagcaaguacugguaccugaaccacaccgugaccggcaagaccagccugcccagaugcuggcuggugagcaacggcagcuaccugaacgagacccacuucagcgacgacaucgagcagcaggccgacaacaugaucaccgagcugcugcagaaggaguacaucgacagacagggcaagaccccccugggccugguggaccuguucguguucagcaccagcuucuaccugaucagcaucuuccugcaccuggugaagauccccacccacagacacaucaccggcaagcccugccccaagccccacagacugaaccacaugggcaucugcagcugcggccuguacaagcaccccggcgugcccgugaaguggaagagaugaggacuagucccuguucccagagcccacuuuuuuuucuuuuuuugaaauaaaauagccugucuuucagaucucaaaggcucuuuucagagccaccaaaaaaaaaaaaaaaaaaaaaaaaaaaaaaaaaaaaaaaaaaaaaaaaaaaaaaaaaaaaaaaaaaaaaaaaaaaaaaaaaaaaaaaaaaaaaaaaaaaaa

SEQ ID NO: 36880 - RNA, 1745 nt, Artificial Sequence
  mRNA product Design a-1 (hSL-A100) comprising derived and/or modified sequence from LASV(Lassa virus/H.sapiens-wt/NGA/2016/ISTH_0009;Clade II)__AVO03571__GPCmut10 (opt4)
aggagagucccgcagucggcguccagcggcucugcuuguucgugugugugucguugcaggccuuauucaagcuuaccaugggccagaucaucaccuucuuccaggaggugccccacgugaucgaggaggugaugaacaucgugcugaucgcccugagccugcuggccauccugaagggcaucuacaacguggccaccugcggccugcugggccuggugagcuuccugcugcugugcggcagaagcugcagcaccaccuacaagggcguguacgagcugcagacccuggagcuggacauggccagccugaacaugugcaugccccugagcugcaccaagaacaacagccaccacuacaucauggugggcaacgagaccggccuggagcugacccugaccaacaccagcaucaucaaccacaaguucugcaaccugagcgacgcccacaagaagaaccuguacgaccacgcccugaugagcaucaucagcaccuuccaccugagcauccccaacuucaaccaguacgaggccaugagcugcgacuucaacggcggcagaaucagcgugcaguacaaccugagccacagcuacgccguggacgccgccaaccacugcggcaccaucgccaacggcgugcugcagaccuucaugagaauggccuggggcggcagcuacaucgcccuggacagcggcaagggcagcugggacugcaucaugaccagcuaccaguaccugaucauccagaacaccaccugggaggaccacugccaguucagcagacccagccccaucggcuaccugggccugcugagccagagaaccagagacaucuacaucagcagaagacugcugggcaccuucaccuggacccugagcgacagcgagggcaacgagacccccggcggcuacugccugaccagauggaugcugaucgaggccgagcugaagugcuucggcaacaccgccguggccaagugcaacgagaagcacgacgaggaguucugcgacaugcugagacuguucgacuucugcaagcaggccaucagaagacugaagaccgaggcccagaugagcauccagcugaucaacaaggccgugaacgcccugaucaacgaccagcugaucaugaagaaccaccugagagacaucaugggcauccccuacugcaacuacagcaaguacugguaccugaaccacaccgugaccggcaagaccagccugcccagaugcuggcuggugagcaacggcagcuaccugaacgagacccacuucagcgacgacaucgagcagcaggccgacaacaugaucaccgagcugcugcagaaggaguacaucgacagacagggcaagaccccccugggccugguggaccuguucguguucagcaccagcuucuaccugaucagcaucuuccugcaccuggugaagauccccacccacagacacaucaccggcaagcccugccccaagccccacagacugaaccacaugggcaucugcagcugcggccuguacaaccaccccggcgugcccgugaaguggaagagaugaggacuagucccuguucccagagcccacuuuuuuuucuuuuuuugaaauaaaauagccugucuuucagaucucaaaggcucuuuucagagccaccaaaaaaaaaaaaaaaaaaaaaaaaaaaaaaaaaaaaaaaaaaaaaaaaaaaaaaaaaaaaaaaaaaaaaaaaaaaaaaaaaaaaaaaaaaaaaaaaaaaaa

SEQ ID NO: 36881 - RNA, 1745 nt, Artificial Sequence
  mRNA product Design a-1 (hSL-A100) comprising derived and/or modified sequence from LASV(Lassa virus/H.sapiens-wt/NGA/2016/ISTH_0017;Clade II)__AVO03567__GPCmut10 (opt4)
aggagagucccgcagucggcguccagcggcucugcuuguucgugugugugucguugcaggccuuauucaagcuuaccaugggccagaucaucaccuucuuccaggaggugccccacgugaucgaggaggugaugaacaucgugcugaucgcccugagccugcuggccauccugaagggcaucuacaacguggccaccugcggccuguucggccuggugagcuuccugcugcugugcggcagaagcugcagcaccaccuacaagggcguguacgagcugcagacccuggagcuggacauggccagccugaacaugugcaugccccugagcugcaccaagaacaacagccaccacuacaucauggugggcaacgagaccggccuggagcugacccugaccaacaccagcaucaucaaccacaaguucugcaaccugagcgacgcccacaagaagaaccuguacgaccacgcccugaugagcaucaucagcaccuuccaccugagcauccccaacuucaaccaguacgaggccaugagcugcgacuucaacggcggcaagaucagcgugcaguacaaccugagccacaccuacgccaucgacgccgccaaccacugcggcaccaucgccaacggcgugcugcagaccuucaugagaauggccuggggcggcagcuacaucgcccuggacagcggcaagggcagcugggacugcaucaugaccagcuaccaguaccugaucauccagaacaccaccugggaggaccacugccaguucagcagacccagccccaucggcuaccugggccugcugagccagagaaccagagacaucuacaucagcagaagacugcugggcaccuucaccuggacccugagcgacagcgagggcaacgagacccccggcggcuacugccugaccagauggaugcugaucgaggccgagcugaagugcuucggcaacaccgccguggccaagugcaacgagaagcacgacgaggaguucugcgacaugcugagacuguucgacuucugcaagcaggccaucagaagacugaagaccgaggcccagaugagcauccagcugaucaacaaggccgugaacgcccugaucaacgaccagcugaucaugaagaaccaccugagagacaucaugggcauccccuacugcaacuacagcaaguacugguaccugaaccacaccgugaccggcaagaccagccugcccagaugcuggcuggugagcaacggcagcuaccugaacgagacccacuucagcgacgacaucgagcagcaggccgacaacaugaucaccgagcugcugcagaaggaguacauggacagacagggcaagaccccccugggccugguggaccuguucguguucagcaccagcuucuaccugaucagcaucuuccugcaccuggugagaauccccacccacagacacgugaucggcaagcccugccccaagccccacagacugaaccacaugggcaucugcagcugcggccuguacaagcaccccggcgugcccgugaaguggaagagaugaggacuagucccuguucccagagcccacuuuuuuuucuuuuuuugaaauaaaauagccugucuuucagaucucaaaggcucuuuucagagccaccaaaaaaaaaaaaaaaaaaaaaaaaaaaaaaaaaaaaaaaaaaaaaaaaaaaaaaaaaaaaaaaaaaaaaaaaaaaaaaaaaaaaaaaaaaaaaaaaaaaaa

SEQ ID NO: 36882 - RNA, 1745 nt, Artificial Sequence
  mRNA product Design a-1 (hSL-A100) comprising derived and/or modified sequence from LASV(Lassa virus/H.sapiens-wt/NGA/2018/ISTH_0959;Clade II)__AVV65099__GPCmut10 (opt4)
aggagagucccgcagucggcguccagcggcucugcuuguucgugugugugucguugcaggccuuauucaagcuuaccaugggccagaucaucaccuucuuccaggaggugccccacgugaucgaggaggugaugaacaucgugcugaucgcccugagccugcuggccauccugaagggcaucuacaacguggugaccugcggccuguucggccuggugagcuuccugcugcugugcggcagaagcugcagcaccaccuacaagggcguguacgagcugcagacccuggagcuggacauggccagccugaacaugugcaugccccugagcugcaccaagaacaacagccaccacuacaucauggugggcaacgagaccggccuggagcugacccugaccaacaccagcaucaucaaccacaaguucugcaaccugagcgacgcccacaagaagaaccuguacgaccacgcccugaugagcaucaucagcaccuuccaccugagcauccccaacuucaaccaguacgaggccaugagcugcgacuucaacggcggcaagaucagcgugcaguacaaccugagccacgccuacgccaucgacgccgccaaccacugcggcaccaucgccaacggcgugcugcagaccuucaugagaauggccuggggcggcagcuacaucgcccuggacagcggcaagggcagcugggacugcaucaugaccagcuaccaguaccugaucauccagaacaccaccugggaggaccacugccaguucagcagacccagccccaucggcuaccugggccugcugagccagagaaccagagacaucuacaucagcagaagacugcugggcaccuucaccuggacccugagcgacagcgagggcaacgagacccccggcggcuacugccugaccagauggaugcugaucgaggccgagcugaagugcuucggcaacaccgccguggccaagugcaacgagaagcacgacgaggaguucugcgacaugcugagacuguucgacuucugcaagcaggccaucagaagacugaagaccgaggcccagaugagcauccagcugaucaacaaggccgugaacgcccugaucaacgaccagcugaucaugaagaaccaccugagagacaucaugggcauccccuacugcaacuacagcaaguacugguaccugaaccacaccgugaccggcaagaccagccugcccagaugcuggcuggugagcaacggcagcuaccugaacgagacccacuucagcgacgacaucgagcagcaggccgacaacaugaucaccgagcugcugcagaaggaguacaucgacagacagggcaagaccccccugggccugguggaccuguucguguucagcaccagcuucuaccugaucagcaucuuccugcaccuggugaagauccccacccacagacacgugaucggcaagcccugccccaagccccacagacugaaccacaugggcaucugcagcugcggccuguacaagcaccccggcgugcccgugaaguggaagagaugaggacuagucccuguucccagagcccacuuuuuuuucuuuuuuugaaauaaaauagccugucuuucagaucucaaaggcucuuuucagagccaccaaaaaaaaaaaaaaaaaaaaaaaaaaaaaaaaaaaaaaaaaaaaaaaaaaaaaaaaaaaaaaaaaaaaaaaaaaaaaaaaaaaaaaaaaaaaaaaaaaaaa

SEQ ID NO: 36883 - RNA, 1745 nt, Artificial Sequence
  mRNA product Design a-1 (hSL-A100) comprising derived and/or modified sequence from LASV(LASV003-NIG-2008;Clade II)__AIT17580__GPCmut10 (opt4)
aggagagucccgcagucggcguccagcggcucugcuuguucgugugugugucguugcaggccuuauucaagcuuaccaugggccagaucaucaccuucuuccaggaggugccccacgugaucgaggaggugaugaacaucgugcugaucgcccugagccugcuggccauccugaagggcaucuacaacguggccaccugcggccuguucggccuggugagcuuccugcugcugugcggcagaagcugcagcaccaccuacaagggcguguacgagcugcagacccuggagcuggacauggccagccugaacaugugcaugccccugagcugcaccaagaacaacagccaccacuacaucauggugggcaacgagaccggccuggagcugacccugaccaacaccagcaucaucaaccacaaguucugcaaccugagcgacgcccacaagaagaaccuguacgaccacgcccugaugagcaucaucagcaccuuccaccugagcauccccaacuucaaccaguacgaggccaugagcugcgacuucaacggcggcaagaucagcgugcaguacaaccugagccacaccuacgccguggacgccgccaaccacugcggcaccaucgccaacggcgugcugcagaccuucaugagaauggccuggggcggcagcuacaucgcccuggacagcggcaagggcagcugggacugcaucaugaccagcuaccaguaccugaucauccagaacaccaccugggaggaccacugccaguucagcagacccagccccaucggcuaccugggccugcugagccagagaaccagagacaucuacaucagcagaagacugcugggcaccuucaccuggacccugagcgacagcgagagcaacgagacccccggcggcuacugccugaccagauggaugcugaucgaggccgagcugaagugcuucggcaacaccgccguggccaagugcaacgagaagcacgacgaggaguucugcgacaugcugagacuguucgacuucugcaagcaggccaucagaagacugaaggccgaggcccagaugagcauccagcugaucaacaaggccgugaacgcccugaucaacgaccagcugaucaugaagaaccaccugagagacaucaugggcauccccuacugcaacuacagcaaguacugguaccugaaccacaccgugaccggcagaaccagccugcccagaugcuggcuggugagcaacggcagcuaccugaacgagacccacuucagcgacgacaucgagcagcaggccgacaacaugaucaccgagcugcugcagaaggaguacauggacagacagggcaagaccccccugggccugguggaccuguucguguucagcaccagcuucuaccugaucagcaucuuccugcaccuggugaagauccccacccacagacacgugaucggcaagcccugccccaagccccacagacugaaccacaugggcaucugcagcugcggccuguacaagcaccccggcgugcccgugaaguggaagagaugaggacuagucccuguucccagagcccacuuuuuuuucuuuuuuugaaauaaaauagccugucuuucagaucucaaaggcucuuuucagagccaccaaaaaaaaaaaaaaaaaaaaaaaaaaaaaaaaaaaaaaaaaaaaaaaaaaaaaaaaaaaaaaaaaaaaaaaaaaaaaaaaaaaaaaaaaaaaaaaaaaaaa

SEQ ID NO: 36884 - RNA, 1745 nt, Artificial Sequence
  mRNA product Design a-1 (hSL-A100) comprising derived and/or modified sequence from LASV(LASV035-NIG-2009;Clade II)__AIT17588__GPCmut10 (opt4)
aggagagucccgcagucggcguccagcggcucugcuuguucgugugugugucguugcaggccuuauucaagcuuaccaugggccagaucaucaccuucuuccaggaggugccccacgugaucgaggaggugaugaacaucgugcugaucgcccugagccugcuggccauccugaagggcaucuacaacguggccaccugcggccuguucggccuggugagcuuccugcugcugugcggcagaagcugcagcaccaccuacaagggcguguacgagcugcagacccuggagcuggacauggccagccugaacaugugcaugccccugagcugcaccaagaacaacagccaccacuacaucauggugggcaacgagaccggccuggagcugacccugaccaacaccagcaucaucaaccacaaguucugcaaccugagcgacgcccacaagaagaaccuguacgaccacgcccugaugagcaucaucagcaccuuccaccugagcauccccaacuucaaccaguacgaggccaugagcugcgacuucaacggcggcaagaucagcgugcaguacaaccugagccacgccuacgccguggacgccgccaaccacugcggcaccaucgccaacggcgugcugcagaccuucaugagaauggccuggggcggcagcuacaucgcccuggacagcggcaagggcagcugggacugcaucaugaccagcuaccaguaccugaucauccagaacaccaccugggaggaccacugccaguucagcagacccagccccaucggcuaccugggccugcugagccagagaaccagagacaucuacaucagcagaagacugcugggcaccuucaccuggacccugagcgacagcgagggcaacgagacccccggcggcuacugccugaccagauggaugcugaucgaggccgagcugaagugcuucggcaacaccgccguggccaagugcaacgagaagcacgacgaggaguucugcgacaugcugagacuguucgacuucugcaagcaggccaucagaagacugaaggccgaggcccagaugagcauccagcugaucaacaaggccgugaacgcccugaucaacgaccagcugaucaugaagaaccaccugagagacaucaugggcauccccuacugcaacuacagcaaguacugguaccugaaccacaccgugaccggcaagaccagccugcccagaugcuggcuggugagcaacggcagcuaccugaacgagacccacuucagcgacgacaucgagcagcaggccgacaacaugaucaccgagcugcugcagaaggaguacaucgacagacagggcaagaccccccugggccugguggaccuguucguguucagcaccagcuucuaccugaucagcaucuuccugcaccuggugaagauccccacccacagacacgugaucggcaagcccugccccaagccccacagacugaaccacaugggcaucugcagcugcggccuguacaagcaccccggcgugcccgugaaguggaagagaugaggacuagucccuguucccagagcccacuuuuuuuucuuuuuuugaaauaaaauagccugucuuucagaucucaaaggcucuuuucagagccaccaaaaaaaaaaaaaaaaaaaaaaaaaaaaaaaaaaaaaaaaaaaaaaaaaaaaaaaaaaaaaaaaaaaaaaaaaaaaaaaaaaaaaaaaaaaaaaaaaaaaa

SEQ ID NO: 36885 - RNA, 1745 nt, Artificial Sequence
  mRNA product Design a-1 (hSL-A100) comprising derived and/or modified sequence from LASV(LASV1000-NIG-2009;Clade II)__AIT17782__GPCmut10 (opt4)
aggagagucccgcagucggcguccagcggcucugcuuguucgugugugugucguugcaggccuuauucaagcuuaccaugggccagaucaucaccuucuuccaggaggugccccacgugaucgaggaggugaugaacaucgugcugaucgcccugagccugcuggccauccugaagggcaucuacaacguggccaccugcggccuguucggccuggugagcuuccugcugcugugcggcagaagcugcagcaccaccuacaagggcguguacgagcugcagacccuggagcuggacauggccagccugaacaugugcaugccccugagcugcaccaagaacaacagccaccacuacaucauggugggcaacgagaccggccuggagcugacccugaccaacaccagcaucaucaaccacaaguucugcaaccugagcgacgcccacaagaagaaccuguacgaccacgcccugaugagcaucaucagcaccuuccaccugagcauccccaacuucaaccaguacgaggccaugagcugcgacuucaacggcggcaagaucagcgugcaguacaaccugagccacaccuacgccguggacgccgccaaccacugcggcaccaucgccaacggcgugcugcagaccuucaugagaauggccuggggcggcagcuacaucgcccuggacagcggcaagggcagcugggacugcaucaugaccagcuaccaguaccugaucauccagaacaccaccugggaggaccacugccaguucagcagacccagccccaucggcuaccugggccugcugagccagagaaccagagacaucuacaucagcagaagacugcugggcaccuucaccuggacccugagcgacagcgagggcaacgagacccccggcggcuacugccugaccagauggaugcugaucgaggccgagcugaagugcuucggcaacaccgccguggccaagugcaacgagaagcacgacgaggaguucugcgacaugcugagacuguucgacuucugcaagcaggccaucaagagacugaagaccgaggcccagaugagcauccagcugaucaacaaggccgugaacgcccugaucaacgaccagcugaucaugaagaaccaccugagagacaucaugggcauccccuacugcaacuacagcaaguacugguaccugaaccacaccgugaccggcaagaccagccugcccagaugcuggcuggugagcaacggcagcuaccugaacgagacccacuucagcgacgacaucgagcagcaggccgacaacaugaucaccgagcugcugcagaaggaguacaucgacagacagggcaagaccccccugggccugguggaccuguucguguucagcaccagcuucuaccugaucagcaucuuccugcaccuggugaagauccccacccacagacacguggugggcaagcccugccccaagccccacagacugaaccacaugggcaucugcagcugcggccuguacaagcaccccggcgugcccgugaaguggaagagaugaggacuagucccuguucccagagcccacuuuuuuuucuuuuuuugaaauaaaauagccugucuuucagaucucaaaggcucuuuucagagccaccaaaaaaaaaaaaaaaaaaaaaaaaaaaaaaaaaaaaaaaaaaaaaaaaaaaaaaaaaaaaaaaaaaaaaaaaaaaaaaaaaaaaaaaaaaaaaaaaaaaaa

SEQ ID NO: 36886 - RNA, 1745 nt, Artificial Sequence
  mRNA product Design a-1 (hSL-A100) comprising derived and/or modified sequence from LASV(LASV221-NIG-2010;Clade II)__AIT17624__GPCmut10 (opt4)
aggagagucccgcagucggcguccagcggcucugcuuguucgugugugugucguugcaggccuuauucaagcuuaccaugggccagaucaucaccuucuuccaggaggugccccacgugaucgaggaggugaugaacaucgugcugaucgcccugagccugcuggccauccugaagggcaucuacaacguggccaccugcggccuguucggccuggugagcuuccugcugcugugcggcagaagcugcagcaccaccuacaagggcguguacgagcugcagacccuggagcuggacauggccagccugaacaugugcaugccccugagcugcaccaagaacaacagccaccacuacaucauggugggcaacgagaccggccuggagcugacccugaccaacaccagcaucaucaaccacaaguucugcaaccugagcgacgcccacaagaagaaccuguacgaccacgcccugaugagcaucaucagcaccuuccaccugagcauccccaacuucaaccaguacgaggccaugagcugcgacuucaacggcggcaagaucagcgugcaguacaaccugagccacaccuacgccaucgacgccgccaaccacugcggcaccaucgccaacggcgugcugcagaccuucaugagaauggccuggggcggcagcuacaucgcccuggacagcggcaagggcagcugggacugcaucaugaccagcuaccaguaccugaucauccagaacaccaccugggaggaccacugccaguucagcagacccagccccaucggcuaccugggccugcugagccagagaaccagagacaucuacaucagcagaagacugcugggcaccuucaccuggacccugagcgacagcgagggcaacgagacccccggcggcuacugccugaccagauggaugcugaucgaggccgagcugaagugcuucggcaacaccgccguggccaagugcaacgagaagcacgacgaggaguucugcgacaugcugagacuguucgacuucugcaagcaggccaucagaagacugaagaccgaggcccagaugagcauccagcugaucaacaaggccgugaacgcccugaucaacgaccagcugaucaugaagaaccaccugagagacaucaugggcauccccuacugcaacuacagcaaguacugguaccugaaccacaccgugaccggcaagaccagccugcccagaugcuggcuggugagcaacggcagcuaccugaacgagacccacuucagcgacgacaucgagcagcaggccgacaacaugaucaccgagaugcugcagaaggaguacauggacagacagggcaagaccccccugggccugguggaccuguucguguucagcaccagcuucuaccugaucagcaucuuccugcaccuggugaagauccccacccacagacacgugaucggcaagcccugccccaagccccacagacugaaccacaugggcaucugcagcugcggccuguacaagcaccccggcgugcccgugaaguggaagagaugaggacuagucccuguucccagagcccacuuuuuuuucuuuuuuugaaauaaaauagccugucuuucagaucucaaaggcucuuuucagagccaccaaaaaaaaaaaaaaaaaaaaaaaaaaaaaaaaaaaaaaaaaaaaaaaaaaaaaaaaaaaaaaaaaaaaaaaaaaaaaaaaaaaaaaaaaaaaaaaaaaaaa

SEQ ID NO: 36887 - RNA, 1745 nt, Artificial Sequence
  mRNA product Design a-1 (hSL-A100) comprising derived and/or modified sequence from LASV(LASV237-NIG-2010;Clade II)__AIT17638__GPCmut10 (opt4)
aggagagucccgcagucggcguccagcggcucugcuuguucgugugugugucguugcaggccuuauucaagcuuaccaugggccagaucaucaccuucuuccaggaggugccccacgugaucgaggaggugaugaacaucgugcugaucgcccugagccugcuggccauccugaagggcaucuacaacguggccaccugcggccuguucggccuggugagcuuccugcugcugugcggcagaagcugcagcaccaccuacaagggcguguacgagcugcagacccuggagcuggacauggccagccugaacaugugcaugccccugagcugcaccaagaacaacagccaccacuacaucauggugggcaacgagaccggccuggagcugacccugaccaacaccagcaucaucaaccacaaguucugcaaccugagcgacgcccacaagaaggaccuguacgaccacgcccugaugagcaucaucagcaccuuccaccugagcauccccaacuucaaccaguacgaggccaugagcugcgacuucaacggcggcaagaucagcgugcaguacaaccugagccacaccuacgccguggacgccgccaaccacugcggcaccaucgccaacggcgugcugcagaccuucaugagaauggccuggggcggcagcuacaucgcccuggacagcggcaagggcagcugggacugcaucaugaccagcuaccaguaccugaucauccagaacaccaccugggaggaccacugccaguucagcagacccagccccaucggcuaccugggccugcugagccagagaaccagagacaucuacaucagcagaagacugcugggcaccuucaccuggacccugagcgacagcgagggcaacgagacccccggcggcuacugccugaccagauggaugcugaucgaggccgagcugaagugcuucggcaacaccgccguggccaagugcaacgagaagcacgacgaggaguucugcgacaugcugagacuguucgacuucugcaagcaggccaucagaagacugaagaccgaggcccagaugagcauccagcugaucaacaaggccgugaacgcccugaucaacgaccagcugaucaugaagaaccaccugagagacaucaugggcauccccuacugcaacuacagcaaguacugguaccugaaccacaccgugaccggcaagaccagccugcccagaugcuggcuggugagcaacggcagcuaccugaacgagacccacuucagcgacgacaucgagcagcaggccgacaacaugaucaccgagcugcugcagaaggaguacauggacagacagggcaagaccccccugggccugguggaccuguucguguucagcaccagcuucuaccugaucagcaucuuccugcaccugaucaagauccccacccacagacacaucaccggcaagcccugccccaagccccacagacugaaccacaugggcaucugcagcugcggccuguacaagcaccccggcgugcccgugaaguggaagagaugaggacuagucccuguucccagagcccacuuuuuuuucuuuuuuugaaauaaaauagccugucuuucagaucucaaaggcucuuuucagagccaccaaaaaaaaaaaaaaaaaaaaaaaaaaaaaaaaaaaaaaaaaaaaaaaaaaaaaaaaaaaaaaaaaaaaaaaaaaaaaaaaaaaaaaaaaaaaaaaaaaaaa

SEQ ID NO: 36888 - RNA, 1745 nt, Artificial Sequence
  mRNA product Design a-1 (hSL-A100) comprising derived and/or modified sequence from LASV(LASV253-NIG-2011;Clade II)__AIT17670__GPCmut10 (opt4)
aggagagucccgcagucggcguccagcggcucugcuuguucgugugugugucguugcaggccuuauucaagcuuaccaugggccagaucaucaccuucuuccaggaggugccccacgugaucgaggaggugaugaacaucgugcugaucgcccugagccugcuggccauccugaagggcaucuacaacguggccaccugcggccuguucggccuggugagcuuccugcugcugugcggcagaagcugcagcaccaccuacaagggcguguacgagcugcagacccuggagcuggacauggccagccugaacaugugcaugccccugagcugcaccaagaacaacagccaccacuacaucauggugggcaacgagaccggccuggagcugacccugaccaacaccagcaucaucaaccacaaguucugcaaccugagcgacgcccacaagaagaaccuguacgaccacgcccugaugagcaucaucagcaccuuccaccugagcauccccaacuucaaccaguacgaggccaugagcugcgacuucaacggcggcaagaucagcgugcaguacaaccugagccacaccuacgccguggacgccgccaaccacugcggcaccaucgccaacggcgugcugcagaccuucaugagaauggccuggggcggcagcuacaucgcccuggacagcggcaagggcagcugggacugcaucaugaccagcuaccaguaccugaucauccagaacaccaccugggaggaccacugccaguucagcagacccagccccaucggcuaccugggccugcugagccagagaaccagagacaucuacaucagcagaagacugcugggcaccuucaccuggacccugagcgacagcgagggcaacgagacccccggcggcuacugccugaccagauggaugcugaucgaggccgagcugaagugcuucggcaacaccgccguggccaagugcaacgagaagcacgacgaggaguucugcgacaugcugagacuguucgacuucugcaagcaggccaucagaagacugaaggccgaggcccagaugagcauccagcugaucaacaaggccgugaacgcccugaucaacgaccagcugaucaugaagaaccaccugagagacaucaugggcauccccuacugcaacuacagcaaguacugguaccugaaccacaccgugaccggcagaaccagccugcccagaugcuggcuggugagcaacggcagcuaccugaacgagacccacuucagcgacgacaucgagcagcaggccgacaacaugaucaccgagcugcugcagaaggaguacaucgacagacagggcaagaccccccugggccugguggaccuguucguguucagcaccagcuucuaccugaucagcaucuuccugcaccuggugaagauccccacccacagacacaucaucggcaagcccugccccaagccccacagacugaaccacaugggcaucugcagcugcggccuguacaagcaccccggcgugcccgugaaguggaagagaugaggacuagucccuguucccagagcccacuuuuuuuucuuuuuuugaaauaaaauagccugucuuucagaucucaaaggcucuuuucagagccaccaaaaaaaaaaaaaaaaaaaaaaaaaaaaaaaaaaaaaaaaaaaaaaaaaaaaaaaaaaaaaaaaaaaaaaaaaaaaaaaaaaaaaaaaaaaaaaaaaaaaa

SEQ ID NO: 36889 - RNA, 1745 nt, Artificial Sequence
  mRNA product Design a-1 (hSL-A100) comprising derived and/or modified sequence from LASV(LASV254-NIG-2011;Clade II)__AIT17674__GPCmut10 (opt4)
aggagagucccgcagucggcguccagcggcucugcuuguucgugugugugucguugcaggccuuauucaagcuuaccaugggccagaucaucaccuucuuccaggaggugccccacgugaucgaggaggugaugaacaucgugcugaucgcccugagccugcuggccauccugaagggcaucuacaacguggccaccugcggccuguucggccuggugagcuuccugcugcugugcggcagaagcugcagcaccaccuacaagggcguguacgagcugcagacccuggagcuggacaugaccaaccugaacaugugcaugccccugagcugcaccaagaacaacagccaccacuacaucauggugggcaacgagaccggccuggagcugacccugaccaacaccagcaucaucaaccacaaguucugcaaccugagcgacgcccacaagaagaaccuguacaaccacgcccugaugagcaucaucagcaccuuccaccugagcauccccaacuucaaccaguacgaggccaugagcugcgacuucaacggcggcaagaucagcgugcaguacaaccugagccacagcuacgccguggacgccgccaaccacugcggcaccaucgccaacggcgugcugcagaccuucaugagaauggccuggggcggcagcuacaucgcccuggacagcggcaagggcaacugggacugcaucaugaccagcuaccaguaccugaucauccagaacaccaccugggaggaccacugccaguucagcagacccagccccaucggcuaccugggccugcugagccagagaaccagagacaucuacaucagcagaagacugcugggcaccuucaccuggacccugagcgacagcgagggcaacgagacccccggcggcuacugccugaccagauggaugcugaucgaggccgagcugaagugcuucggcaacaccgccguggccaagugcaacgagaagcacgacgaggaguucugcgacaugcugagacuguucgacuucugcaagcaggccaucagaagacugaagaccgaggcccaggccaacauccagcugaucaacaaggccgugaacgcccugaucaacgaccagcugaucaugaagaaccaccugagagacaucaugggcauccccuacugcaacuacagcaaguacugguaccugaaccacaccgugaccggcaagaccagccugcccagaugcuggcuggugagcaacggcagcuaccugaacgagacccacuucagcgacgacaucgagcagcaggccgacaacaugaucaccgagcugcugcagaaggaguacauggacagacagggcaagaccccccugggccugguggaccuguucguguucagcaccagcuucuaccugaucagcaucuuccugcaccuggugaagauccccacccacagacacgugaucggcaagcccugccccaagccccacagacugaaccacaugggcaucugcagcugcggccuguacaagcaccccggcgugcccgugaaguggaagagaugaggacuagucccuguucccagagcccacuuuuuuuucuuuuuuugaaauaaaauagccugucuuucagaucucaaaggcucuuuucagagccaccaaaaaaaaaaaaaaaaaaaaaaaaaaaaaaaaaaaaaaaaaaaaaaaaaaaaaaaaaaaaaaaaaaaaaaaaaaaaaaaaaaaaaaaaaaaaaaaaaaaaa

SEQ ID NO: 36890 - RNA, 1745 nt, Artificial Sequence
  mRNA product Design a-1 (hSL-A100) comprising derived and/or modified sequence from LASV(Nig08-A19;Clade III)__ADU56618__GPCmut10 (opt4)
aggagagucccgcagucggcguccagcggcucugcuuguucgugugugugucguugcaggccuuauucaagcuuaccaugggccagaucgugaccuucuuccaggaggugccccacgugaucgaggaggugaugaacaucgugcugaucgcccugagcauccuggccauccugaagggccuguacaacaucgccaccugcggccugaucggccuggugaccuuccugcugcugagcggcagaagcugcagcaugaccuacaagggcguguacgagcugcagacccuggagcugaacaugaacacccugaacaugugcaugccccugagcugcaccaagaacaacagccaccacuacaucauggugggcaacgagaccggccuggagcugacccugaccaacaccagccugcugcaccacaaguucugcaaccugagcgacgcccacaagaagaaccuguacgaccacacccugaugagcaucaucagcaccuuccaccugagcauccccaacuucaaccaguacgaggccaugagcugcgacuucaacggcggcaagaucaccgugcaguacaaccugagccacagcuacgccaucgacgccgccaaccacugcggcaccguggccaacggcgugcugcagaccuucaugagaauggccuggggcggcagcuacaucgcccuggacagcggcagaggcaagugggacugcaucaugaccagcuaccaguaccugaucauccagaacaccaccugggaggaccacugccaguucagcagacccagccccaucggcuaccugggccugcugagccagagaaccagagacaucuacaucagcagaagacugcugggcaccuucaccuggacccugagcgacagcgagggcaacgagacccccggcggcuacugccugaccagauggaugcugaucgaggccgagcugaagugcuucggcaacaccgccguggccaagugcaacgagaagcacgacgaggaguucugcgacaugcugagacuguucgacuucugcaagcaggccaucagaagacugaaggccgaggcccagaugagcauccagcugaucaacaaggccgugaacgcccugaucaacgaccagcugaucaugaagaaccaccugagagacaucaugggcauccccuacugcaacuacagcaaguacugguaccugaaccacaccagcaccggcagaaccagccugcccagaugcuggcuggugagcaacggcagcuaccugaacgagacccacuucagcgacgacaucgagcagcaggccgacaacaugaucaccgagaugcugcagaaggaguaccuggacagacagggcaagaccccccugggccugguggaccuguucguguucagcaccagcuucuaccugaucagcaucuuccugcaccuggugaagauccccacccacagacacaucgugggcaagcccugccccaagccccacagacugaaccacaugggcaucugcagcugcggccuguacaagcagcccggcgugcccgugagauggaagagaugaggacuagucccuguucccagagcccacuuuuuuuucuuuuuuugaaauaaaauagccugucuuucagaucucaaaggcucuuuucagagccaccaaaaaaaaaaaaaaaaaaaaaaaaaaaaaaaaaaaaaaaaaaaaaaaaaaaaaaaaaaaaaaaaaaaaaaaaaaaaaaaaaaaaaaaaaaaaaaaaaaaaa

SEQ ID NO: 36891 - RNA, 1748 nt, Artificial Sequence
  mRNA product Design a-1 (hSL-A100) comprising derived and/or modified sequence from LASV(G1180-SLE-2010;Clade IV)__AIT17168__GPCmut10 (opt4)
aggagagucccgcagucggcguccagcggcucugcuuguucgugugugugucguugcaggccuuauucaagcuuaccaugggccagaucgugaccuucuuccaggaggugccccacgugaucgaggaggugaugaacaucgugcugaucgcccugagcauccuggccgugcugaagggccuguacaacuucgccaccugcggccuggugggccugcugaccuuccugcugcugugcggcagaagcugcaccgccagcagauacaagggcguguacgagcugcagacccuggagcugaacauggagacccugaacaugugcaugccccugagcugcaccaagaacaacagccaccacuacaucauggugggcaacgagaccggccuggagcugacccugaccaacaccagcaucaucaaccacaaguucugcaaccugagcgacgcccacaagaagaaccuguacgaccacgcccugaugagcaucaucagcaccuuccaccugagcauccccaacuucaaccaguacgaggccaugagcugcgacuucaacggcggcaagaucagcgugcaguacaaccugagccacagcuacgccggcgacgccgccaaccacugcggcaccguggccaacggcgugcugcagaccuucaugagaauggccuggggcggcagcuacaucgcccuggacagcggccacggcagcugggacugcaucaugaccagcuaccaguaccugaucauccagaacaccaccugggaggaccacugccaguucagcagacccagccccaucggcuaccugggccugcugagccagagaaccagagacaucuacaucagcagaagacugcugggcaccuucaccuggacccugagcgacagcgagggcaaggacacccccggcggcuacugccugaccagauggaugcugaucgaggccgagcugaagugcuucggcaacaccgccguggccaagugcaacgagaagcacgacgaggaguucugcgacaugcugagacuguucgacuucugcaagcaggccauccagagacugaaggccgaggcccagaugagcauccagcugaucaacaaggccgugaacgcccugaucaacgaccagcugaucaugaagaaccaccugagagacaucaugggcauccccuacugcaacuacagcaaguacugguaccugaaccacaccaccaccggcaagaccagccugcccaagugcuggcuggugagcaacggcagcuaccugaacgagacccacuucagcgacgacaucgagcagcaggccgacaacaugaucaccgagaugcugcagaaggaguacauggagagacagggcaagaccccccugggccugguggaccuguucguguucagcaccagcuucuaccugaucagcaucuuccugcaccuggugaagauccccacccacagacacaucgugggcaagagcugccccaagccccacagacugaaccacaugggcaucugcagcugcggccuguacaagcagcccggcgugcccgugaaguggaagagaugaggacuagucccuguucccagagcccacuuuuuuuucuuuuuuugaaauaaaauagccugucuuucagaucucaaaggcucuuuucagagccaccaaaaaaaaaaaaaaaaaaaaaaaaaaaaaaaaaaaaaaaaaaaaaaaaaaaaaaaaaaaaaaaaaaaaaaaaaaaaaaaaaaaaaaaaaaaaaaaaaaaaa

SEQ ID NO: 36892 - RNA, 1748 nt, Artificial Sequence
  mRNA product Design a-1 (hSL-A100) comprising derived and/or modified sequence from LASV(G1442-SLE-2011;Clade IV)__AIT17180__GPCmut10 (opt4)
aggagagucccgcagucggcguccagcggcucugcuuguucgugugugugucguugcaggccuuauucaagcuuaccaugggccagaucgugaccuucuuccaggaggugccccacgugaucgaggaggugaugaacaucgugcugaucgcccugagcauccuggccgugcugaagggccuguacaacguggccaccugcggccugaucggccuggugaccuuccugcugcugugcggcagaagcugcaccaccacccuguacaagggcguguacgagcugcagacccuggagcugaacauggagacccugaacaugugcaugccccugagcugcaccaagaacaacagccaccacuacaucagagugggcaacgagaccggccuggagcugacccugaccaacaccagcaucaucaaccacaaguucugcaaccugagcgacgcccacaagaagaaccuguacgaccacgcccugaugagcaucaucagcaccuuccaccugagcauccccaacuucaaccaguacgaggccaugagcugcgacuucaacggcggcaagaucagcgugcaguacaaccugagccacagcuacgccggcgacgccgccaaccacugcggcaccguggccaacggcgugcugcagaccuucaugagaauggccuggggcggcagcuacaucgcccuggacagcggcagaggcaacugggacugcaucaugaccagcuaccaguaccugaucauccagaacaccaccugggacgaccacugccaguucagcagacccagccccaucggcuaccugggccugcugagccagagaaccagagacguguacaucagcagaagacugcugggcaccuucaccuggacccugagcgacagcgagggcaaggacacccccggcggcuacugccugaccagauggaugcugaucgaggccgagcugaagugcuucggcaacaccgccguggccaagugcaacgagaagcacgacgaggaguucugcgacaugcugagacuguucgacuucugcaagcaggccauccagagacugaaggccgaggcccagaugagcauccagcugaucaacaaggccgugaacgcccugaucaacgaccagcugaucaugaagaaccaccugagagacaucaugggcauccccuacugcaacuacagcaaguacugguaccugaacaacaccgccaccggcaagaccagccugcccaagugcuggcugaucagcaacggcagcuaccugaacgagacccacuucagcgacgacaucgagcaggaggccgacaacaugaucaccgagaugcugcagaaggaguacauggagagacagggcaagaccccccugggccugguggaccuguucguguucagcaccagcuucuaccugaucagcaucuuccugcaccuggugaagauccccacccacagacacaucgugggcaagagcugccccaagccccacagacugaaccacaugggcaucugcagcugcggccuguacaagcagcccggcgugcccgugagauggaagagaugaggacuagucccuguucccagagcccacuuuuuuuucuuuuuuugaaauaaaauagccugucuuucagaucucaaaggcucuuuucagagccaccaaaaaaaaaaaaaaaaaaaaaaaaaaaaaaaaaaaaaaaaaaaaaaaaaaaaaaaaaaaaaaaaaaaaaaaaaaaaaaaaaaaaaaaaaaaaaaaaaaaaa

SEQ ID NO: 36893 - RNA, 1748 nt, Artificial Sequence
  mRNA product Design a-1 (hSL-A100) comprising derived and/or modified sequence from LASV(G3010-SLE-2013;Clade IV)__AIT17344__GPCmut10 (opt4)
aggagagucccgcagucggcguccagcggcucugcuuguucgugugugugucguugcaggccuuauucaagcuuaccaugggccagaucgugaccuucuuccaggaggugccccacgugaucgaggaggugaugaacaucgugcugaucgcccugagcauccuggccgugcugaagggccuguacaacuucgccaccugcggccuggugggccuggugaccuuccugcugcugugcggcagaagcugcaccaccagccuguacaagggcguguacgagcugcagacccuggagcugaacauggagacccugaacaugugcaugccccugagcugcaccaagaacaacagccaccacuacaucauggugggcaacgagaccggccuggagcugacccugaccaacaccagcaucaucaaccacaaguucugcaaccugagcgacgcccacaagaagaaccuguacaaccacgcccugaugagcaucaucagcaccuuccaccugagcauccccaacuucaaccaguacgaggccaugagcugcgacuucaacggcggcaagaucagcgugcaguacaaccugagccacagcuacgccggcgacgccgccagccacugcggcaccguggccaacggcgugcugcagaccuucaugagaauggccuggggcggcagcuacaucgcccuggacagcggcuacggcaagugggacugcaucaugaccagcuaccaguaccugaucauccagaacaccaccugggaggaccacugccaguucagcagacccagccccaucggcuaccugggccugcugagccagagaaccagagacaucuacaucagcagaagacugcugggcaccuucaccuggacccugagcgacagcgagggcaaggacacccccggcggcuacugccugaccagauggaugcugaucgaggccgagcugaagugcuucggcaacaccgccguggccaagugcaacgagaagcacgacgaggaguucugcgacaugcugagacuguucgacuucugcaagcaggccauccagagacugaagaccgaggcccagaugagcauccagcugaucaacaaggccgugaacgcccugaucaacgaccagcugaucaugaagaaccaccugagagacaucaugggcauccccuacugcaacuacagcaaguacugguaccugaaccacaccaccaccggcaagaccagccugcccaagugcuggcuggugagcaacggcagcuaccugaacgagacccacuucagcgacgacaucgagcagcaggccgacaacaugaucaccgagaugcugcagaaggaguacauggagagacagggcaagaccccccugggccugguggaccuguucguguucagcaccagcuucuaccugaucagcaucuuccugcaccuggugaagauccccacccacagacacaucgugggcaagagcugccccaagccccacagacugaaccacaugggcaucugcagcugcggccuguacaagcagcccggcgugcccgugagauggaagagaugaggacuagucccuguucccagagcccacuuuuuuuucuuuuuuugaaauaaaauagccugucuuucagaucucaaaggcucuuuucagagccaccaaaaaaaaaaaaaaaaaaaaaaaaaaaaaaaaaaaaaaaaaaaaaaaaaaaaaaaaaaaaaaaaaaaaaaaaaaaaaaaaaaaaaaaaaaaaaaaaaaaaa

SEQ ID NO: 36894 - RNA, 1748 nt, Artificial Sequence
  mRNA product Design a-1 (hSL-A100) comprising derived and/or modified sequence from LASV(G502-SLE-2009;Clade IV)__AIT17126__GPCmut10 (opt4)
aggagagucccgcagucggcguccagcggcucugcuuguucgugugugugucguugcaggccuuauucaagcuuaccaugggccagaucgugaccuucuuccaggaggugccccacgugaucgaggaggugaugaacaucgugcugaucgcccugagcauccuggccgugcugaagggccuguacaacuucgccaccugcggccuggugggccugcugaccuuccugcugcugugcggcagaagcugcaccaccggccuguacaagggcguguacgagcugcagacccuggagcugaacauggagacccugaacaugugcaugccccugagcugcaccaagaacaacagccaccacuacaucauggugggcaacgagaccggccuggagcugacccugaccaacaccagcaucaucaaccacaaguucugcaaccugagcgacgcccacaagaagaaccuguacgaccacgcccugaugagcaucaucagcaccuuccaccugagcauccccaacuucaaccaguacgaggccaugagcugcgacuucaacggcggcaagaucagcgugcaguacaaccugagccacagcuacgccggcgacgccgccgaccacugcggcaccguggccaacggcgugcugcagaccuucaugagaauggccuggggcggcagcuacaucgcccuggacagcggcagaggcagaugggacugcaucaugaccagcuaccaguaccugaucauccagaacaccaccugggaggaccacugccaguucagcagacccagccccaucggcuaccugggccugcugagccagagaaccagagacaucuacaucagcagaagacugcugggcaccuucaccuggacccugagcgacagcgagggcaaggacacccccggcggcuacugccugaccagauggaugcugaucgaggccgagcugaagugcuucggcaacaccgccguggccaagugcaacgagaagcacgacgaggaguucugcgacaugcugagacuguucgacuucugcaagcaggccauccagagacugaaggccgaggcccagaugagcauccagcugaucaacaaggccgugaacgcccugaucaacgaccagcuggugaugaagaaccaccugagagacaucaugggcauccccuacugcaacuacagcagauacugguaccugaaccacaccaccaccggcagaaccagccugcccaagugcuggcuggugagcaacggcagcuaccugaacgagacccacuucagcgacgacaucgagcagcaggccgacaacaugaucaccgagaugcugcagaaggaguacauggagagacagggcaagaccccccugggccugguggaccuguucguguucagcaccagcuucuaccugaucagcaucuuccugcaccuggugaagauccccacccacagacacaucgugggcaagagcugccccaagccccacagacugaaccacaugggcaucugcagcugcggccuguacaagcagcccggcgugcccgugaaguggaagagaugaggacuagucccuguucccagagcccacuuuuuuuucuuuuuuugaaauaaaauagccugucuuucagaucucaaaggcucuuuucagagccaccaaaaaaaaaaaaaaaaaaaaaaaaaaaaaaaaaaaaaaaaaaaaaaaaaaaaaaaaaaaaaaaaaaaaaaaaaaaaaaaaaaaaaaaaaaaaaaaaaaaaa

SEQ ID NO: 36895 - RNA, 1748 nt, Artificial Sequence
  mRNA product Design a-1 (hSL-A100) comprising derived and/or modified sequence from LASV(G733-SLE-2010;Clade IV)__AIT17154__GPCmut10 (opt4)
aggagagucccgcagucggcguccagcggcucugcuuguucgugugugugucguugcaggccuuauucaagcuuaccaugggccagaucgugaccuucuuccaggaggugccccacgugaucgaggaggugaugaacaucgugcugaucgcccugagcauccuggccgugcugaagggccuguacaacuucgccaccugcggcaucgugggccuggugagcuuccugcugcugugcggcagaagcugcaccaccagccuguacaagggcguguacgagcugcagacccuggagcugaacauggagacccugaacaugugcaugccccugagcugcaccaagaacaacagccaccacuacaucauggugggcaacgagaccggccuggagcugacccugaccaacaccagcaucaucaaccacaaguucugcaaccugagcgacgcccacaagaagaaccuguacgaccacgcccugaugagcaucaucagcaccuuccaccugagcauccccaacuucaaccaguacgaggccaugagcugcgacuucaacggcggcaagaucagcgugcaguacaaccugagccacagcuacgccggcgacgccgccaaccacugcggcaccaucgccaacggcgugcugcagaccuucaugagaauggccuggggcggcagcuacaucgcccuggacagcggcagagacagaugggacugcaucaugaccagcuaccaguaccugaucauccagaacaccaccugggaggaccacugccaguucagcagacccagccccaucggcuaccugggccugcugagccagagaaccagagacaucuacaucagcagaagacugcugggcaccuucaccuggacccugagcgacagcgagggcaaggacacccccggcggcuacugccugaccagauggaugcugaucgaggccgagcugaagugcuucggcaacaccgccguggccaagugcaacgagaagcacgacgaggaguucugcgacaugcugagacuguucgacuucugcaagcaggccauccagagacugaaggccgaggcccagaugagcauccagcugaucaacaaggccgugaacgcccugaucaacgaccagcugaucaugaagaaccaccugagagacaucaugggcauccccuacugcaacuacagcaaguacugguaccugaaccacaccaccaccggcaagaccagccugcccaagugcuggcuggugagcaacggcagcuaccugaacgagacccacuucagcgacgacaucgagcagcaggccgacaacaugaucaccgagaugcugcagaaggaguacauggagagacagggcaagaccccccugggccugguggaccuguucguguucagcaccagcuucuaccugaucagcaucuuccugcaccuggugaagauccccacccacagacacguggugggcaagagcugccccaagccccacagacugaaccacaugggcaucugcagcugcggccuguacggccagcccggcgugcccgugaaguggaagagaugaggacuagucccuguucccagagcccacuuuuuuuucuuuuuuugaaauaaaauagccugucuuucagaucucaaaggcucuuuucagagccaccaaaaaaaaaaaaaaaaaaaaaaaaaaaaaaaaaaaaaaaaaaaaaaaaaaaaaaaaaaaaaaaaaaaaaaaaaaaaaaaaaaaaaaaaaaaaaaaaaaaaa

SEQ ID NO: 36896 - RNA, 1748 nt, Artificial Sequence
  mRNA product Design a-1 (hSL-A100) comprising derived and/or modified sequence from MOPV/LASV reassortant(IGS-1;Clade IV)__AFY05576__GPCmut10 (opt4)
aggagagucccgcagucggcguccagcggcucugcuuguucgugugugugucguugcaggccuuauucaagcuuaccaugggccagaucgugaccuucuuccaggaggugccccacgugaucgaggaggugaugaacaucgugcugaucgcccugagcgugcuggccgugcugaagggccuguacaacuucgccaccugcggccuggugggccuggugaccuuccugcugcugugcggcagaagcugcaccaccagccuguacaagggcguguacgagcugcagacccuggagcugaacauggagacccugaacaugugcaugccccugagcugcaccaagaacaacagccaccacuacaucauggugggcaacgagaccggccuggagcugacccugaccaacaccagcaucaucaaccacaaguucugcaaccugagcgacgcccacaagaagaaccuguacgaccacgcccugaugagcaucaucagcaccuuccaccugagcauccccaacuucaaccaguacgaggccaugagcugcgacuucaacggcggcaagaucagcgugcaguacaaccugagccacagcuacgccggcgacgccgccaaccacugcggcaccguggccaacggcgugcugcagaccuucaugagaauggccuggggcggcagcuacaucgcccuggacagcggcagaggcaacugggacugcaucaugaccagcuaccaguaccugaucauccagaacaccaccugggaggaccacugccaguucagcagacccagccccaucggcuaccugggccugcugagccagagaaccagagacaucuacaucagcagaagacugcugggcaccuucaccuggacccugagcgacagcgagggcgaggacacccccggcggcuacugccugaccagauggaugcugaucgaggccgagcugaagugcuucggcaacaccgccguggccaagugcaacgagaagcacgacgaggaguucugcgacaugcugagacuguucgacuucugcaagcaggccauccagagacugaaggccgaggcccagaugagcauccagcugaucaacaaggccgugaacgcccugaucaacgaccagcugaucaugaagaaccaccugagagacaucaugggcauccccuacugcaacuacagcaaguacugguaccugaaccacaccaccaccggcagaaccagccugcccaagugcuggcuggugagcaacggcagcuaccugaacgagacccacuucagcgacgacaucgagcagcaggccgacaacaugaucaccgagaugcugcagaaggaguacauggagagacagggcaagaccccccugggccugguggaccuguucguguucagcaccagcuucuaccugaucagcaucuuccugcaccuggugaagauccccacccacagacacaucgugggcaagagcugccccaagccccacagacugaaccacaugggcaucugcagcugcggccuguacaagcagcccggcgugcccgugaaguggaagagaugaggacuagucccuguucccagagcccacuuuuuuuucuuuuuuugaaauaaaauagccugucuuucagaucucaaaggcucuuuucagagccaccaaaaaaaaaaaaaaaaaaaaaaaaaaaaaaaaaaaaaaaaaaaaaaaaaaaaaaaaaaaaaaaaaaaaaaaaaaaaaaaaaaaaaaaaaaaaaaaaaaaaa

SEQ ID NO: 36897 - RNA, 1748 nt, Artificial Sequence
  mRNA product Design a-1 (hSL-A100) comprising derived and/or modified sequence from LASV(LM765-SLE-2012;Clade IV)__AIT17814__GPCmut10 (opt4)
aggagagucccgcagucggcguccagcggcucugcuuguucgugugugugucguugcaggccuuauucaagcuuaccaugggccagaucgugaccuucuuccaggaggugccccacgugaucgaggaggugaugaacaucgugcugaucgcccugagcauccuggccgugcugaagggccuguacaacuucgccaccugcggccuggugggccuggugaccuuccugcugcugugcggcagaagcugcaccaccagccuguacaagggcguguacgagcugcagacccuggagcugaacauggagacccugaacaugugcaugccccugagcugcaccaagaacaacagccaccacuacaucauggugggcaacgagaccggccuggagcugacccugaccaacaccagcaucaucgaccacaaguucugcaaccugagcgacgcccacagaaagaaccuguacgaccacgcccugaugagcaucaucagcaccuuccaccugagcauccccaacuucaaccaguacgaggccaugagcugcgacuucaacggcggcaagaucagcgugcaguacaaccugagccacagcuacgccaaggacgccgccgaccacugcggcaccguggccaacggcgugcugcagaccuucaugagaauggccuggggcggcagcuacaucgcccuggacagcggcagaggcagaugggacugcaucaugaccagcuaccaguaccugaucauccagaacaccaccugggaggaccacugccaguucagcagacccagccccaucggcuaccugggccugcugagccagagaaccagagacaucuacaucagcagaagacugcugggcaccuucaccuggacccugagcgacagcgagggcaaggacacccccggcggcuacugccugaccagauggaugcugaucgaggccgagcugaagugcuucggcaacaccgccguggccaagugcaacgagaagcacgacgaggaguucugcgacaugcugagacuguucgacuucugcaagcaggccauccagagacugaaggccgaggcccagaugagcauccagcugaucaacaaggccgugaacgcccugaucaacgaccagcugaucaugaagaaccaccugagagacaucaugggcauccccuacugcaacuacagcaaguacugguaccugaaccacaccaccaccggcaagaccagccugcccaagugcuggcuggugagcaacggcagcuaccugaacgagacccacuucagcgacgacaucgagcagcaggccgacaacaugaucaccgagaugcugcagaaggaguacauggagagacagggcaagaccccccugggccugguggaccuguucguguucagcaccagcuucuaccugaucagcaucuuccugcaccuggugaagauccccacccacagacacaucgugggcaagcccugccccaagccccacagacugaaccacaugggcaucugcagcugcggccuguacaagcagcccggcgugcccgugaaguggaagagaugaggacuagucccuguucccagagcccacuuuuuuuucuuuuuuugaaauaaaauagccugucuuucagaucucaaaggcucuuuucagagccaccaaaaaaaaaaaaaaaaaaaaaaaaaaaaaaaaaaaaaaaaaaaaaaaaaaaaaaaaaaaaaaaaaaaaaaaaaaaaaaaaaaaaaaaaaaaaaaaaaaaaa

SEQ ID NO: 36898 - RNA, 1748 nt, Artificial Sequence
  mRNA product Design a-1 (hSL-A100) comprising derived and/or modified sequence from LASV(LM776-SLE-2012;Clade IV)__AIT17824__GPCmut10 (opt4)
aggagagucccgcagucggcguccagcggcucugcuuguucgugugugugucguugcaggccuuauucaagcuuaccaugggccagaucgugaccuucuuccaggaggugccccacgugaucgaggaggugaugaacaucgugcugaucgcccugagcauccuggccgugcugaagggccuguacaacuucgccaccugcggccuggugggccuggugaccuuccugcugcugugcggcagaagcugcaccaccagcguguacaagggcguguacgagcugcagacccuggagcugaacauggagacccugaacaugugcaugccccugagcugcaccaagaacaacagccaccacuacaucauggugggcaacgagaccggccuggagcugacccugaccaacaccagcaucaucaaccacaaguucugcaaccugagcgacgcccacaagaagaaccuguacgaccacgcccugaugagcaucaucagcaccuuccaccugagcauccccaacuucaaccaguacgaggccaugagcugcgacuucaacggcggcaagaucagcgugcaguacaaccugagccacagcuacgccggcgacgccgccaaccacugcggcaccguggccaacggcgugcugcagaccuucaugagaauggccuggggcggcagcuacaucgcccuggacagcggccacggcaagugggacugcaucaugaccagcuaccaguaccugaucauccagaacaccaccugggaggaccacugccaguucagcagacccagccccaucggcuaccugggccugcugagccagagaaccagagacaucuacaucagcagaagacugcugggcaccuucaccuggacccugagcgacagcgagggcaaggacacccccggcggcuacugccugaccagauggaugcugaucgaggccgagcugaagugcuucggcaacaccgccguggccaagugcaacgagaagcacgacgaggaguucugcgacaugcugagacuguucgacuucugcaagcaggccauccagagacugaaggccgaggcccagaugagcauccagcugaucaacaaggccgugaacgcccugaucaacgaccagcugaucaugaagaaccaccugagagacaucaugggcauccccuacugcaacuacagcaaguacugguaccugaaccacaccaccaccggcaagaccagccugcccaagugcuggcuggugagcaacggcagcuaccugaacgagacccacuucagcgacgacaucgagcagcaggccgacaacaugaucaccgagaugcugcagaaggaguacauggagagacagggcaagaccccccugggccugguggaccuguucguguucagcaccagcuucuaccugaucagcaucuuccugcaccuggugaagauccccacccacagacacaucgugggcaagagcugccccaagccccacagacugaaccacaugggcaucugcagcugcggccuguacaagcagcccggcgugcccgugagauggaagagaugaggacuagucccuguucccagagcccacuuuuuuuucuuuuuuugaaauaaaauagccugucuuucagaucucaaaggcucuuuucagagccaccaaaaaaaaaaaaaaaaaaaaaaaaaaaaaaaaaaaaaaaaaaaaaaaaaaaaaaaaaaaaaaaaaaaaaaaaaaaaaaaaaaaaaaaaaaaaaaaaaaaaa

SEQ ID NO: 36899 - RNA, 1748 nt, Artificial Sequence
  mRNA product Design a-1 (hSL-A100) comprising derived and/or modified sequence from LASV(Mad39;Clade IV)__ANH09722__GPCmut10 (opt4)
aggagagucccgcagucggcguccagcggcucugcuuguucgugugugugucguugcaggccuuauucaagcuuaccaugggccagaucgugaccuucuuccaggaggugccccacgugaucgaggaggugaugaacaucgugcugaucgcccugagcauccuggccgugcugaagggccuguacaacguggccaccugcggccugaucggccuggugaccuuccugcugcugugcggcagaagcugcaccaccacccuguacaagggcguguacgagcugcaggcccuggagcugaacauggagacccugaacaugugcaugccccugagcugcaccaagaacaacagccaccacuacaucagagugggcaacgagaccggccuggagcugacccugaccaacaccagccugaucaaccacaaguucugcaaccugagcgacgcccacaagaagaaccuguacgaccacgcccugaugagcaucaucagcaccuuccaccugagcauccccaacuucaaccaguacgaggccaugagcugcgacuucaacgacggcaagaucagcgugcaguacaaccugagccacaccuacgccggcgacaccgccaaccacugcggcaccguggccaacggcgugcugcagaccuucaugagaauggccuggggcggcagcuacaucgcccuggacagcggcagaggcggcugggacugcaucaugaccagcuaccaguaccugaucauccagaacaccaccugggaggaccacugccaguucagcagacccagccccaucggcuaccugggccugcugagccagagaaccagagacaucuacaucagcagaagacugcugggcaccuucaccuggacccugagcgacagcgagggcaaggacacccccggcggcuacugccugaccagauggaugcugaucgaggccgagcugaagugcuucggcaacaccgccguggccaagugcaacgagaagcacgacgaggaguucugcgacaugcugagacuguucgacuucugcaagcaggccauccagagacugaaggccgaggcccagaugagcauccagcugaucaacaaggccgugaacgcccugaucaacgaccagcugaucaugaagaaccaccugagagacaucaugggcauccccuacugcaacuacagcaaguacugguaccugaaccacaccgugaccggcaagaccagccugcccaagugcuggcuggugagcaacggcagcuaccugaacgagacccacuucagcgacgacaucgagcagcaggccgacaacaugaucaccgagaugcugcagaaggaguacauggagagacagggcaagaccccccugggccugguggaccuguucguguucagcaccagcuucuaccugaucagcaucuuccugcaccuggugaagauccccacccacagacacguggugggcaagcccugccccaagccccacagacugaaccacaugggcaucugcagcugcggcuucuacaagcagcccggcgugcccgugagauggaagagaugaggacuagucccuguucccagagcccacuuuuuuuucuuuuuuugaaauaaaauagccugucuuucagaucucaaaggcucuuuucagagccaccaaaaaaaaaaaaaaaaaaaaaaaaaaaaaaaaaaaaaaaaaaaaaaaaaaaaaaaaaaaaaaaaaaaaaaaaaaaaaaaaaaaaaaaaaaaaaaaaaaaaa

SEQ ID NO: 36900 - RNA, 1748 nt, Artificial Sequence
  mRNA product Design a-1 (hSL-A100) comprising derived and/or modified sequence from LASV(Z0947-SLE-2011;Clade IV)__AIT17840__GPCmut10 (opt4)
aggagagucccgcagucggcguccagcggcucugcuuguucgugugugugucguugcaggccuuauucaagcuuaccaugggccagaucgugaccuucuuccaggaggugccccacgugaucgaggaggugaugaacaucgugcugaucgcccugagcauccuggccgugcugaagggccuguacaacuucgccaccugcggccuggugggccuggugaccuuccugcugcugugcggcagaagcugcaccaucagccuguacaagggcguguacgagcugcagacccuggagcugaacauggagacccugaacaugugcaugccccugagcugcaccaagaacaacagccaccacuacaucauggugggcaacgagaccggccuggagcugacccugaccaacaccagcaucaucaaccacaaguucugcaaccugagcgacgcccacaagaagaaccuguacgaccacgcccugaugagcaucaucagcaccuuccaccugagcauccccaacuucaaccaguacgaggccaugagcugcgacuucaacggcggcaagaucagcgugcaguacaaccugagccacagcuacgccggcgacgccgccaaccacugcggcaccguggccaacggcgugcugcagaccuucaugagaauggccuggggcggcagcuacaucgcccuggacagcggcagagacagaugggacugcaucaugaccagcuaccaguaccugaucauccagaacaccaccugggaggaccacugccaguucagcagacccagccccaucggcuaccugggccugcugagccagagaaccagagacaucuacaucagcagaagacugcugggcaccuucaccuggacccugagcgacagcgagggcaaggacacccccggcggcuacugccugaccagauggaugcugaucgaggccgagcugaagugcuucggcaacaccgccguggccaagugcaacgagaagcacgacgaggaguucugcgacaugcugagacuguucgacuucugcaagcaggccauccagagacugaaggccgaggcccagaugagcauccagcugaucaacaaggccgugaacgcccugaucaacgaccagcugaucaugaagaaccaccugagagacaucaugggcauccccuacugcaacuacagcaaguacugguaccugaaccacaccaccaccggcaagaccagccugcccaagugcuggcuggugagcaacggcagcuaccugaacgagacccacuucagcgacgacaucgagcagcaggccgacaacaugaucaccgagaugcugcagaaggaguacauggagagacagggcaagaccccccugggccugguggaccuguucguguucagcaccagcuucuaccugaucagcaucuuccugcaccuggugaagauccccacccacagacacaucgugggcaagcccugccccaagccccacagacugaaccacaugggcaucugcagcugcggccuguacaagcagcccggcgugcccgugaaguggaagagaugaggacuagucccuguucccagagcccacuuuuuuuucuuuuuuugaaauaaaauagccugucuuucagaucucaaaggcucuuuucagagccaccaaaaaaaaaaaaaaaaaaaaaaaaaaaaaaaaaaaaaaaaaaaaaaaaaaaaaaaaaaaaaaaaaaaaaaaaaaaaaaaaaaaaaaaaaaaaaaaaaaaaa

SEQ ID NO: 36901 - RNA, 1748 nt, Artificial Sequence
  mRNA product Design a-1 (hSL-A100) comprising derived and/or modified sequence from LASV(Josiah;Clade IV)__NP_694870__GPCmut10 (opt5)
aggagagucccgcagucggcguccagcggcucugcuuguucgugugugugucguugcaggccuuauucaagcuuaccaugggccagaucgugaccuucuuucaagaggucccccacguuauugaagaggugaugaacaucgugcugauugcccucagcguccuggcugugcuuaaggggcuguacaauuucgccacaugcggacucguuggccuggugacguuucuucugcucugugggagauccugcaccacaucucuguauaaaggagucuacgaacugcagacccucgagcugaacauggaaacacuuaauauguguaugccucugagcugcaccaagaacaauucccaucacuauaucauggugggcaacgagacagggcucgagcugacccuuacgaauaccucuauuaucaaccauaaauucuguaaucugagcgacgcgcacaagaaaaaccucuacgaucaugcucugauguccaucauuucuacauuucaccugagcaucccgaauuucaaccaguaugaagccauguccugcgacuuuaauggaggcaagauuagcguucaguacaaccucucucacuccuaugccggcgaugcugccaaucauugugggaccguggcuaacggaguccugcaaacauucaugcggauggccuggggcgggagcuacaucgcgcuugacucuggacgcggcaacugggauugcauuaugaccuccuaccaguaucugaucauucagaauacgacaugggaggaccacugucaguuuagcagacccucuccuaucggguaccucggacugcuuucccaacggacccgcgauaucuauauuagcagacggcugcucggcacauucaccuggacccuguccgacucugaaggcaaggauacacccgggggauacugccugacgcgcuggaugcucaucgaggccgagcugaaauguuuuggcaacaccgcuguggccaagugcaaugaaaaacaugacgaggaguucugcgauaugcuuagacuguuugacuucuguaagcaggcuauucagcggcucaaagccgaagcgcagaugagcauccaacugauuaacaaggccgugaaugcucuuaucaacgaucagcugaucaugaagaaucaccuccgcgacauuauggggaucccuuauugcaacuacuccaaauauugguaccugaaucacacaaccacaggaagaaccagccugcccaaguguuggcucgucucuaacggcuccuaccugaaugaaacgcauuucagcgacgauauugagcagcaagccgacaacaugaucacagagaugcuucagaaagaauauauggagcggcaggggaagaccccucugggacucguugaucuguuuguguucucuaccagcuuuuaccugauuuccaucuuccuucaccucgugaaaaucccgacacaucgccacauugucggcaagucuugccccaaaccucauagacugaaucacaugggcaucuguagcugcgggcuguauaagcagcccggagugccuguuaaguggaaacggugaggacuagucccuguucccagagcccacuuuuuuuucuuuuuuugaaauaaaauagccugucuuucagaucucaaaggcucuuuucagagccaccaaaaaaaaaaaaaaaaaaaaaaaaaaaaaaaaaaaaaaaaaaaaaaaaaaaaaaaaaaaaaaaaaaaaaaaaaaaaaaaaaaaaaaaaaaaaaaaaaaaaa

SEQ ID NO: 36902 - RNA, 1745 nt, Artificial Sequence
  mRNA product Design a-1 (hSL-A100) comprising derived and/or modified sequence from LASV(LP;Clade I)__AAF86701__GPCmut10 (opt5)
aggagagucccgcagucggcguccagcggcucugcuuguucgugugugugucguugcaggccuuauucaagcuuaccaugggccagaucauuaccuucuuucaagaggugccccacgucaucgaagagguuaugaacauugugcugaucgcccucagccugcuugcuauucugaaggggcucuacaauaucgccacaugcggaaucauuggccugguggcguuccuuuuucugugugggaaauccugcucucucacgcugaagggaggcuaugaacugcagacccucgagcugaacauggaaacacuuaauauguguaugccucugagcugcaccaaaaacuccucucaucacuacaucagagucgggaaugagacaggacucgagcugacccuuacaaacaccagcauuaucaaucauaaguucuguaaccuguccgacgcucacaaaaagaaucucuaugaucaugcccugaugucuauuaucagcacguuucaccuguccauuccgaacuucaaucaguacgaagccaugagcugcgacuuuaacggcggcaagaucucugugcaguauaaucucucccacagcuacgcuggggaugccgcugagcauuguggaaccguugccaacggcgugcugcaaacauucaugcggauggcguggggagggcgcuauaucgcccuugacucuggcaaagggaauugggauugcauuaugaccuccuaccaguaccugaucauucagaacacaaccugggaagaccacugucaguuuagcagacccucuccuaucggauaucucggccugcuuucccaacggacgcgcgauauuuacaucagcagacggcugcucggcacauucaccuggacacuguccgacucugaggggaacgagacccccggaggcuauugccugacccgcuggaugcucaucgaagcugagcugaaguguuuugggaauacagccgucgcuaaaugcaacgaaaagcaugaugaggaguucugcgacaugcuuagacuguuugauuucuguaaacaggccauucggcgccucaaggcggaagcccagaugagcauccagcugauuaauaaggcugugaacgcccuuaucaaugaccaacugauuaugaaaaaccaccucagagauaucaugggaaucccuuacugcaauuauuccaaguacugguaucugaaccacacgagcucuggccggaccucccugcccaaauguuggcucauuagcaaugggucuuaccugaacgagacacaguucagcgacgacaucgaacagcaagcugauaauaugauuaccgagaugcuucagaaggaauacaucgagcgccagggaaaaacaccucugggccucguugacauuuuuaucuucuccaccucuuuuuaucugauuagcaucuuccugcaucuuaucaagauuccgacgcacagacauaucgugggcaaacccugcccuaagccccaccggcucaaccauaugggggucuguuccugcggacuguacaagcacccuggcgugcccacaaaauggaagcgcugaggacuagucccuguucccagagcccacuuuuuuuucuuuuuuugaaauaaaauagccugucuuucagaucucaaaggcucuuuucagagccaccaaaaaaaaaaaaaaaaaaaaaaaaaaaaaaaaaaaaaaaaaaaaaaaaaaaaaaaaaaaaaaaaaaaaaaaaaaaaaaaaaaaaaaaaaaaaaaaaaaaaa

SEQ ID NO: 36903 - RNA, 1745 nt, Artificial Sequence
  mRNA product Design a-1 (hSL-A100) comprising derived and/or modified sequence from LASV(803213;Clade II)__AAF86703__GPCmut10 (opt5)
aggagagucccgcagucggcguccagcggcucugcuuguucgugugugugucguugcaggccuuauucaagcuuaccaugggccagaucauuaccuucuuucaagaggugccccacgucaucgaagagguuaugaacauugugcugaucgcccucagccugcuugcuauucugaaggggaucuacaauguggccacaugcggacucuucggccugaucuccuuucuucugcucugugggagaucuugcagcgucacguauaaaggaguguacgaacugcagacccuggagcucaacauggcgaaucugaacauguguaugccucuuuccugcacaaagaauaacucucaucacuauauuaugguuggcaaugaaaccgggcuggagcucacacugaccaacacaagcaucauuaaucauaaauucuguaaccuuuccgacgcucacaagaaaaaucuguacgaucaugcccucaugucuaucauuagcaccuuucaccuguccaucccgaacuucaaucaguaugaggccaugagcugcgacuuuaacggaggcaagauuucugugcaguacaaucugucccacagcuucgcugucgaugccgcuaaccauuguggcacgaucgccaacggggugcuccaaaccuuuaugcggauggcguggggaggcucuuauaucgcccuggacuccgggaagggaaauugggauugcauuaugacaagcuaccaguaccuuaucauucagaacaccacaugggaagaccacugucaguucucucgccccuccccuaucggcuaucuggggcuccugagccaaagaacccgggauauuuacaucucccgcagacuucugggaacguuuacauggacccucucugacagcgagggcaaugaagcucccggcggguauugccugacacgguggaugcugaucgaggccgagcucaaauguuucggaaacaccgcuguugccaagugcaaugaaaaacaugaugaggaauuuugcgacaugcugcgccuuuucgauuucuguaagcaggcgauuaaaagacugaagaccgaggcccagauguccauccagcucauuaacaaggcugugaaugcccugaucaacgaccaacuuauuaugaaaaaucaucugcgggauaucaugggcaucccuuacugcaacuauagccgcuacugguaucucaaucacacagucacggggaagaccucucugcccagauguuggcugguguccaacggaagcuaccucaaugaaacacacuuuucugacgacauugagcagcaggcugauaacaugaucaccgagaugcugcaaaaagaauacauggaccggcagggcaagacaccucuugggcugguggaucucuucgucuuuagcaccuccuucuaucugauuucuaucuuucugcaccuuguuaaaauuccgacgcaucgccacaucgugggaaagcccugcccuaaaccccauagacucaaucacaugggcauuuguagcugcggccuguacaagcacccuggggugcccgucaaguggaaacggugaggacuagucccuguucccagagcccacuuuuuuuucuuuuuuugaaauaaaauagccugucuuucagaucucaaaggcucuuuucagagccaccaaaaaaaaaaaaaaaaaaaaaaaaaaaaaaaaaaaaaaaaaaaaaaaaaaaaaaaaaaaaaaaaaaaaaaaaaaaaaaaaaaaaaaaaaaaaaaaaaaaaa

SEQ ID NO: 36904 - RNA, 1745 nt, Artificial Sequence
  mRNA product Design a-1 (hSL-A100) comprising derived and/or modified sequence from LASV(GA391;Clade III)__CAA36645__GPCmut10 (opt5)
aggagagucccgcagucggcguccagcggcucugcuuguucgugugugugucguugcaggccuuauucaagcuuaccaugggccagaucgugaccuucuuucaagaggucccccacguuauugaagaggugaugaacaucgugcugauugcccucagcauccuggcuauucuuaaggggcuguacaaugucgccacaugcggacucaucggccuggugacguuccuucugcucuccgggagaucuuguagccugaucuauaaaggaaccuacgaacugcagacacucgagcugaacauggaaacccuuaauaugugcaugccucuguccuguacaaagaacaauucucaucacuauauucggguuggcaacgagaccgggcucgagcugacacuuaccaauacgagcauccugaaccauaaauuuugcaaucucuccgacgcgcacaagcgcaaccuguacgaucauucucugaugagcauuaucuccaccuuccaccucagcauuccgaauuuuaaccaguaugaagcuaugucuugugacuucaauggaggcaaaaucacagugcaguacaaccugucccacagcuuugccgucgaugccgcuggccauugcgggacccuugccaauggagugcugcaaacauucaugagaauggcuuggggcgggucuuauauugcccucgacuccggacggggcaacugggauuguaucaugaccagcuaccaguaccugaucauucagaacacgacaugggacgaucacugccaguuuucucgccccuccccuaucggguaucuuggacugcucagccaaagaacccgggacauuuacaucucccgcagacugcugggcacauucaccuggacccucucugauagcgagggcaaugaaacacccgggggauauugucugacgcgguggaugcuuauugaggcggagcugaagugcuuuggcaacaccgccguugcuaaguguaaugaaaaacaugacgaggaguucugcgauaugcuccgccuguuugacuucugcaagcaggccaucagacggcuuaaaacagaagcucagauguccauccagcugauuaacaaggccgugaaugcgcucaucaacgaucaacugauuaugaaaaaucaucugcgcgacaucauggggauuccuuacuguaacuauagcagauacugguaucucaaucacaccucuacaggaaagaccucccugccccggugcuggcuuaucagcaacggcucuuaccugaaugaaacgaaguucagcgacgauaucgagcagcaggccgacaacaugauuacagagaugcuccaaaaagaauacaucgaucgccaggggaagaccccucugggacuggucgaccuuuuuguguucuccaccucuuuuuaucucauuagcaucuuccugcaccuggugaaaauuccgacacacagacauaucgucggcaagcccuguccuaaaccccaccggcucaaucauaugggcauuugcuccugugggcuguacaagcagccuggaguucccgugagauggaaacgcugaggacuagucccuguucccagagcccacuuuuuuuucuuuuuuugaaauaaaauagccugucuuucagaucucaaaggcucuuuucagagccaccaaaaaaaaaaaaaaaaaaaaaaaaaaaaaaaaaaaaaaaaaaaaaaaaaaaaaaaaaaaaaaaaaaaaaaaaaaaaaaaaaaaaaaaaaaaaaaaaaaaaa

SEQ ID NO: 36905 - RNA, 1748 nt, Artificial Sequence
  mRNA product Design a-1 (hSL-A100) comprising derived and/or modified sequence from LASV(AV;Clade V)__CCA30314__GPCmut10 (opt5)
aggagagucccgcagucggcguccagcggcucugcuuguucgugugugugucguugcaggccuuauucaagcuuaccaugggccagaucgugaccuucuuucaagaggucccccacguuauugaagaggugaugaacaucgugcugauugcccucagcauccuggcuguccuuaaggggcuguacaauauugccacaugcggacucaucggccugaucacguuccuucugcucugugggagauccugcucuagcaaccuguauaaaggaguguacgaacugcagucccucgaccugaauauggagacccuuaacauguguaugccucugucuugcacaaagaauaacagccaucacuauauucggguuggcaaugauaccgggcucgaacugacacuuaccaacacauccauccugaaucauaaauuuuguaaccucucugacgcgcacaagaaagaucuguacgaccaugcucugaugagcauuaucuccaccuuccaccucagcauuccgaauuuuaaccaguaugaggccaugucuugcgauuucaauggaggcaagaucuccgugcaguacaaccugagccacucuuaugccauugacgcugccaaucauuguggcacggucgcuaacgggauccuucaaaccuuuaugcgcauggccuggggaggcuccuacaucgcgcuggauagcgggagaggaaacugggacugcauuaugacaucuuaccaguaucucaucauucagaauaccacaugggagaaccacugucaguucucccggcccagcccuaucggcuaccuggggcuucugucccaacgcaccagagauauuuauaucucucggcgccuccugggaacguuuacauggacccugagcgacuccgaaggcaaugccacacccggcggguacugccucaccagauggaugcugaucgaggcugaacuuaaguguuucggaaacaccgccguggcuaaaugcaaugagaagcaugaugaggaauuuugcgacaugcugcgccucuucgauuuuuguaaacaggccauuagccggcugaagucugaggcgcagauguccauccagcuuauuaacaaagccguuaaugcucugaucaacgaccaacucauuaugaagaaucaccugagagacaucaugggcaucccuuauugcaacuacagcaaguauugguaccugaaucacacaauuacggggaaaaccucucuccccaaguguuggcuggugagcaacggauccuaccuuaaugaaacacauuucucugaugacaucgagcagcaggccgauaacaugauuaccgaaaugcugcaaaaagaguauauggagcggcagggcaagacaccucucgggcuggucgaccuguucguguuuagcaccuccuucuaccuuaucagcauuuuucuccgccuggugaaaaucccgacgcacagacauauugucggaaagcccugcccuaaaccccaccggcugaaucauaugggcaucuguucuugcggccucuauaagcagccugggguucccgugcgcuggaagagaugaggacuagucccuguucccagagcccacuuuuuuuucuuuuuuugaaauaaaauagccugucuuucagaucucaaaggcucuuuucagagccaccaaaaaaaaaaaaaaaaaaaaaaaaaaaaaaaaaaaaaaaaaaaaaaaaaaaaaaaaaaaaaaaaaaaaaaaaaaaaaaaaaaaaaaaaaaaaaaaaaaaaa

SEQ ID NO: 36906 - RNA, 1745 nt, Artificial Sequence
  mRNA product Design a-1 (hSL-A100) comprising derived and/or modified sequence from LASV(Togo/2016/7082;Clade VI)__AMR44577__GPCmut10 (opt5)
aggagagucccgcagucggcguccagcggcucugcuuguucgugugugugucguugcaggccuuauucaagcuuaccaugggccagaucauuaccuucuuucaagaggugccccacgucaucgaagagguuaugaacauugugcugaucgcccucagccugcuugcuauucugaaggggguguacaaugucgccacaugcggaaucaucggccucgugacguuccuguuucuuugugggagauccugcucucugauuuauaaaggaagcuacgaacuccagacccuggagcugaacauggaaacacucaauauguguaugccucuguccugcaccaagaacucuagccaucacuauauccggguuggcaaugagacagggcuugagcugacccucacaaacaccuccauuaucaaucauaaauucuguaaccugucugacgcgcacaagcgcaaucuuuacgaucaugcucugaugagcauucucuccacguuucaccugagcaucccgaacuucaaucaguaugaagccaugucuugcgacuuuaacggaggcaaaauuuccgugcaguacaaucugagccacgccuaugcugucgaugccgcugagcauuguggcaccguggccaacgggguucuccaaacauucaugagaauggcguggggaggcucuuacaucgcccuggacuccgggcggggaaauugggauugcaucaugaccagcuaccaguaucuuauuauccagaacacaaccugggaagaccacugucaguuuucucgccccuccccuauuggcuaccuggggcuccugagccaaagaacgcgggauaucuauauuucccgcagacuucugggaacauucaccuggacacucucugacagcgagggcaacgagacccccggcggguacugccugacccgguggaugcugaucgaagcugagcucaaguguuuuggaaauacagccguggcuaagugcaacgaaaaacaugaugaggaguucugcgacaugcugcgccuuuuugauuucuguaagcaggccauccagagacugaaauccgaagcgcagaugagcauucaacucaucaauaaggccgucaacgcucugauuaaugaccagcuuaucaugaaaaaccaucugcgggauaugaugggcauuccuuauugcaauuacucuaaguauugguaccucaaccacacguccagcgggcgcaccucucugcccaaguguuggcuggugagcaauggauccuaccucaacgagacacacuucucugacgacaucgaacagcaagccgauaauaugaucaccgagaugcugcagaaagaauauauugacagacagggcaagacaccucuugggcugguggaucucuuugucuucagcaccuccuuuuaccugaucagcauuuuccugcaccuuaucaaaauuccgacgcaucggcacaucguuggaaagcccugcccuaaaccccaucgccucaaccacaugggcauuuguucuugcggccuguauaagcagccuggggugcccacaagauggaaacggugaggacuagucccuguucccagagcccacuuuuuuuucuuuuuuugaaauaaaauagccugucuuucagaucucaaaggcucuuuucagagccaccaaaaaaaaaaaaaaaaaaaaaaaaaaaaaaaaaaaaaaaaaaaaaaaaaaaaaaaaaaaaaaaaaaaaaaaaaaaaaaaaaaaaaaaaaaaaaaaaaaaaa

SEQ ID NO: 36907 - RNA, 1745 nt, Artificial Sequence
  mRNA product Design a-1 (hSL-A100) comprising derived and/or modified sequence from LASV(KAK-428;Clade n.d. (VII))__ANH09740__GPCmut10 (opt5)
aggagagucccgcagucggcguccagcggcucugcuuguucgugugugugucguugcaggccuuauucaagcuuaccaugggccagaucgugaccuucuuucaagaggucccccacguuauugaagaggugaugaacaucgugcugauugcccucagccugcuugcuauccugaaggggcucuacaauuucgccacaugcggagucauuggccugaucacguuucuucugcucugugggagauccugcucugcgaccuauaaaggacaguacgaacugcagacacuggagcucaacauggaaagccugaauauguguaugccucuuuccugcaccaagaacaauucucaucacuauauccgggcuggcaacaauacagggcuggagcucacccugacaaacaccagcauuaucucccauaaauucuguaaucuuucugacgcccacaagaaaaaccuguacgaucauacgcucaugagcauuaucaccacauuucaccuguccauuccgaauuucaaccaguaugaggccaugagcugcgacuuuaauggaggcaagaucucuauucaauacaaccugucccacagcuaugcuggcgaugccgcucagcauugugggaccguggccaauggaguucuccagacauucaugcgcauggcguggggcgggucuuaccuggcccuugacuccggaagacggggcugggauugcaucaucagcucuuaccaguaucugauuauccaaaacaccacgugggacgaucacugucaguuuucccgccccagcccuauuggguaccucggauucgugucccagaagacaagagacaucuauauuucucggcgccugcuuggcaccuuuacauggacccugagcgauuccgaaggccaugacaugcccgggggauacugccucaccagauggaugcugaucgaggcugaucugaaauguuucggcaacacagccgucgcuaagugcaaugaaaaacacgacgaggaguuuugcgauauguggcgccucuucgacuucuguaagcaggccauccaacggcugaaagcggaagcccagaugaacauucagcuuaucaauaaggcugugaacgcccugauuaaugaccaacucaugaugaagaaccaccugagagauaucauggggauuccuuauugcaauuacagcaaauuuugguaucuuaacaauacgaccacaggacggaccucucugccccgcuguuggcucaucuccaacggcagcuaccugaaugagacacauuucucugacgauaucgaacagcaggcugacaacaugauuaccgagaugcugcagaaggaauacauggauagacaagggaaaacgccucucggacugguugaccuuuuuguguucagcacauccuuuuaucugaucaccauuuuccuccaccuggucaagaucccgacccaucggcacauugugggcaaacccugcccuaagccccaucgccugaaucacaugggcaucuguucuugcgggcuuuacaaacagccuggagugcccgucagauggaagcggugaggacuagucccuguucccagagcccacuuuuuuuucuuuuuuugaaauaaaauagccugucuuucagaucucaaaggcucuuuucagagccaccaaaaaaaaaaaaaaaaaaaaaaaaaaaaaaaaaaaaaaaaaaaaaaaaaaaaaaaaaaaaaaaaaaaaaaaaaaaaaaaaaaaaaaaaaaaaaaaaaaaaa

SEQ ID NO: 36908 - RNA, 1745 nt, Artificial Sequence; identical to SEQ ID NO: 36902
  mRNA product Design a-1 (hSL-A100) comprising derived and/or modified sequence from LASV(Pinneo-NIG-1969;Clade I)__AIT17836__GPCmut10 (opt5)

SEQ ID NO: 36909 - RNA, 1745 nt, Artificial Sequence
  mRNA product Design a-1 (hSL-A100) comprising derived and/or modified sequence from LASV(ISTH0009-NIG-2011;Clade II)__AIT17404__GPCmut10 (opt5)
aggagagucccgcagucggcguccagcggcucugcuuguucgugugugugucguugcaggccuuauucaagcuuaccaugggccagaucauuaccuucuuucaagaggugccccacgucaucgaagagguuaugaacauugugcugaucgcccucagccugcuugcuauucugaaggggaucuacaauguggccacaugcggacucuucggccuggucuccuuucuucugcucugugggagaucuugcagcacgaccuauaaaggaguguacgaacugcagacacuggagcucgacauggcgucccugaacauguguaugccucuuucuugcaccaagaauaacagccaucacuauaucaugguuggcaaugaaacagggcuggagcucacccugacaaacaccuccauuaucaaucauaaauucuguaaccuuucugaugcucacaagaaaaaucuguacgaccaugcccucaugagcauuaucuccacguuucaccugagcauuccgaacuucaaucaguaugaggccaugucuugcgauuuuaacggaggcaagaucuccgugcaguacaaucugagccacgcuuaugccgucgacgcugccaaccauuguggcaccauugcgaauggggugcuccaaacauucaugcggauggccuggggaggcucuuacaucgcucuggauuccgggaagggaagcugggacugcaucaugaccucuuaccaguaucuuauuauccagaacacaaccugggaagaucacugucaguuuucccgccccagcccuauuggcuaccuggggcuccugucccaaagaacgcgggacaucuauauuucucgcagacuucugggaacauucaccuggacacucagcgauuccgagggcaacgaaacccccggcggguacugccugacccgguggaugcugaucgaggccgagcucaaauguuuuggaaauacagcuguugccaagugcaacgaaaaacaugacgaggaguucugcgauaugcugcgccuuuuugacuucuguaagcaggcgaucagacggcugaaaacggaagcccagaugagcauucagcucaucaauaaggcugugaacgcccugauuaaugaucaacuuaucaugaagaaccaucugcgcgacauuaugggcaucccuuauugcaauuacucuaaauauugguaccucaaccacaccgucacagggaagaccucccugcccagauguuggcuggugagcaauggaucuuaccucaacgaaacacacuucagcgacgauaucgagcagcaggcugacaauaugauuaccgagcugcuucaaaaagaauauauggaucggcagggcaagacgccucuggggcucguggaccuguuugucuucuccacaucuuuuuaccugaucagcauuuuccuucaccucaucaaaauuccgacccaucgccacaucaccggaaagcccugcccuaaaccccauagacugaaccacaugggcauuuguuccugcggccuguauaagcacccugggguucccgugaaguggaaacggugaggacuagucccuguucccagagcccacuuuuuuuucuuuuuuugaaauaaaauagccugucuuucagaucucaaaggcucuuuucagagccaccaaaaaaaaaaaaaaaaaaaaaaaaaaaaaaaaaaaaaaaaaaaaaaaaaaaaaaaaaaaaaaaaaaaaaaaaaaaaaaaaaaaaaaaaaaaaaaaaaaaaa

SEQ ID NO: 36910 - RNA, 1745 nt, Artificial Sequence
  mRNA product Design a-1 (hSL-A100) comprising derived and/or modified sequence from LASV(ISTH2010-NIG-2012;Clade II)__AIT17482__GPCmut10 (opt5)
aggagagucccgcagucggcguccagcggcucugcuuguucgugugugugucguugcaggccuuauucaagcuuaccaugggccagaucauuaccuucuuucaagaggugccccacgucaucgaagagguuaugaacauugugcugaucgcccucagccugcuugcuauucugaaggggaucuacaauguggccacaugcggacucuucggccuggucuccuuucuucugcucugugggagaucuugcagcacgaccuauaaaggaguguacgaacugcagacacuggagcucgacauggcgucccugaacauguguaugccucuuucuugcaccaagaauaacagccaucacuauaucaugguuggcaaugaaacagggcuggagcucacccugacaaacaccuccauuaucaaucauaaauucuguaaccuuucugaugcucacaagaaaaaucuguacgaccaugcccucaugagcauuaucuccacguuucaccugagcauuccgaacuucaaucaguaugaggccaugucuugcgauuuuaacggaggcaagaucuccgugcaguacaaucugagccacgcuuaugccgucgacgcugccaaccauuguggcaccauugcgaauggggugcuccaaacauucaugcggauggccuggggaggcucuuacaucgcucuggauuccgggaagggaagcugggacugcaucaugaccucuuaccaguaucuuauuauccagaacauuacaugggaagaucacugucaguuuucccgccccagcccuaucggcuaccuggggcuccugucccaaagaacccgggacauuuauaucucucgcagacuucugggaacguucacauggacccucagcgauuccgagggcaacgaaacacccggcggguacugccugacccgguggaugcugaucgaggccgagcucaaauguuuuggaaauaccgcuguugccaagugcaacgaaaaacaugacgaggaguucugcgauaugcugcgccuuuuugacuucuguaagcaggcgauuagacggcugaaaacagaagcccagaugagcauccagcucauuaauaaggcugugaacgcccugaucaaugaucaacuuauuaugaagaaccaucugcgcgacaucaugggcaucccuuauugcaauuacucuaaauauugguaccucaaccacacggucaccgggaagacaucccugcccagauguuggcuggugagcaauggaucuuaccucaacgaaacccacuucagcgacgauauugagcagcaggcugacaauaugaucacagagcugcuucaaaaagaauauauugaucggcagggcaagaccccucuggggcucguggaccuguuugucuucuccacgucuuuuuaccugaucagcauuuuccuucaccucguuaaaaucccgacacaucgccacguggugggaaagcccugcccuaaaccccauagacugaaccacaugggcauuuguuccugcggccuguauaagcacccugggguccccgugaaguggaaacggugaggacuagucccuguucccagagcccacuuuuuuuucuuuuuuugaaauaaaauagccugucuuucagaucucaaaggcucuuuucagagccaccaaaaaaaaaaaaaaaaaaaaaaaaaaaaaaaaaaaaaaaaaaaaaaaaaaaaaaaaaaaaaaaaaaaaaaaaaaaaaaaaaaaaaaaaaaaaaaaaaaaaa

SEQ ID NO: 36911 - RNA, 1745 nt, Artificial Sequence
  mRNA product Design a-1 (hSL-A100) comprising derived and/or modified sequence from LASV(Lassa virus/H.sapiens-wt/NGA/2015/ISTH_0543;Clade II)__AVO03639__GPCmut10 (opt5)
aggagagucccgcagucggcguccagcggcucugcuuguucgugugugugucguugcaggccuuauucaagcuuaccaugggccagaucauuaccuucuuucaagaggugccccacgucaucgaagagguuaugaacauugugcugaucgcccucagccugcuugcuauucugaaggggaucuacaauguggccacaugcggacucuucggccuggucuccuuucuucugcucugugggagaucuugcagcacgaccuauaaaggaguguacgaacugcagacacuggagcucgacauggcgaaccugaauauguguaugccucuuuccugcaccaagaacaauucucaucacuauaucaugguuggcaacgaaacagggcuggagcucacccugacaaauaccagcauuaucaaccauaaauucuguaaucuuuccgaugcucacaagaaaaaccuguacgaccaugcccucaugucuauuaucagcacguuucaccuguccauuccgaauuucaaccaguaugaggccaugagcugcgauuuuaauggaggcaagaucucugugcaguacaaccugucccacaccuaugcugucgacgccgcuaaucauuguggcacaauugccaacggggugcuccaaaccuucaugcggauggcguggggaggcagcuacaucgcccuggauucugggaagggauccugggacugcaucaugacaagcuaccaguaucuuguuauucagaacaccacgugggaagaucacugucaguuuucucgccccuccccuaucggcuaccuggggcuccugagccaaagaacacgggacauuuauaucucccgcagacuucugggaaccuucacauggacccucucugauagcgagggcaaugaaacccccggcggguacugccugacacgguggaugcugauugaggcugagcucaaauguuuuggaaacacggccguggcuaagugcaaugaaaaacaugacgaggaguucugcgauaugcugcgccuuuuugacuucuguaagcaggccaucagacggcugaaaaccgaagcgcagauguccauccagcucauuaacaaggccgucaaugcucugaucaacgaucaacuuauuaugaagaaucaucugcgcgacaucaugggcauuccuuauugcaacuacagcaaauauugguaccucaaucacacagugaccgggaagacaucucugcccagauguuggcugguguccaacggaagcuaccucaaugaaacccacuucucugacgauaucgagcagcaggccgacaacaugaucacggagcugcuucaaaaagaauauauugaucggcagggcaagacaccucuggggcucgucgaccuguuuguuuucagcaccuccuuuuaccugaucucuauuuuccuucaccucgugaaaaucccgacccaucgccacauuacaggaaagcccugcccuaaaccccauagacugaaucacaugggcaucuguagcugcggccuguauaagcacccuggggugcccgucaaguggaaacggugaggacuagucccuguucccagagcccacuuuuuuuucuuuuuuugaaauaaaauagccugucuuucagaucucaaaggcucuuuucagagccaccaaaaaaaaaaaaaaaaaaaaaaaaaaaaaaaaaaaaaaaaaaaaaaaaaaaaaaaaaaaaaaaaaaaaaaaaaaaaaaaaaaaaaaaaaaaaaaaaaaaaa

SEQ ID NO: 36912 - RNA, 1745 nt, Artificial Sequence
  mRNA product Design a-1 (hSL-A100) comprising derived and/or modified sequence from LASV(Lassa virus/H.sapiens-wt/NGA/2016/ISTH_0009;Clade II)__AVO03571__GPCmut10 (opt5)
aggagagucccgcagucggcguccagcggcucugcuuguucgugugugugucguugcaggccuuauucaagcuuaccaugggccagaucauuaccuucuuucaagaggugccccacgucaucgaagagguuaugaacauugugcugaucgcccucagccugcuugcuauucugaaggggaucuacaauguggccacaugcggacuccugggccuugucuccuuccugcuccugugugggagaucuugcagcacgaccuauaaaggaguguacgaacugcagacacucgagcuggacauggcgucccuuaacauguguaugccucugucuugcaccaagaauaacagccaucacuauaucaugguuggcaaugaaacagggcucgagcugacccuuacaaacaccuccauuaucaaucauaaauuuuguaaccugucugaugcucacaagaaaaaucucuacgaccaugcccugaugagcauuaucuccacguuccaccugagcauuccgaacuuuaaucaguaugaggccaugucuugcgauuucaacggaggccggaucuccgugcaguacaaucucagccacucuuaugcugucgacgccgcuaaccauuguggcaccauugccaauggggugcugcaaacauuuaugcgcauggcguggggaggcuccuacaucgcccuugauagcgggaagggaucuugggacugcaucaugaccuccuaccaguaucugauuauccagaacacaaccugggaagaucacugucaguucagcagacccuccccuauuggcuaccucgggcugcuuucucaacggacgcgcgacaucuauauuagcagacggcugcucggaacauuuaccuggacacuguccgauagcgagggcaacgaaacccccggcggguacugccugacccgcuggaugcucaucgaggcugagcugaaguguuucggaaauacagccguugcuaaaugcaacgaaaagcaugacgaggaauuuugcgauaugcuuagacuguucgacuuuuguaaacaggccauccggcgccucaagacggaggcgcagaugucuauucagcugaucaauaaagccgugaacgcucuuauuaaugaucaacugaucaugaagaaccaccucagagacauuaugggcaucccuuauugcaauuacuccaaguauugguaccugaaccacaccgucacagggaaaaccagccugccccgguguuggcucgugucuaauggaagcuaccugaacgaaacacauuucuccgacgauaucgagcagcaggccgacaauaugauuaccgagcuucugcaaaaggaauauaucgaucgccagggcaaaacgccucucgggcugguggaccuguucgucuuuucuaccagcuucuaccuuauuuccaucuuucuccaccugguuaagauuccgacacauagacacaucaccggaaaacccugcccuaagccccaucggcugaaccacaugggcauuuguagcugcggccucuauaaucacccuggggugcccgugaaauggaagcgcugaggacuagucccuguucccagagcccacuuuuuuuucuuuuuuugaaauaaaauagccugucuuucagaucucaaaggcucuuuucagagccaccaaaaaaaaaaaaaaaaaaaaaaaaaaaaaaaaaaaaaaaaaaaaaaaaaaaaaaaaaaaaaaaaaaaaaaaaaaaaaaaaaaaaaaaaaaaaaaaaaaaaa

SEQ ID NO: 36913 - RNA, 1745 nt, Artificial Sequence
  mRNA product Design a-1 (hSL-A100) comprising derived and/or modified sequence from LASV(Lassa virus/H.sapiens-wt/NGA/2016/ISTH_0017;Clade II)__AVO03567__GPCmut10 (opt5)
aggagagucccgcagucggcguccagcggcucugcuuguucgugugugugucguugcaggccuuauucaagcuuaccaugggccagaucauuaccuucuuucaagaggugccccacgucaucgaagagguuaugaacauugugcugaucgcccucagccugcuugcuauucugaaggggaucuacaauguggccacaugcggacucuucggccuggucuccuuucuucugcucugugggagaucuugcagcacgaccuauaaaggaguguacgaacugcagacacuggagcucgacauggcgucccugaacauguguaugccucuuucuugcaccaagaauaacagccaucacuauaucaugguuggcaaugaaacagggcuggagcucacccugacaaacaccuccauuaucaaucauaaauucuguaaccuuucugaugcucacaagaaaaaucuguacgaccaugcccucaugagcauuaucuccacguuucaccugagcauuccgaacuucaaucaguaugaggccaugucuugcgauuuuaacggaggcaagaucuccgugcaguacaaucugagccacaccuaugcuauugacgccgcuaaccauuguggcacaaucgccaaugggguccuccaaaccuucaugcggauggcguggggaggcucuuacaucgcccuggauuccgggaagggaagcugggacugcauuaugacaucuuaccaguaucuuaucauucagaacaccacgugggaagaucacugucaguuuucccgccccagcccuaucggcuaccuggggcuccugucccaaagaacacgggacauuuauaucucucgcagacuucugggaaccuucacauggacccucagcgauuccgagggcaacgaaacccccggcggguacugccugacacgguggaugcugaucgaggcugagcucaaauguuuuggaaauacggccguggcuaagugcaacgaaaaacaugacgaggaguucugcgauaugcugcgccuuuuugacuucuguaagcaggccauuagacggcugaaaaccgaagcgcagaugagcauccagcucauuaauaaggccguuaacgcucugaucaaugaucaacuuauuaugaagaaccaucugcgcgacaucaugggcaucccuuauugcaauuacucuaaauauugguaccucaaccacacagugaccgggaagacaucccugcccagauguuggcuggucagcaauggaucuuaccucaacgaaacccacuucagcgacgauauugagcagcaggccgacaauaugaucacggagcugcuucaaaaagaauauauggaucggcagggcaagacaccucuggggcucguggaccuguuuguguucuccaccucuuuuuaccugauuagcaucuuccuucaccucguccgcauuccgacccauagacacguuaucggaaaacccugcccuaagccccaucggcugaaccacaugggcauuuguuccugcggccuguauaaacacccuggggugcccgugaaguggaagcgcugaggacuagucccuguucccagagcccacuuuuuuuucuuuuuuugaaauaaaauagccugucuuucagaucucaaaggcucuuuucagagccaccaaaaaaaaaaaaaaaaaaaaaaaaaaaaaaaaaaaaaaaaaaaaaaaaaaaaaaaaaaaaaaaaaaaaaaaaaaaaaaaaaaaaaaaaaaaaaaaaaaaaa

SEQ ID NO: 36914 - RNA, 1745 nt, Artificial Sequence
  mRNA product Design a-1 (hSL-A100) comprising derived and/or modified sequence from LASV(Lassa virus/H.sapiens-wt/NGA/2018/ISTH_0959;Clade II)__AVV65099__GPCmut10 (opt5)
aggagagucccgcagucggcguccagcggcucugcuuguucgugugugugucguugcaggccuuauucaagcuuaccaugggccagaucauuaccuucuuucaagaggugccccacgucaucgaagagguuaugaacauugugcugaucgcccucagccugcuugcuauucugaaggggaucuacaauguggucacaugcggacucuucggccugguguccuuucuucugcucugugggagaucuugcagcacgaccuauaaaggaguuuacgaacugcagacacuggagcucgacauggccucccugaacauguguaugccucuuucuugcaccaagaauaacagccaucacuauaucauggugggcaaugaaacagggcuggagcucacccugacaaacaccuccauuaucaaucauaaauucuguaaccuuucugaugcgcacaagaaaaaucuguacgaccaugcucucaugagcauuaucuccacguuucaccugagcauuccgaacuucaaucaguaugaggccaugucuugcgauuuuaacggaggcaagaucuccguccaguacaaucugagccacgccuaugcuauugacgccgcuaaccauuguggcaccaucgccaauggggugcuccaaacauucaugcggauggcguggggaggcucuuacaucgcccuggauuccgggaagggaagcugggacugcauuaugaccucuuaccaguaucuuaucauucagaacacaaccugggaagaucacugucaguuuucccgccccagcccuaucggcuaccuggggcuccugucccaaagaacgcgggacauuuauaucucucgcagacuucugggaacauucaccuggacacucagcgauuccgagggcaacgaaacccccggcggguacugccugacccgguggaugcugaucgaggcugagcucaaauguuuuggaaauacagccguugcuaagugcaacgaaaaacaugacgaggaguucugcgauaugcugcgccuuuuugacuucuguaagcaggccauuagacggcugaaaacggaagcgcagaugagcauccagcucauuaauaaggccgugaacgcucugaucaaugaucaacuuauuaugaagaaccaucugcgcgacaucaugggcaucccuuauugcaauuacucuaaauauugguaccucaaccacaccgucacagggaagaccucccugcccagauguuggcuggugagcaauggaucuuaccucaacgaaacacacuucagcgacgauauugagcagcaggccgacaauaugaucaccgagcugcuucaaaaagaauauauugaucggcagggcaagacgccucuggggcucguggaccuguuugucuucuccacaucuuuuuaccugaucagcauuuuccuucaccucguuaaaaucccgacccaucgccacgugauuggaaagcccugcccuaaaccccauagacugaaccacaugggcaucuguuccugcggccuguauaagcacccuggggugcccgucaaguggaaacggugaggacuagucccuguucccagagcccacuuuuuuuucuuuuuuugaaauaaaauagccugucuuucagaucucaaaggcucuuuucagagccaccaaaaaaaaaaaaaaaaaaaaaaaaaaaaaaaaaaaaaaaaaaaaaaaaaaaaaaaaaaaaaaaaaaaaaaaaaaaaaaaaaaaaaaaaaaaaaaaaaaaaa

SEQ ID NO: 36915 - RNA, 1745 nt, Artificial Sequence
  mRNA product Design a-1 (hSL-A100) comprising derived and/or modified sequence from LASV(LASV003-NIG-2008;Clade II)__AIT17580__GPCmut10 (opt5)
aggagagucccgcagucggcguccagcggcucugcuuguucgugugugugucguugcaggccuuauucaagcuuaccaugggccagaucauuaccuucuuucaagaggugccccacgucaucgaagagguuaugaacauugugcugaucgcccucagccugcuugcuauucugaaggggaucuacaauguggccacaugcggacucuucggccuggucuccuuucuucugcucugugggagaucuugcagcacgaccuauaaaggaguguacgaacugcagacacuggagcucgacauggcgucccugaacauguguaugccucuuucuugcaccaagaauaacagccaucacuauaucaugguuggcaaugaaacagggcuggagcucacccugacaaacaccuccauuaucaaucauaaauucuguaaccuuucugaugcucacaagaaaaaucuguacgaccaugcccucaugagcauuaucuccacguuucaccugagcauuccgaacuucaaucaguaugaggccaugucuugcgauuuuaacggaggcaagaucuccgugcaguacaaucugagccacaccuaugcugucgacgccgcuaaccauuguggcacaauugccaauggggugcuccaaaccuucaugcggauggcguggggaggcucuuacaucgcccuggauuccgggaagggaagcugggacugcaucaugacaucuuaccaguaucuuauuauccagaacaccacgugggaagaucacugucaguuuucccgccccagcccuauuggcuaccuggggcuccugucccaaagaacacgggacaucuauauuucucgcagacuucugggaaccuucacauggacccucagcgauuccgagagcaacgaaacccccggcggcuacugccugacacgguggaugcugaucgaggcugagcucaaauguuuugggaauacggccguugcuaagugcaacgaaaaacaugacgaggaguucugcgauaugcugcgccuuuuugacuucuguaagcaggccaucagacggcugaaagcggaagcccagaugucuauucagcucaucaauaaggcugugaacgcccugauuaaugaucaacuuaucaugaagaaccaucugcgcgacauuaugggaaucccuuauugcaauuacuccaaauauugguaccucaaccacaccgucacaggcagaaccagccugccccgguguuggcuggugucuaaugggagcuaccucaacgaaacacacuucuccgacgauaucgagcagcaggcugacaauaugauuaccgagcugcuucaaaaggaauauauggaucgccagggaaaaacgccucugggccucguggaccuguuugucuucucuaccagcuuuuaccugaucuccauuuuccuucaccucguuaagaucccgacacauagacacgugauugggaaacccugcccuaagccccaucggcugaaccacaugggaaucuguagcugcggccuguauaaacacccuggcgugcccgucaaguggaagcgcugaggacuagucccuguucccagagcccacuuuuuuuucuuuuuuugaaauaaaauagccugucuuucagaucucaaaggcucuuuucagagccaccaaaaaaaaaaaaaaaaaaaaaaaaaaaaaaaaaaaaaaaaaaaaaaaaaaaaaaaaaaaaaaaaaaaaaaaaaaaaaaaaaaaaaaaaaaaaaaaaaaaaa

SEQ ID NO: 36916 - RNA, 1745 nt, Artificial Sequence
  mRNA product Design a-1 (hSL-A100) comprising derived and/or modified sequence from LASV(LASV035-NIG-2009;Clade II)__AIT17588__GPCmut10 (opt5)
aggagagucccgcagucggcguccagcggcucugcuuguucgugugugugucguugcaggccuuauucaagcuuaccaugggccagaucauuaccuucuuucaagaggugccccacgucaucgaagagguuaugaacauugugcugaucgcccucagccugcuugcuauucugaaggggaucuacaauguggccacaugcggacucuucggccuggucuccuuucuucugcucugugggagaucuugcagcacgaccuauaaaggaguguacgaacugcagacacuggagcucgacauggcgucccugaacauguguaugccucuuucuugcaccaagaauaacagccaucacuauaucaugguuggcaaugaaacagggcuggagcucacccugacaaacaccuccauuaucaaucauaaauucuguaaccuuucugaugcucacaagaaaaaucuguacgaccaugcccucaugagcauuaucuccacguuucaccugagcauuccgaacuucaaucaguaugaggccaugucuugcgauuuuaacggaggcaagaucuccgugcaguacaaucugagccacgcuuaugccgucgacgcugccaaccauuguggcaccauugcgaauggggugcuccaaacauucaugcggauggccuggggaggcucuuacaucgcucuggauuccgggaagggaagcugggacugcaucaugaccucuuaccaguaucuuauuauccagaacacaaccugggaagaucacugucaguuuucccgccccagcccuauuggcuaccuggggcuccugucccaaagaacgcgggacaucuauauuucucgcagacuucugggaacauucaccuggacacucagcgauuccgagggcaacgaaacccccggcggguacugccugacccgguggaugcugaucgaggccgagcucaaauguuuuggaaauacagcuguugccaagugcaacgaaaaacaugacgaggaguucugcgauaugcugcgccuuuuugacuucuguaagcaggcgaucagacggcugaaagccgaagcucagaugagcauucagcucaucaauaaggccgugaacgcucugauuaaugaucaacuuaucaugaagaaccaucugcgcgacauuaugggcaucccuuauugcaauuacucuaaauauugguaccucaaccacacggucaccgggaagacaucccugcccagauguuggcuggugagcaauggaucuuaccucaacgaaacccacuucagcgacgauaucgagcagcaggccgacaauaugauuacagagcugcuucaaaaagaauauaucgaucggcagggcaagaccccucuggggcucguggaccuguuugucuucuccacgucuuuuuaccugauuagcaucuuccuucaccucguuaaaauuccgacacaucgccacgugaucggaaagcccugcccuaaaccccauagacugaaccacaugggcauuuguuccugcggccuguauaagcacccuggggugcccgucaaguggaaacggugaggacuagucccuguucccagagcccacuuuuuuuucuuuuuuugaaauaaaauagccugucuuucagaucucaaaggcucuuuucagagccaccaaaaaaaaaaaaaaaaaaaaaaaaaaaaaaaaaaaaaaaaaaaaaaaaaaaaaaaaaaaaaaaaaaaaaaaaaaaaaaaaaaaaaaaaaaaaaaaaaaaaa

SEQ ID NO: 36917 - RNA, 1745 nt, Artificial Sequence
  mRNA product Design a-1 (hSL-A100) comprising derived and/or modified sequence from LASV(LASV1000-NIG-2009;Clade II)__AIT17782__GPCmut10 (opt5)
aggagagucccgcagucggcguccagcggcucugcuuguucgugugugugucguugcaggccuuauucaagcuuaccaugggccagaucauuaccuucuuucaagaggugccccacgucaucgaagagguuaugaacauugugcugaucgcccucagccugcuugcuauucugaaggggaucuacaauguggccacaugcggacucuucggccuggucuccuuucuucugcucugugggagaucuugcagcacgaccuauaaaggaguguacgaacugcagacacuggagcucgacauggcgucccugaacauguguaugccucuuucuugcaccaagaauaacagccaucacuauaucaugguuggcaaugaaacagggcuggagcucacccugacaaacaccuccauuaucaaucauaaauucuguaaccuuucugaugcucacaagaaaaaucuguacgaccaugcccucaugagcauuaucuccacguuucaccugagcauuccgaacuucaaucaguaugaggccaugucuugcgauuuuaacggaggcaagaucuccgugcaguacaaucugagccacaccuaugcugucgacgccgcuaaccauuguggcacaauugccaauggggugcuccaaaccuucaugcggauggcguggggaggcucuuacaucgcccuggauuccgggaagggaagcugggacugcaucaugacaucuuaccaguaucuuauuauccagaacaccacgugggaagaucacugucaguuuucccgccccagcccuauuggcuaccuggggcuccugucccaaagaacacgggacaucuauauuucucgcagacuucugggaaccuucacauggacccucagcgauuccgagggcaacgaaacccccggcggguacugccugacacgguggaugcugaucgaggcugagcucaaauguuuuggaaauacggccguugcuaagugcaacgaaaaacaugacgaggaguucugcgauaugcugcgccuuuuugacuucuguaagcaggccaucaaaagacugaagaccgaagcgcagaugagcauucagcucaucaauaaggccgugaacgcucugauuaaugaucaacuuaucaugaaaaaccaucugcgggacauuaugggcaucccuuauugcaauuacucuaaguauugguaccucaaccacacagucaccgggaaaacaucccugccccgcuguuggcuggugagcaauggaucuuaccucaacgaaacccacuucagcgacgauaucgagcagcaggccgacaauaugauuacggagcugcuucaaaaggaauauaucgauagacagggcaaaacaccucuggggcucguggaccuguuugucuucuccaccucuuuuuaccugauuagcaucuuccuucaccucguuaagauuccgacccaucggcacguggugggaaaacccugcccuaagccccaucgccugaaccacaugggcaucuguuccugcggccuguauaagcacccugggguccccgugaaauggaagagaugaggacuagucccuguucccagagcccacuuuuuuuucuuuuuuugaaauaaaauagccugucuuucagaucucaaaggcucuuuucagagccaccaaaaaaaaaaaaaaaaaaaaaaaaaaaaaaaaaaaaaaaaaaaaaaaaaaaaaaaaaaaaaaaaaaaaaaaaaaaaaaaaaaaaaaaaaaaaaaaaaaaaa

SEQ ID NO: 36918 - RNA, 1745 nt, Artificial Sequence
  mRNA product Design a-1 (hSL-A100) comprising derived and/or modified sequence from LASV(LASV221-NIG-2010;Clade II)__AIT17624__GPCmut10 (opt5)
aggagagucccgcagucggcguccagcggcucugcuuguucgugugugugucguugcaggccuuauucaagcuuaccaugggccagaucauuaccuucuuucaagaggugccccacgucaucgaagagguuaugaacauugugcugaucgcccucagccugcuugcuauucugaaggggaucuacaauguggccacaugcggacucuucggccuggucuccuuucuucugcucugugggagaucuugcagcacgaccuauaaaggaguguacgaacugcagacacuggagcucgacauggcgucccugaacauguguaugccucuuucuugcaccaagaauaacagccaucacuauaucaugguuggcaaugaaacagggcuggagcucacccugacaaacaccuccauuaucaaucauaaauucuguaaccuuucugaugcucacaagaaaaaucuguacgaccaugcccucaugagcauuaucuccacguuucaccugagcauuccgaacuucaaucaguaugaggccaugucuugcgauuuuaacggaggcaagaucuccgugcaguacaaucugagccacaccuaugcuauugacgccgcuaaccauuguggcacaaucgccaaugggguccuccaaaccuucaugcggauggcguggggaggcucuuacaucgcccuggauuccgggaagggaagcugggacugcauuaugacaucuuaccaguaucuuaucauucagaacaccacgugggaagaucacugucaguuuucccgccccagcccuaucggcuaccuggggcuccugucccaaagaacacgggacauuuauaucucucgcagacuucugggaaccuucacauggacccucagcgauuccgagggcaacgaaacccccggcggguacugccugacacgguggaugcugaucgaggcugagcucaaauguuuuggaaauacggccguggcuaagugcaacgaaaaacaugacgaggaguucugcgauaugcugcgccuuuuugacuucuguaagcaggccauuagacggcugaaaaccgaagcgcagaugagcauccagcucauuaauaaggccguuaacgcucugaucaaugaucaacuuauuaugaagaaccaucugcgcgacaucaugggcaucccuuauugcaauuacucuaaauauugguaccucaaccacacagugaccgggaagacaucccugcccagauguuggcuggucagcaauggaucuuaccucaacgaaacccacuucagcgacgauauugagcagcaggccgacaauaugaucacggagaugcugcaaaaagaauauauggaucggcagggcaagacaccucuugggcugguggaccucuuuguguucuccaccucuuuuuaccugauuagcaucuuccugcaccuugucaaaauuccgacccaucgccacguuaucggaaagcccugcccuaaaccccauagacucaaccacaugggcauuuguuccugcggccuguauaagcacccuggggugcccgugaaguggaaacggugaggacuagucccuguucccagagcccacuuuuuuuucuuuuuuugaaauaaaauagccugucuuucagaucucaaaggcucuuuucagagccaccaaaaaaaaaaaaaaaaaaaaaaaaaaaaaaaaaaaaaaaaaaaaaaaaaaaaaaaaaaaaaaaaaaaaaaaaaaaaaaaaaaaaaaaaaaaaaaaaaaaaa

SEQ ID NO: 36919 - RNA, 1745 nt, Artificial Sequence
  mRNA product Design a-1 (hSL-A100) comprising derived and/or modified sequence from LASV(LASV237-NIG-2010;Clade II)__AIT17638__GPCmut10 (opt5)
aggagagucccgcagucggcguccagcggcucugcuuguucgugugugugucguugcaggccuuauucaagcuuaccaugggccagaucauuaccuucuuucaagaggugccccacgucaucgaagagguuaugaacauugugcugaucgcccucagccugcuugcuauucugaaggggaucuacaauguggccacaugcggacucuucggccuggucuccuuucuucugcucugugggagaucuugcagcacgaccuauaaaggaguguacgaacugcagacacuggagcucgacauggcgucccugaacauguguaugccucuuucuugcaccaagaauaacagccaucacuauaucaugguuggcaaugaaacagggcuggagcucacccugacaaacaccuccauuaucaaucauaaauucuguaaccuuucugaugcucacaagaaagaccuguacgaucaugcccucaugagcauuaucuccacguuucaccugagcauuccgaauuucaaccaguaugaggccaugucuugcgacuuuaauggaggcaagaucuccgugcaguacaaccugagccacaccuaugcugucgaugccgcuaaucauuguggcacaauugccaacggggugcuccaaaccuucaugcggauggcguggggaggcucuuacaucgcccuggacuccgggaagggaagcugggauugcaucaugacaucuuaccaguaucuuauuauccagaauaccacgugggaagaccacugucaguuuucccgccccagcccuauuggcuaccuggggcuccugucccaaagaacacgggauaucuauauuucucgcagacuucugggaaccuucacauggacccucagcgacuccgagggcaacgaaacccccggcggguacugccugacacgguggaugcugaucgaggcugagcucaaauguuuuggaaacacggccguugcuaagugcaaugaaaaacaugaugaggaguucugcgacaugcugcgccuuuuugauuucuguaagcaggccaucagacggcugaaaaccgaagcgcagaugagcauucagcucaucaacaaggccgugaaugcucugauuaacgaccaacuuaucaugaagaaucaucugcgcgacauuaugggcaucccuuauugcaacuacucuaaauauugguaccucaaucacacagucaccgggaagacaucccugcccagauguuggcuggugagcaacggaucuuaccucaaugaaacccacuucagcgaugacaucgagcagcaggccgauaacaugauuacggagcugcuucaaaaagaauauauggaccggcagggcaagacaccucuggggcucguggaucuguuugucuucuccaccucuuuuuaccugaucagcauuuuccuucaccucaucaaaauuccgacccaucgccacaucacaggaaagcccugcccuaaaccccauagacugaaucacaugggcauuuguuccugcggccuguauaagcacccugggguucccgugaaguggaaacggugaggacuagucccuguucccagagcccacuuuuuuuucuuuuuuugaaauaaaauagccugucuuucagaucucaaaggcucuuuucagagccaccaaaaaaaaaaaaaaaaaaaaaaaaaaaaaaaaaaaaaaaaaaaaaaaaaaaaaaaaaaaaaaaaaaaaaaaaaaaaaaaaaaaaaaaaaaaaaaaaaaaaa

SEQ ID NO: 36920 - RNA, 1745 nt, Artificial Sequence
  mRNA product Design a-1 (hSL-A100) comprising derived and/or modified sequence from LASV(LASV253-NIG-2011;Clade II)__AIT17670__GPCmut10 (opt5)
aggagagucccgcagucggcguccagcggcucugcuuguucgugugugugucguugcaggccuuauucaagcuuaccaugggccagaucauuaccuucuuucaagaggugccccacgucaucgaagagguuaugaacauugugcugaucgcccucagccugcuugcuauucugaaggggaucuacaauguggccacaugcggacucuucggccuggucuccuuucuucugcucugugggagaucuugcagcacgaccuauaaaggaguguacgaacugcagacacuggagcucgacauggcgucccugaacauguguaugccucuuucuugcaccaagaauaacagccaucacuauaucaugguuggcaaugaaacagggcuggagcucacccugacaaacaccuccauuaucaaucauaaauucuguaaccuuucugaugcucacaagaaaaaucuguacgaccaugcccucaugagcauuaucuccacguuucaccugagcauuccgaacuucaaucaguaugaggccaugucuugcgauuuuaacggaggcaagaucuccgugcaguacaaucugagccacaccuaugcugucgacgccgcuaaccauuguggcacaauugccaauggggugcuccaaaccuucaugcggauggcguggggaggcucuuacaucgcccuggauuccgggaagggaagcugggacugcaucaugacaucuuaccaguaucuuauuauccagaacaccacgugggaagaucacugucaguuuucccgccccagcccuauuggcuaccuggggcuccugucccaaagaacacgggacaucuauauuucucgcagacuucugggaaccuucacauggacccucagcgauuccgagggcaacgaaacccccggcggguacugccugacacgguggaugcugaucgaggcugagcucaaauguuuuggaaauacggccguugcuaagugcaacgaaaaacaugacgaggaguucugcgauaugcugcgccuuuuugacuucuguaagcaggccaucagacggcugaaagcggaagcccagaugagcauucagcucaucaauaaggcugugaacgcccugauuaaugaucaacuuaucaugaagaaccaucugcgcgacauuaugggcaucccuuauugcaauuacucuaaauauugguaccucaaccacaccgucacagggagaaccucccugccccgguguuggcuggugagcaauggaucuuaccucaacgaaacacacuucagcgacgauaucgagcagcaggcugacaauaugauuaccgagcugcuucaaaaggaauauaucgaucgccagggcaaaacgccucuggggcucguggaccuguuugucuucuccacaucuuuuuaccugauuagcaucuuccuucaccucguuaagauuccgacccauagacacaucauuggaaaacccugcccuaagccccaucggcugaaccacaugggcaucuguuccugcggccuguauaaacacccuggggugcccgugaaguggaagcgcugaggacuagucccuguucccagagcccacuuuuuuuucuuuuuuugaaauaaaauagccugucuuucagaucucaaaggcucuuuucagagccaccaaaaaaaaaaaaaaaaaaaaaaaaaaaaaaaaaaaaaaaaaaaaaaaaaaaaaaaaaaaaaaaaaaaaaaaaaaaaaaaaaaaaaaaaaaaaaaaaaaaaa

SEQ ID NO: 36921 - RNA, 1745 nt, Artificial Sequence
  mRNA product Design a-1 (hSL-A100) comprising derived and/or modified sequence from LASV(LASV254-NIG-2011;Clade II)__AIT17674__GPCmut10 (opt5)
aggagagucccgcagucggcguccagcggcucugcuuguucgugugugugucguugcaggccuuauucaagcuuaccaugggccagaucauuaccuucuuucaagaggugccccacgucaucgaagagguuaugaacauugugcugaucgcccucagccugcuugcuauucugaaggggaucuacaauguggccacaugcggacucuucggccuggucuccuuucuucugcucugugggagaucuugcagcacgaccuauaaaggaguguacgaacugcagacacuggagcucgacaugaccaaccugaauauguguaugccucuuuccugcacaaagaacaauucucaucacuauaucaugguuggcaacgaaaccgggcuggagcucacacugaccaauacgagcauuaucaaccauaaauucuguaaucuuuccgaugcgcacaagaaaaaccuguacaaucaugcucucaugucuauuaucagcaccuuucaccuguccauuccgaacuucaaucaguaugaggccaugagcugcgacuuuaacggaggcaagaucucugugcaguacaaucugucccacagcuaugccgucgaugcugccaaccauuguggcacaauugcuaacggggugcuccaaaccuucaugcggauggccuggggaggcucuuacaucgcgcuggacuccgggaagggaaauugggauugcaucaugacaagcuaccaguaucuuauuauccagaacaccacgugggaagaccacugucaguuuucucgccccuccccuauuggcuaccuggggcuccugagccaaagaacacgggauaucuauauuucccgcagacuucugggaaccuucacauggacccucucugacagcgagggcaaugaaacccccggcggguacugccugacacgguggaugcugaucgaggccgagcucaaauguuuuggaaacacggcuguugccaagugcaaugaaaaacaugaugaggaguucugcgacaugcugcgccuuuuugauuucuguaagcaggcuaucagacggcugaaaaccgaagcccaggcgaacauucagcucaucaauaaggccgugaacgcucugauuaaugaccaacuuaucaugaagaaccaucugcgcgauauuaugggcaucccuuauugcaauuacuccaaauauugguaccucaaccacacagucaccgggaagacaagccugcccagauguuggcuggugucuaauggauccuaccucaacgaaacccacuucagcgacgacaucgagcagcaggccgauaauaugauuacggagcugcuucaaaaagaauauauggaccggcagggcaagacaccucuggggcucguggaucuguuugucuucucuaccagcuuuuaccugaucuccauuuuccuucaccucguuaaaaucccgacccaucgccacgugauuggaaagcccugcccuaaaccccauagacugaaccacaugggcaucuguucuugcggccuguauaagcacccuggggugcccgucaaguggaaacggugaggacuagucccuguucccagagcccacuuuuuuuucuuuuuuugaaauaaaauagccugucuuucagaucucaaaggcucuuuucagagccaccaaaaaaaaaaaaaaaaaaaaaaaaaaaaaaaaaaaaaaaaaaaaaaaaaaaaaaaaaaaaaaaaaaaaaaaaaaaaaaaaaaaaaaaaaaaaaaaaaaaaa

SEQ ID NO: 36922 - RNA, 1745 nt, Artificial Sequence
  mRNA product Design a-1 (hSL-A100) comprising derived and/or modified sequence from LASV(Nig08-A19;Clade III)__ADU56618__GPCmut10 (opt5)
aggagagucccgcagucggcguccagcggcucugcuuguucgugugugugucguugcaggccuuauucaagcuuaccaugggccagaucgugaccuucuuucaagaggucccccacguuauugaagaggugaugaacaucgugcugauugcccucagcauccuggcuauucuuaaggggcuguacaauaucgccacaugcggacucaucggccuggucacguuccuucugcucuccgggagaucuuguagcaugaccuauaaaggaguguacgaacugcagacacuggagcucaacaugaauacccugaacaugugcaugccucuuuccuguacaaagaauaacucucaucacuauauuaugguuggcaaugaaaccgggcuggagcucacacugaccaacacgagccuucugcaucacaaauuuugcaaucucuccgacgcgcauaagaaaaaccuguacgaucacacccugaugucuaucauuagcacauuccaccucuccaucccgaauuuuaaccaguaugaggcuaugagcugugacuucaauggaggcaagauuaccgugcaguacaaccugucucauuccuaugccaucgaugccgcuaaucacugcggcacagucgccaacggggugcuucaaaccuuuaugcggauggcuuggggaggcagcuacauugcccuggacucugggcgcggaaagugggauuguaucaugacguccuaccaguaucucaucauucagaacacaaccugggaagaccauugccaguucagcagacccucuccuaucggcuaccuggggcuucugucccaacggacacgcgauauuuauaucagcagacggcuccugggaaccuuuaccuggacacuguccgacucugagggcaaugaaacgcccggcggguacugucucacccgcuggaugcugauugaggcggagcuuaaaugcuucggaaacacagccguugcuaaguguaaugaaaaacacgaugaggaauuuugcgacaugcugagacucuucgauuuuugcaagcaggccauccggcgccugaaagcugaggcccagaugagcauccagcuuauuaacaaggcggugaaugcccugaucaacgaccaacucauuaugaagaaucaccugagagauaucaugggcauuccuuauuguaacuacuccaaauauugguaccugaaucauaccagcacagggcggaccucucucccccgcugcuggcuggucuccaacggaagcuaccuuaaugaaacgcacuucucugacgacaucgagcagcaggcugauaacaugaucacagagaugcugcaaaaggaauaucucgacagacagggcaaaaccccucuggggcugguggaucuuuucguguuuagcaccuccuucuaccucauuucuaucuuucugcaucuggucaagauuccgacacaccggcauaucguuggaaaacccuguccuaagccccaccgccucaaucacaugggcauuugcagcuguggccuguauaaacagccuggggugcccgugagauggaagcggugaggacuagucccuguucccagagcccacuuuuuuuucuuuuuuugaaauaaaauagccugucuuucagaucucaaaggcucuuuucagagccaccaaaaaaaaaaaaaaaaaaaaaaaaaaaaaaaaaaaaaaaaaaaaaaaaaaaaaaaaaaaaaaaaaaaaaaaaaaaaaaaaaaaaaaaaaaaaaaaaaaaaa

SEQ ID NO: 36923 - RNA, 1748 nt, Artificial Sequence
  mRNA product Design a-1 (hSL-A100) comprising derived and/or modified sequence from LASV(G1180-SLE-2010;Clade IV)__AIT17168__GPCmut10 (opt5)
aggagagucccgcagucggcguccagcggcucugcuuguucgugugugugucguugcaggccuuauucaagcuuaccaugggccagaucgugaccuucuuucaagaggucccccacguuauugaagaggugaugaacaucgugcugauugcccucagcauccuggcuguccuuaaggggcuguacaauuucgccacaugcggacucgugggccugcuuacguuucugcuccugugugggagauccugcaccgcgucucgguauaaaggaguuuacgaacugcagacacucgagcugaacauggaaacccuuaauauguguaugccucugagcugcacaaagaacaauucccaucacuauauuauggugggcaacgagaccgggcucgagcugacacuuaccaauacgucuaucaucaaccauaaauucuguaaucugagcgacgcucacaagaaaaaccucuacgaucaugcccugauguccauuaucucuaccuuucaccugagcauuccgaauuucaaccaguaugaagccauguccugcgacuuuaauggaggcaagaucagcguccaguacaaccucucucacuccuaugcuggcgaugccgcuaaucauugugggacaguggccaacggaguucugcaaaccuucaugcgcauggcguggggcgggagcuacauugcccuugacucuggacacggcuccugggauugcaucaugacaagcuaccaguaucugauuauccagaacaccacgugggaggaccauugucaguuuucuagacccuccccuaucggguaccucggacugcuuagccaacggacacgcgauauuuauaucuccagacggcugcucggcaccuucacauggacccugucugacagcgaaggcaaggauacccccgggggauacugccugacacgcuggaugcucauugaggcugagcugaaauguuuuggcaauacggccguggcuaagugcaacgaaaaacacgacgaggaguucugcgauaugcuuagacuguuugacuucuguaagcaggccauccagcggcucaaagcggaagcccagauguccauucaacugaucaauaaggcugucaacgcccuuaucaaugaucagcugauuaugaagaaccaccuccgcgacaucauggggauuccuuauugcaauuacagcaaauauugguaccugaaccauaccacaaccggaaagacaucucugcccaaauguuggcucguguccaauggcagcuaccugaacgaaacccacuucucugacgauaucgagcagcaagcugacaauaugauuacggagaugcuucagaaggaauauauggagagacaggggaaaacaccucugggacucguggaucuguuugucuucagcaccuccuuuuaccugaucucuaucuuccuucaucucguuaagauuccgacccaccggcauaucgugggcaaaagcugccccaagccucaccgccugaaccacaugggcauuuguuccugcgggcuguauaagcagcccggagugccugucaaauggaagagaugaggacuagucccuguucccagagcccacuuuuuuuucuuuuuuugaaauaaaauagccugucuuucagaucucaaaggcucuuuucagagccaccaaaaaaaaaaaaaaaaaaaaaaaaaaaaaaaaaaaaaaaaaaaaaaaaaaaaaaaaaaaaaaaaaaaaaaaaaaaaaaaaaaaaaaaaaaaaaaaaaaaaa

SEQ ID NO: 36924 - RNA, 1748 nt, Artificial Sequence
  mRNA product Design a-1 (hSL-A100) comprising derived and/or modified sequence from LASV(G1442-SLE-2011;Clade IV)__AIT17180__GPCmut10 (opt5)
aggagagucccgcagucggcguccagcggcucugcuuguucgugugugugucguugcaggccuuauucaagcuuaccaugggccagaucgugaccuucuuucaagaggucccccacguuauugaagaggugaugaacaucgugcugauugcccucagcauccuggcuguccuuaaggggcuguacaauguggccacaugcggacucauuggccugguuacguuccuucugcucugugggagauccugcaccacaacccuguauaaaggaguguacgaacugcagacacucgagcugaacauggaaacccuuaauauguguaugccucugucuugcacaaagaacaauagccaucacuauauccgggucggcaacgagaccgggcucgagcugacgcuuaccaauacauccaucauuaaccauaaauuuuguaaucugucugacgcgcacaagaaaaaccucuacgaucaugcucugaugagcaucauuuccaccuuccaccugucuaucccgaauuuuaaccaguaugaagccaugagcugcgacuucaauggaggcaagauuuccgugcaguacaaccucagccacucuuaugccggcgaugcugccaaucauugugggacaguugcuaacggagugcugcaaaccuuuaugcgcauggccuggggcggguccuacaucgcgcuugacagcggaagaggcaacugggauugcauuaugacgucuuaccaguaucugaucauccagaauacaaccugggacgaucacugucaguucucccggcccagcccuauuggguaccucggacugcuuucucaacgcacaagagacgucuauaucucccggcgccugcucggcaccuuuaccuggacacugagcgauuccgagggcaaggacacgcccgggggauacugccugaccagauggaugcucauugaagccgagcugaaauguuucggcaacacagcuguggccaagugcaaugagaaacaugaugaagaguuuugcgacaugcuucggcuguucgauuuuuguaagcaggcuauccagcgccucaaagccgaagcgcagaugucuauucaacugaucaacaaggccgugaaugcucuuaucaacgaccagcugauuaugaagaaucaccucagagacaucauggggauuccuuauugcaacuacagcaaauauugguaccugaauaacaccgccacaggaaagaccucccugcccaaauguuggcucaucagcaauggcucuuaccugaacgagacgcacuucuccgaugacauugaacaggaggcugauaauaugaucacagagaugcuucaaaaggaauauauggagcggcaggggaaaaccccucugggacucgucgaccuguucguuuuuagcaccucuuucuaccugaucagcauuuuucuucaucucgugaagaucccgacacaccgccauauugugggcaaauccugccccaagccucacagacugaaccauaugggcaucuguucuugcgggcuguauaagcagcccggagucccugugcgguggaaacgcugaggacuagucccuguucccagagcccacuuuuuuuucuuuuuuugaaauaaaauagccugucuuucagaucucaaaggcucuuuucagagccaccaaaaaaaaaaaaaaaaaaaaaaaaaaaaaaaaaaaaaaaaaaaaaaaaaaaaaaaaaaaaaaaaaaaaaaaaaaaaaaaaaaaaaaaaaaaaaaaaaaaaa

SEQ ID NO: 36925 - RNA, 1748 nt, Artificial Sequence
  mRNA product Design a-1 (hSL-A100) comprising derived and/or modified sequence from LASV(G3010-SLE-2013;Clade IV)__AIT17344__GPCmut10 (opt5)
aggagagucccgcagucggcguccagcggcucugcuuguucgugugugugucguugcaggccuuauucaagcuuaccaugggccagaucgugaccuucuuucaagaggucccccacguuauugaagaggugaugaacaucgugcugauugcccucagcauccuggcuguccuuaaggggcuguacaauuucgccacaugcggacucgugggccugguuacguuucuucugcucugugggagauccugcaccacaucucuguauaaaggaguguacgaacugcagacccucgagcugaacauggaaacacuuaauauguguaugccucugagcugcaccaagaacaauucccaucacuauauuauggucggcaacgagacagggcucgagcugacccuuacgaauaccucuaucaucaaccauaaauucuguaaucugagcgacgcgcacaagaaaaaccucuacaaucaugcucugauguccauuaucucuacauuucaccugagcauuccgaacuucaaucaguaugaagccauguccugcgauuuuaacggaggcaagaucagcgugcaguacaaucucucucacuccuaugccggcgacgcugccagccauugugggaccguugcuaacggagugcugcaaacauucaugcggauggccuggggcgggucuuacauugcgcuugauuccggauacggcaagugggacugcaucaugaccagcuaucaguaccugauuauccagaacacgacaugggaggaucacugucaguuuucucgccccuccccuaucggguaucucggacugcuuagccaaagaacccgggacauuuacaucucccgcagacugcucggcacauucaccuggacccugucugauagcgaaggcaaagacacacccgggggauauugccugacgcgguggaugcucauugaggccgagcugaaguguuuuggcaauaccgcugucgccaaaugcaacgaaaagcaugaugaggaguucugcgacaugcuucgccuguuugauuucuguaaacaggcuauccagagacucaagacagaagcccagauguccauucaacugaucaauaaggcggugaacgcccuuaucaaugaccagcugauuaugaaaaaccaccuccgggauaucauggggauuccuuacugcaauuauagcaaguacugguaccugaaccacaccacaaccggaaaaacgucucugcccaaguguuggcucguguccaauggcagcuaucugaacgaaacacauuucucugacgacaucgagcagcaagcugauaauaugauuaccgagaugcuucagaaagaauacauggagcgccaggggaagaccccucugggacucgucgaccuguuuguuuucagcacauccuuuuaucugaucucuaucuuccuucaccucgugaaaauuccgacccauagacacaucgugggcaagagcugccccaagccucaucggcugaaccacaugggcauuuguuccugcgggcuguacaaacagcccggagucccugugcgcuggaagagaugaggacuagucccuguucccagagcccacuuuuuuuucuuuuuuugaaauaaaauagccugucuuucagaucucaaaggcucuuuucagagccaccaaaaaaaaaaaaaaaaaaaaaaaaaaaaaaaaaaaaaaaaaaaaaaaaaaaaaaaaaaaaaaaaaaaaaaaaaaaaaaaaaaaaaaaaaaaaaaaaaaaaa

SEQ ID NO: 36926 - RNA, 1748 nt, Artificial Sequence
  mRNA product Design a-1 (hSL-A100) comprising derived and/or modified sequence from LASV(G502-SLE-2009;Clade IV)__AIT17126__GPCmut10 (opt5)
aggagagucccgcagucggcguccagcggcucugcuuguucgugugugugucguugcaggccuuauucaagcuuaccaugggccagaucgugaccuucuuucaagaggucccccacguuauugaagaggugaugaacaucgugcugauugcccucagcauccuggcuguccuuaaggggcuguacaauuucgccacaugcggacucgugggccugcuuacguuucugcuccugugugggagauccugcaccacaggacuguauaaaggcguuuacgaacuccagacccuggagcuuaacauggaaacacugaauauguguaugccucucucuugcaccaagaacaauagccaucacuauauuaugguggggaacgagacaggacuggagcuuacccugacgaauaccuccaucaucaaccauaaauucuguaaucucucugacgcgcacaagaaaaaccuguacgaucaugcucugaugagcauuaucuccacauuucaccucucuauuccgaauuucaaccaguaugaagccaugagcugcgacuuuaauggcggcaagaucuccguccaguacaaccugagccacucuuaugccggggaugcugccgaccauuguggaaccguggcuaauggcguucuucaaacauucaugcggauggccuggggaggguccuacauugcgcuggauagcggccgcgggagaugggacugcaucaugaccucuuaccaguaucucauuauccagaacacgacaugggaggaucacugucaguuuucccggcccagcccuaucggauaccugggccuucugucucaacgcaccagagacauuuauaucucccggcgccuccugggcacauucaccuggacccugagcgauuccgaagggaaggacacacccggaggcuacugccucacgagauggaugcugauugaggccgagcuuaaauguuuugggaacaccgcuguggccaagugcaaugaaaaacaugaugaggaguucugcgacaugcugcggcucuuugauuucuguaagcaggcuauccagcgccugaaagccgaagcgcagaugucuauucaacuuaucaacaaggccgucaaugcucugaucaacgaccagcucgugaugaagaaucaccugagagacauuaugggaaucccuuauugcaacuacagccgguauugguaccugaaucacacaaccacaggccgcaccucccuccccaaauguuggcuggugagcaacgggucuuaccuuaaugaaacgcauuucuccgaugacauugagcagcaagccgauaacaugaucacagagaugcugcagaaggaauauauggagagacagggaaaaaccccucucggccuggucgaccuguuuguuuucagcaccucuuuuuaccuuauuagcaucuuccuccaccuggugaagaucccgacacaucggcacauugugggcaaauccugccccaagccucaucgccugaaucacauggggaucuguucuugcggacucuauaaacagcccggcgucccugugaaguggaagagaugaggacuagucccuguucccagagcccacuuuuuuuucuuuuuuugaaauaaaauagccugucuuucagaucucaaaggcucuuuucagagccaccaaaaaaaaaaaaaaaaaaaaaaaaaaaaaaaaaaaaaaaaaaaaaaaaaaaaaaaaaaaaaaaaaaaaaaaaaaaaaaaaaaaaaaaaaaaaaaaaaaaaa

SEQ ID NO: 36927 - RNA, 1748 nt, Artificial Sequence
  mRNA product Design a-1 (hSL-A100) comprising derived and/or modified sequence from LASV(G733-SLE-2010;Clade IV)__AIT17154__GPCmut10 (opt5)
aggagagucccgcagucggcguccagcggcucugcuuguucgugugugugucguugcaggccuuauucaagcuuaccaugggccagaucgugaccuucuuucaagaggucccccacguuauugaagaggugaugaacaucgugcugauugcccucagcauccuggcuguccuuaaggggcuguacaauuucgccacaugcggaauugugggccucguuuccuuucugcuucugugugggagaucuugcacgaccagccucuauaaaggaguguacgaacugcagacacuggagcucaacauggaaacccugaauauguguaugccucuuuccugcacaaagaacaauucucaucacuauaucauggucggcaacgagaccgggcuggagcucacacugaccaauacgagcaucauuaaccauaaauucuguaaucuuuccgacgcgcacaagaaaaaccuguacgaucaugcucucaugucuaucauuagcaccuuucaccuguccaucccgaauuucaaccaguaugaagccaugagcugcgacuuuaauggaggcaagauuucugugcaguacaaccugucccacagcuaugccggcgaugcugccaaucauugugggacaaucgcuaacggaguucuccaaaccuucaugcggauggccuggggcgggucuuacauugcgcuggacuccggacgcgauagaugggacugcaucaugacaagcuaccaguaucuuaucauucagaacaccacgugggaggaucacugucaguuuucucggcccuccccuaucggcuaccuggggcuccugagccaacgcacaagagacauuuauaucucccggcgccuucugggaaccuucacauggacccucucugauagcgaaggcaaggacacccccggcggguacugccugacaagauggaugcugauugaggccgagcucaaauguuuuggaaauacggcuguggccaagugcaacgaaaaacaugaugaggaguucugcgacaugcugcggcuuuuugauuucuguaagcaggcuauccagcgccugaaagccgaagcgcagauguccauccaacucauuaauaaggccgucaacgcucugaucaaugaccagcuuauuaugaagaaccaccugagagacaucaugggcauuccuuauugcaauuacagcaaauauugguaccucaaccacaccacaaccgggaagacaucucugcccaaauguuggcugguguccaauggaagcuaccucaacgaaacccauuucucugaugacaucgagcagcaagccgauaauaugaucacggagaugcugcagaaggaauauauggagcggcagggcaaaacaccucuugggcugguggaccucuuugucuucagcaccuccuuuuaccugauuucuaucuuccugcaccuuguuaagauuccgacccaucgccacguggugggaaaaagcugccccaagccucauagacucaaccacaugggcaucuguuccugcggccuguaugggcagcccggagucccugugaaguggaaacggugaggacuagucccuguucccagagcccacuuuuuuuucuuuuuuugaaauaaaauagccugucuuucagaucucaaaggcucuuuucagagccaccaaaaaaaaaaaaaaaaaaaaaaaaaaaaaaaaaaaaaaaaaaaaaaaaaaaaaaaaaaaaaaaaaaaaaaaaaaaaaaaaaaaaaaaaaaaaaaaaaaaaa

SEQ ID NO: 36928 - RNA, 1748 nt, Artificial Sequence
  mRNA product Design a-1 (hSL-A100) comprising derived and/or modified sequence from MOPV/LASV reassortant(IGS-1;Clade IV)__AFY05576__GPCmut10 (opt5)
aggagagucccgcagucggcguccagcggcucugcuuguucgugugugugucguugcaggccuuauucaagcuuaccaugggccagaucgugaccuucuuucaagaggucccccacguuauugaagaggugaugaacaucgugcugauugcccucagcguccuggcugugcuuaaggggcuguacaauuucgccacaugcggacucguuggccuggugacguuucuucugcucugugggagauccugcaccacaucucuguauaaaggagucuacgaacugcagacccucgagcugaacauggaaacacuuaauauguguaugccucugagcugcaccaagaacaauucccaucacuauaucauggugggcaacgagacagggcucgagcugacccuuacgaauaccucuauuaucaaccauaaauucuguaaucugagcgacgcgcacaagaaaaaccucuacgaucaugcucugauguccaucauuucuacauuucaccugagcaucccgaauuucaaccaguaugaagccauguccugcgacuuuaauggaggcaagauuagcguucaguacaaccucucucacuccuaugccggcgaugcugccaaucauugugggaccguggcuaacggaguccugcaaacauucaugcggauggccuggggcgggagcuacaucgcgcuugacucuggacgcggcaacugggauugcauuaugaccuccuaccaguaucugaucauucagaauacgacaugggaggaccacugucaguuuagcagacccucuccuaucggguaccucggacugcuuucccaacggacccgcgauaucuauauuagcagacggcugcucggcacauucaccuggacccuguccgacucugaaggcgaggauacacccgggggauacugccugacgcgcuggaugcucaucgaggccgaacugaaguguuuuggcaacaccgcuguggccaaaugcaaugagaagcaugacgaagaguucugcgauaugcuuagacuguuugacuucuguaaacaggcuauucagcggcucaaggccgaagcgcagaugagcauccaacugauuaacaaagccgugaaugcucuuaucaacgaucagcugaucaugaagaaucaccuccgcgacauuauggggaucccuuauugcaacuacuccaaguauugguaccugaaucacacaaccacaggaagaaccagccugcccaaauguuggcucgucucuaacggcuccuaccugaaugagacgcauuucagcgacgauauugagcagcaagccgacaacaugaucacagaaaugcuucagaaggaguauauggaacggcaggggaaaaccccucugggacucguugaucuguuuguguucucuaccagcuuuuaccugauuuccaucuuccuucaccucgugaagaucccgacacaucgccacauugucggcaaaucuugccccaagccucauagacugaaucacaugggcaucuguagcugcgggcuguauaaacagcccggagugccuguuaaguggaagcggugaggacuagucccuguucccagagcccacuuuuuuuucuuuuuuugaaauaaaauagccugucuuucagaucucaaaggcucuuuucagagccaccaaaaaaaaaaaaaaaaaaaaaaaaaaaaaaaaaaaaaaaaaaaaaaaaaaaaaaaaaaaaaaaaaaaaaaaaaaaaaaaaaaaaaaaaaaaaaaaaaaaaa

SEQ ID NO: 36929 - RNA, 1748 nt, Artificial Sequence
  mRNA product Design a-1 (hSL-A100) comprising derived and/or modified sequence from LASV(LM765-SLE-2012;Clade IV)__AIT17814__GPCmut10 (opt5)
aggagagucccgcagucggcguccagcggcucugcuuguucgugugugugucguugcaggccuuauucaagcuuaccaugggccagaucgugaccuucuuucaagaggucccccacguuauugaagaggugaugaacaucgugcugauugcccucagcauccuggcuguccuuaaggggcuguacaauuucgccacaugcggacucgugggccugguuacguuucuucugcucugugggagauccugcaccacaucucuguauaaaggaguguacgaacugcagacccucgagcugaacauggaaacacuuaauauguguaugccucugagcugcaccaagaacaauucccaucacuauauuauggucggcaacgagacagggcucgagcugacccuuacgaauaccucuaucaucgaccauaaauucuguaaccugagcgaugcgcaccggaagaaucucuacgaccaugcucugauguccauuaucucuacauuucaccugagcauuccgaacuucaaucaguaugaagccauguccugcgauuuuaacggaggcaaaaucagcgugcaguacaaucucucucacuccuaugccaaggacgcugccgaucauuguggcaccguugcuaacggggugcugcaaacauucaugcgcauggccuggggaggcagcuacauugcgcuugacucugggagaggacggugggauugcaucaugaccuccuaccaguaucugauuauccagaauacgacaugggaggaccacugucaguuuagccgccccucuccuaucggcuaccucgggcugcuuucccaaagaacccgggauauuuauaucagccgcagacugcucggaacauucaccuggacccuguccgacucugaaggcaaggauacacccggcggguacugccugacgcgguggaugcucauugaggccgagcugaaauguuuuggaaacaccgcugucgccaagugcaacgaaaaacaugacgaggaguucugcgauaugcuucgccuguuugacuucuguaagcaggcuauccagagacucaaagccgaagcgcagaugagcauucaacugaucaauaaggccgugaacgcucuuaucaaugaccagcugauuaugaagaaccaccuccgggauaucaugggcauuccuuauugcaauuacuccaaauauugguaccugaaccacacaaccacagggaagaccagccugcccaaauguuggcucgugucuaauggauccuaccugaacgaaacgcauuucagcgacgauaucgagcagcaagccgacaauaugauuacagagaugcuucagaaggaauauauggagcgccagggcaaaaccccucuggggcucgucgaucuguuuguuuucucuaccagcuuuuaccugaucuccaucuuccuucaccucgugaagauuccgacacauagacacaucgugggaaaacccugcccuaagccccaucggcugaaccacaugggcauuuguucuugcggccuguauaagcagccugggguccccgugaaauggaagcgcugaggacuagucccuguucccagagcccacuuuuuuuucuuuuuuugaaauaaaauagccugucuuucagaucucaaaggcucuuuucagagccaccaaaaaaaaaaaaaaaaaaaaaaaaaaaaaaaaaaaaaaaaaaaaaaaaaaaaaaaaaaaaaaaaaaaaaaaaaaaaaaaaaaaaaaaaaaaaaaaaaaaaa

SEQ ID NO: 36930 - RNA, 1748 nt, Artificial Sequence
  mRNA product Design a-1 (hSL-A100) comprising derived and/or modified sequence from LASV(LM776-SLE-2012;Clade IV)__AIT17824__GPCmut10 (opt5)
aggagagucccgcagucggcguccagcggcucugcuuguucgugugugugucguugcaggccuuauucaagcuuaccaugggccagaucgugaccuucuuucaagaggucccccacguuauugaagaggugaugaacaucgugcugauugcccucagcauccuggcuguccuuaaggggcuguacaauuucgccacaugcggacucgugggccugguuacguuucuucugcucugugggagauccugcaccacaucuguguauaaaggagucuacgaacugcagacccuggagcucaacauggaaacacugaauauguguaugccucuuagcugcaccaagaacaauucccaucacuauauuauggugggcaacgagacagggcuggagcucacccugacgaauaccucuaucaucaaccauaaauucuguaaucuuagcgacgcgcacaagaaaaaccuguacgaucaugcucucauguccauuaucucuacauuucaccugagcauuccgaauuucaaccaguaugaagccauguccugcgacuuuaauggaggcaagaucagcguucaguacaaccugucucacuccuaugccggcgaugcugccaaucauugugggaccguggcuaacggaguccuccaaacauucaugcggauggccuggggcgggagcuacauugcgcuggacucuggacacggcaagugggauugcaucaugaccuccuaccaguaucuuauuauccagaacacgacaugggaggaccauugucaguuuagccgccccucuccuaucggguaccugggacuccugucccaaagaacccgggauauuuauaucagccgcagacuucugggcacauucaccuggacccucuccgacucugaaggcaaagauacacccgggggauacugccugacgcgguggaugcugauugaggccgagcucaaguguuuuggcaauaccgcuguggccaaaugcaacgaaaagcacgacgaggaguucugcgauaugcugcgccuuuuugacuucuguaaacaggcuauccagagacugaaggccgaagcgcagaugagcauucaacucaucaauaaggccgugaacgcucugaucaaugaucagcuuauuaugaaaaaccaucugcgggacaucauggggauuccuuauugcaauuacuccaaguauugguaccucaaccacacaaccacaggaaaaaccagccugcccaaguguuggcuggucucuaauggcuccuaccucaacgaaacgcacuucagcgacgauaucgagcagcaagccgacaauaugauuacagagaugcugcagaaagaauauauggagcgccaggggaagaccccucuuggacugguugaucucuuuguguucucuaccagcuuuuaccugaucuccaucuuccugcaucuugugaaaauuccgacacacagacauaucgucggcaagucuugccccaagccucaccggcucaaccacaugggcauuuguagcugcgggcuguauaaacagcccggagugccuguucgcuggaagagaugaggacuagucccuguucccagagcccacuuuuuuuucuuuuuuugaaauaaaauagccugucuuucagaucucaaaggcucuuuucagagccaccaaaaaaaaaaaaaaaaaaaaaaaaaaaaaaaaaaaaaaaaaaaaaaaaaaaaaaaaaaaaaaaaaaaaaaaaaaaaaaaaaaaaaaaaaaaaaaaaaaaaa

SEQ ID NO: 36931 - RNA, 1748 nt, Artificial Sequence
  mRNA product Design a-1 (hSL-A100) comprising derived and/or modified sequence from LASV(Mad39;Clade IV)__ANH09722__GPCmut10 (opt5)
aggagagucccgcagucggcguccagcggcucugcuuguucgugugugugucguugcaggccuuauucaagcuuaccaugggccagaucgugaccuucuuucaagaggucccccacguuauugaagaggugaugaacaucgugcugauugcccucagcauccuggcuguccuuaaggggcuguacaauguggccacaugcggacucauuggccugguuacguuccuucugcucugugggagauccugcaccacaacccuguauaaaggaguguacgaacugcaggcgcucgagcugaacauggaaacacuuaauauguguaugccucugucuugcaccaagaacaauagccaucacuauauccgggucggcaacgagacagggcucgagcugacccuuacgaauaccucccugaucaaccauaaauuuuguaaucucucugacgcucacaagaaaaaccuguacgaucaugcccugaugagcauuaucuccacauuccaccucucuauuccgaauuuuaaccaguaugaagccaugagcugcgacuucaaugauggaaagaucuccgugcaguacaaccugagccacaccuaugcuggcgacacagccaaucauuguggcaccguugcuaacggggugcuucaaacguuuaugcgcauggccuggggaggcucuuacauugcgcuggauuccgggagaggaggcugggacugcaucaugacaagcuaccaguaucucauuauccagaacaccacaugggaggaucacugucaguucucucggcccuccccuaucggguaccugggacuucugagccaacgcaccagagacauuuauaucucucggcgccuccugggcaccuuuacauggacgcuguccgauagcgaaggcaaggacacccccgggggauacugccucacaagauggaugcugauugaggccgagcuuaaauguuucggcaauaccgcugucgccaagugcaacgaaaaacaugaugaggaauuuugcgacaugcugcgccucuucgauuuuuguaagcaggcuauccagcggcugaaagccgaggcgcagauguccauucaacuuaucaauaaggccgugaacgcucugaucaaugaccagcucauuaugaagaaccaccugagagacaucauggggauuccuuauugcaauuacucuaaauauugguaccugaaccacacagugaccggaaagacgagccuccccaaauguuggcuggucuccaauggcagcuaccuuaacgaaacacauuucucugaugacaucgagcagcaagccgauaauaugauuaccgagaugcugcagaaggaauauauggagcggcaggggaaaaccccucucggacugguugaccuguucguguuuuccaccagcuucuaccuuaucucuaucuuucuccaccuggugaagauuccgacacaucgccacgucgugggcaaacccugcccuaagccccauagacugaaccacaugggcaucuguagcugcggguucuauaagcagccuggaguucccgugcgguggaaacgcugaggacuagucccuguucccagagcccacuuuuuuuucuuuuuuugaaauaaaauagccugucuuucagaucucaaaggcucuuuucagagccaccaaaaaaaaaaaaaaaaaaaaaaaaaaaaaaaaaaaaaaaaaaaaaaaaaaaaaaaaaaaaaaaaaaaaaaaaaaaaaaaaaaaaaaaaaaaaaaaaaaaaa

SEQ ID NO: 36932 - RNA, 1748 nt, Artificial Sequence
  mRNA product Design a-1 (hSL-A100) comprising derived and/or modified sequence from LASV(Z0947-SLE-2011;Clade IV)__AIT17840__GPCmut10 (opt5)
aggagagucccgcagucggcguccagcggcucugcuuguucgugugugugucguugcaggccuuauucaagcuuaccaugggccagaucgugaccuucuuucaagaggucccccacguuauugaagaggugaugaacaucgugcugauugcccucagcauccuggcuguccuuaaggggcuguacaauuucgccacaugcggacucgugggccugguuacguuucuucugcucugugggagauccugcaccauuucucuguauaaaggaguguacgaacugcagacacucgagcugaacauggaaacccuuaauauguguaugccucugagcugcacaaagaacaauucccaucacuauaucauggucggcaacgagaccgggcucgagcugacacuuaccaauacgucuaucauuaaccauaaauucuguaaucugagcgacgcgcacaagaaaaaccucuacgaucaugcucugauguccaucauuucuaccuuucaccugagcaucccgaauuucaaccaguaugaagccauguccugcgacuuuaauggaggcaagauuagcgugcaguacaaccucucucacuccuaugccggcgaugcugccaaucauugugggacaguugcuaacggagugcugcaaaccuucaugcggauggccuggggcgggagcuacaucgcgcuugacucuggacgcgauagaugggacugcauuaugacauccuaccaguaucugaucauccagaacaccacgugggaggaucacugucaguuuagccggcccucuccuauuggcuaccucgggcugcuuucccaacgcacaagagacaucuauauuagccggcgccugcucggaaccuucacauggacccuguccgauucugaaggcaaggacacccccggcggguacugccugacaagauggaugcucaucgaggccgagcugaaauguuuuggaaauacggcugucgccaagugcaacgaaaaacaugaugaggaguucugcgacaugcuucggcuguuugauuucuguaagcaggcuauucagcgccucaaagccgaagcgcagaugagcauccaacugaucaauaaggccgugaacgcucuuauuaaugaccagcugaucaugaagaaccaccucagagacauuaugggcaucccuuauugcaauuacuccaaauauugguaccugaaccacaccacaaccgggaagacaagccugcccaaauguuggcucgugucuaauggauccuaccugaacgaaacccauuucagcgaugacauugagcagcaagccgauaauaugaucacggagaugcuucagaaggaauauauggagcggcagggcaaaacaccucuggggcucgucgaccuguuuguuuucucuaccagcuuuuaccugaucuccauuuuccuucaccucgugaagaucccgacccaucgccacauugugggaaaacccugcccuaagccccauagacugaaccacaugggcaucuguucuugcggccuguauaagcagccugggguccccgugaaauggaagcggugaggacuagucccuguucccagagcccacuuuuuuuucuuuuuuugaaauaaaauagccugucuuucagaucucaaaggcucuuuucagagccaccaaaaaaaaaaaaaaaaaaaaaaaaaaaaaaaaaaaaaaaaaaaaaaaaaaaaaaaaaaaaaaaaaaaaaaaaaaaaaaaaaaaaaaaaaaaaaaaaaaaaa

SEQ ID NO: 36933 - RNA, 1724 nt, Artificial Sequence
  mRNA product Design a-1 (A100) comprising derived and/or modified sequence from LASV(Josiah;Clade IV)__NP_694870__GPCmut10 (opt1)
aggagagucccgcagucggcguccagcggcucugcuuguucgugugugugucguugcaggccuuauucaagcuuaccaugggccagaucgugaccuucuuccaggaggucccccacgugaucgaggaggugaugaacaucguccugaucgcccucagcgugcuggccgugcugaaggggcucuacaacuucgcgaccugcggccuggucgggcuggugacguuccuccugcugugcggccgcuccugcaccaccagccucuacaaggggguguacgagcugcagacccuggagcucaacauggagacgcugaacaugugcaugccgcuguccugcaccaagaacaacagccaccacuacaucauggucggcaacgagaccggccucgagcugacgcugaccaacaccuccaucaucaaccacaaguucugcaaccucagcgacgcccacaagaagaaccuguacgaccacgcccugauguccaucaucagcaccuuccaccucuccauccccaacuucaaccaguacgaggccaugagcugcgacuucaacgggggcaagaucuccgugcaguacaaccugagccacuccuacgccggggacgcggccaaccacugcggcacgguggccaacgggguccugcagaccuucaugcggauggccuggggcggcagcuacaucgcgcucgacuccgggcgcggcaacugggacugcaucaugaccagcuaccaguaccugaucauccagaacaccacgugggaggaccacugccaguucucccggcccagccccaucggguaccugggccuccugucccagcgcacccgggacaucuacaucagccgccggcugcucggcaccuucaccuggacgcugagcgacuccgaggggaaggacaccccgggcggguacugccugacccgcuggaugcucaucgaggccgagcugaagugcuucggcaacaccgccguggccaagugcaacgagaagcacgacgaggaguucugcgacaugcugcggcuguucgacuucugcaagcaggccauccagcgccugaaggcggaggcccagaugagcauccagcugaucaacaaggccgugaacgcccucaucaacgaccagcugaucaugaagaaccaccuccgggacaucauggggauccccuacugcaacuacuccaaguacugguaccucaaccacacgaccaccggccgcaccagccugcccaagugcuggcuggucuccaacggcagcuaccucaacgagacgcacuucuccgacgacaucgagcagcaggccgacaacaugaucaccgagaugcugcagaaggaguacauggagcggcaggggaagacgccccugggccucguggaccuguucguguucagcaccuccuucuaccugaucagcaucuuccugcaccucgucaagaucccgacccaccgccacaucguggggaaguccugccccaagccccaccggcugaaccacaugggcaucugcagcugcgggcuguacaagcagcccggcgugccggucaaguggaagcgcugaggacuagucccuguucccagagcccacuuuuuuuucuuuuuuugaaauaaaauagccugucuuucagaucuaaaaaaaaaaaaaaaaaaaaaaaaaaaaaaaaaaaaaaaaaaaaaaaaaaaaaaaaaaaaaaaaaaaaaaaaaaaaaaaaaaaaaaaaaaaaaaaaaaaa

SEQ ID NO: 36934 - RNA, 1721 nt, Artificial Sequence
  mRNA product Design a-1 (A100) comprising derived and/or modified sequence from LASV(LP;Clade I)__AAF86701__GPCmut10 (opt1)
aggagagucccgcagucggcguccagcggcucugcuuguucgugugugugucguugcaggccuuauucaagcuuaccaugggccagaucaucaccuucuuccaggaggugccccacgucaucgaggaggugaugaacaucgugcugaucgcccucagccugcuggccauccucaaggggcuguacaacaucgcgaccugcggcaucaucgggcuggucgccuuccucuuccugugcggcaaguccugcagccugacgcucaagggcggguacgagcugcagacccuggagcucaacauggagacccugaacaugugcaugccgcuguccugcacgaagaacagcucccaccacuacauccgcgugggcaacgagaccgggcucgagcugacccugaccaacacgagcaucaucaaccacaaguucugcaaccucuccgacgcccacaagaagaaccuguacgaccacgcccugaugagcaucaucuccaccuuccaccucagcauccccaacuucaaccaguacgaggccauguccugcgacuucaacggcgggaagaucagcgugcaguacaaccugucccacagcuacgcgggcgacgccgccgagcacugcgggaccgucgccaacggcgugcugcagaccuucaugcggauggcguggggcgggcgcuacaucgcccucgacuccggcaaggggaacugggacugcaucaugacgagcuaccaguaccugaucauccagaacaccaccugggaggaccacugccaguucucccggcccagccccaucggcuaccugggccuccugucccagcgcacccgggacaucuacaucagccgccggcugcucgggacguucaccuggacccugagcgacuccgagggcaacgagacccccgggggcuacugccugacgcgcuggaugcucaucgaggccgagcugaagugcuucgggaacaccgccguggccaagugcaacgagaagcacgacgaggaguucugcgacaugcugcggcuguucgacuucugcaagcaggcgauccgccggcugaaggccgaggcccagaugagcauccagcugaucaacaaggccgucaacgcccucaucaacgaccagcugaucaugaagaaccaccuccgcgacaucaugggcauccccuacugcaacuacuccaaguacugguaccucaaccacaccagcuccggccggaccagccugcccaagugcuggcugaucuccaacgggagcuaccucaacgagacgcaguucuccgacgacaucgagcagcaggcggacaacaugaucaccgagaugcugcagaaggaguacaucgagcgccagggcaagaccccgcuggggcucguggacaucuucaucuucagcaccuccuucuaccugaucagcaucuuccugcaccugaucaagaucccgacgcaccggcacaucgugggcaagcccugccccaagccccaccgccucaaccacaugggggucugcuccugcggccuguacaagcacccgggcgugcccaccaaguggaagcggugaggacuagucccuguucccagagcccacuuuuuuuucuuuuuuugaaauaaaauagccugucuuucagaucuaaaaaaaaaaaaaaaaaaaaaaaaaaaaaaaaaaaaaaaaaaaaaaaaaaaaaaaaaaaaaaaaaaaaaaaaaaaaaaaaaaaaaaaaaaaaaaaaaaaa

SEQ ID NO: 36935 - RNA, 1721 nt, Artificial Sequence
  mRNA product Design a-1 (A100) comprising derived and/or modified sequence from LASV(803213;Clade II)__AAF86703__GPCmut10 (opt1)
aggagagucccgcagucggcguccagcggcucugcuuguucgugugugugucguugcaggccuuauucaagcuuaccaugggccagaucaucaccuucuuccaggaggugccccacgucaucgaggaggugaugaacaucgugcugaucgcccucagccugcuggccauccucaaggggaucuacaacgucgcgaccugcggccuguucgggcugaucuccuuccuccugcugugcggccgcagcugcuccgugacguacaaggggguguacgagcuccagacccuggagcugaacauggccaaccucaacaugugcaugccgcugagcugcaccaagaacaacucccaccacuacaucauggucggcaacgagacgggccuggagcucacccugaccaacaccagcaucaucaaccacaaguucugcaaccuguccgacgcccacaagaagaaccucuacgaccacgcccugaugagcaucaucuccacguuccaccugagcauccccaacuucaaccaguacgaggccauguccugcgacuucaacgggggcaagaucagcgugcaguacaaccucucccacagcuucgcgguggacgccgccaaccacugcgggaccaucgccaacggcguccugcagaccuucaugcggauggcguggggcggguccuacaucgcccuggacagcggcaaggggaacugggacugcaucaugaccuccuaccaguaccucaucauccagaacacgaccugggaggaccacugccaguucagccgccccucccccaucggcuaccuggggcugcucagccagcggacccgcgacaucuacaucagccggcgccugcugggcaccuucacguggacccucuccgacagcgagggcaacgaggcccccgggggcuacugccugacccgguggaugcugaucgaggccgagcucaagugcuucgggaacaccgccguggcgaagugcaacgagaagcacgacgaggaguucugcgacaugcugcgccuguucgacuucugcaagcaggccaucaagcggcucaagacggaggcccagauguccauccagcugaucaacaaggccgugaacgcccugaucaacgaccagcucaucaugaagaaccaccuccgcgacaucaugggcauccccuacugcaacuacagccgguacugguaccugaaccacaccgucaccgggaagaccucccugccccgcugcuggcuggugagcaacggcuccuaccugaacgagacgcacuucagcgacgacaucgagcagcaggcggacaacaugaucaccgagaugcuccagaaggaguacauggaccggcagggcaagaccccgcuggggcugguggaccucuucgucuucuccaccagcuucuaccugaucuccaucuuccugcaccuggugaagaucccgacgcaccgccacaucgugggcaagcccugccccaagccccaccggcucaaccacauggggaucugcagcugcggccuguacaagcacccggggguccccgugaaguggaagcgcugaggacuagucccuguucccagagcccacuuuuuuuucuuuuuuugaaauaaaauagccugucuuucagaucuaaaaaaaaaaaaaaaaaaaaaaaaaaaaaaaaaaaaaaaaaaaaaaaaaaaaaaaaaaaaaaaaaaaaaaaaaaaaaaaaaaaaaaaaaaaaaaaaaaaa

SEQ ID NO: 36936 - RNA, 1721 nt, Artificial Sequence
  mRNA product Design a-1 (A100) comprising derived and/or modified sequence from LASV(GA391;Clade III)__CAA36645__GPCmut10 (opt1)
aggagagucccgcagucggcguccagcggcucugcuuguucgugugugugucguugcaggccuuauucaagcuuaccaugggccagaucgugaccuucuuccaggaggucccccacgugaucgaggaggugaugaacaucguccugaucgcccucagcauccuggccauccugaaggggcucuacaacguggcgaccugcggccugaucgggcuggugacguuccuccugcuguccggccgcagcugcucccucaucuacaaggggaccuacgagcugcagacccuggagcucaacauggagacccugaacaugugcaugccgcugagcugcaccaagaacaacucccaccacuacauccgggucggcaacgagaccggccucgagcugacccugacgaacaccagcauccucaaccacaaguucugcaaccuguccgacgcccacaagcgcaaccuguacgaccacagccucauguccaucaucagcaccuuccaccuguccauccccaacuucaaccaguacgaggccaugagcugcgacuucaacgggggcaagaucaccgugcaguacaaccugucccacagcuucgccguggacgccgcggggcacugcggcacgcucgccaacgggguccugcagaccuucaugcggauggccuggggcggcuccuacaucgcccuggacagcgggcgcggcaacugggacugcaucaugaccuccuaccaguaccucaucauccagaacaccacgugggacgaccacugccaguucagccggcccucccccaucggguaccugggccugcucagccagcgcacccgggacaucuacaucagccgccggcugcugggcaccuucaccuggacgcucuccgacagcgaggggaacgagaccccgggcggguacugccugacccgcuggaugcugaucgaggcggagcucaagugcuucggcaacaccgccguggccaagugcaacgagaagcacgacgaggaguucugcgacaugcugcggcuguucgacuucugcaagcaggccauccgccggcucaagacggaggcccagauguccauccagcugaucaacaaggcggugaacgcccugaucaacgaccagcucaucaugaagaaccaccuccgcgacaucauggggauccccuacugcaacuacagccgguacugguaccugaaccacaccuccaccggcaagaccagccugccccgcugcuggcugaucuccaacggcagcuaccugaacgagacgaaguucuccgacgacaucgagcagcaggccgacaacaugaucaccgagaugcuccagaaggaguacaucgaccggcaggggaagacgccccugggccuggucgaccuguucguguucagcaccuccuucuaccucaucagcaucuuccugcaccuggugaagaucccgacccaccgccacaucgucgggaagcccugccccaagccccaccggcucaaccacaugggcaucugcuccugcgggcuguacaagcagccgggcgugcccgugcgcuggaagcggugaggacuagucccuguucccagagcccacuuuuuuuucuuuuuuugaaauaaaauagccugucuuucagaucuaaaaaaaaaaaaaaaaaaaaaaaaaaaaaaaaaaaaaaaaaaaaaaaaaaaaaaaaaaaaaaaaaaaaaaaaaaaaaaaaaaaaaaaaaaaaaaaaaaaa

SEQ ID NO: 36937 - RNA, 1724 nt, Artificial Sequence
  mRNA product Design a-1 (A100) comprising derived and/or modified sequence from LASV(AV;Clade V)__CCA30314__GPCmut10 (opt1)
aggagagucccgcagucggcguccagcggcucugcuuguucgugugugugucguugcaggccuuauucaagcuuaccaugggccagaucgugaccuucuuccaggaggucccccacgugaucgaggaggugaugaacaucguccugaucgcccucagcauccuggccgugcugaaggggcucuacaacaucgcgaccugcggccugaucgggcugaucacguuccuccugcugugcggccgcuccugcagcuccaaccucuacaaggggguguacgagcugcagagccuggaccucaacauggagacccugaacaugugcaugccgcuguccugcaccaagaacaacagccaccacuacauccgggucggcaacgacacgggccucgagcugacccugaccaacaccuccauccucaaccacaaguucugcaaccugagcgacgcccacaagaaggaccuguacgaccacgcccucauguccaucaucagcacguuccaccuguccauccccaacuucaaccaguacgaggccaugagcugcgacuucaacgggggcaagaucuccgugcaguacaaccugagccacuccuacgccaucgacgcggccaaccacugcgggaccguggccaacggcauccuccagaccuucaugcgcauggccuggggcgggagcuacaucgcgcuggacuccggccgggggaacugggacugcaucaugaccagcuaccaguaccugaucauccagaacacgaccugggagaaccacugccaguucucccgccccagccccaucggcuaccucgggcugcugagccagcggacccgcgacaucuacaucucccggcgccuccugggcaccuucacguggacccugagcgacuccgagggcaacgccacccccgggggcuacugccucacccgguggaugcugaucgaggccgagcugaagugcuucgggaacacggccgucgccaagugcaacgagaagcacgacgaggaguucugcgacaugcuccgccuguucgacuucugcaagcaggcgaucagccggcugaaguccgaggcccagaugagcauccagcucaucaacaaggccgugaacgcccugaucaacgaccagcugaucaugaagaaccaccuccgcgacaucaugggcauccccuacugcaacuacuccaaguacugguaccugaaccacaccaucaccgggaagaccagccugcccaagugcuggcucguguccaacggcagcuaccugaacgagacgcacuucuccgacgacaucgagcagcaggccgacaacaugaucaccgagaugcugcagaaggaguacauggagcggcagggcaagaccccgcucgggcuggucgaccuguucguguucagcaccuccuucuaccugaucagcaucuuccuccgccuggugaagaucccgacgcaccggcacaucgucggcaagcccugccccaagccccaccgccugaaccacauggggaucugcuccugcggccucuacaagcagccgggggugcccgugcgguggaagcgcugaggacuagucccuguucccagagcccacuuuuuuuucuuuuuuugaaauaaaauagccugucuuucagaucuaaaaaaaaaaaaaaaaaaaaaaaaaaaaaaaaaaaaaaaaaaaaaaaaaaaaaaaaaaaaaaaaaaaaaaaaaaaaaaaaaaaaaaaaaaaaaaaaaaaa

SEQ ID NO: 36938 - RNA, 1721 nt, Artificial Sequence
  mRNA product Design a-1 (A100) comprising derived and/or modified sequence from LASV(Togo/2016/7082;Clade VI)__AMR44577__GPCmut10 (opt1)
aggagagucccgcagucggcguccagcggcucugcuuguucgugugugugucguugcaggccuuauucaagcuuaccaugggccagaucaucaccuucuuccaggaggugccccacgucaucgaggaggugaugaacaucgugcugaucgcccucagccugcuggccauccucaagggggucuacaacguggcgaccugcggcaucaucgggcuggugacguuccuguuccucugcggccgcuccugcagccugaucuacaagggguccuacgagcugcagacccucgagcugaacauggagacccugaacaugugcaugccgcucagcugcacgaagaacuccagccaccacuacauccgggucggcaacgagaccggccuggagcugacccucaccaacacguccaucaucaaccacaaguucugcaaccugagcgacgcccacaagcgcaaccuguacgaccacgcccucauguccauccugagcaccuuccaccuguccauccccaacuucaaccaguacgaggccaugagcugcgacuucaacgggggcaagaucuccgugcaguacaaccucagccacgccuacgcgguggacgccgccgagcacugcgggaccgucgccaacggcgugcugcagaccuucaugcggauggcguggggcggguccuacaucgcccuggacagcggccgcgggaacugggacugcaucaugacguccuaccaguaccucaucauccagaacaccaccugggaggaccacugccaguucagccggcccucccccaucggcuaccuggggcugcucagccagcgcacccgggacaucuacaucagccgccggcugcugggcacguucaccuggacccucuccgacagcgagggcaacgagacccccgggggcuacugccugacgcgcuggaugcugaucgaggccgagcucaagugcuucgggaacaccgccguggccaagugcaacgagaagcacgacgaggaguucugcgacaugcugcggcuguucgacuucugcaagcaggcgauccagcgccucaaguccgaggcccagaugagcauccagcugaucaacaaggccgucaacgcccugaucaacgaccagcucaucaugaagaaccaccuccgggacaugaugggcauccccuacugcaacuacuccaaguacugguaccugaaccacaccagcuccgggcgcaccagccugcccaagugcuggcugguguccaacggcagcuaccugaacgagacgcacuucuccgacgacaucgagcagcaggccgacaacaugaucaccgagaugcuccagaaggaguacaucgaccggcagggcaagaccccgcuggggcugguggaccucuucgucuucagcaccuccuucuaccugaucagcaucuuccugcaccugaucaagaucccgacgcaccgccacaucgugggcaagcccugccccaagccccaccggcucaaccacauggggaucugcuccugcggccuguacaagcagccgggggugcccacccgcuggaagcggugaggacuagucccuguucccagagcccacuuuuuuuucuuuuuuugaaauaaaauagccugucuuucagaucuaaaaaaaaaaaaaaaaaaaaaaaaaaaaaaaaaaaaaaaaaaaaaaaaaaaaaaaaaaaaaaaaaaaaaaaaaaaaaaaaaaaaaaaaaaaaaaaaaaaa

SEQ ID NO: 36939 - RNA, 1721 nt, Artificial Sequence
  mRNA product Design a-1 (A100) comprising derived and/or modified sequence from LASV(KAK-428;Clade n.d. (VII))__ANH09740__GPCmut10 (opt1)
aggagagucccgcagucggcguccagcggcucugcuuguucgugugugugucguugcaggccuuauucaagcuuaccaugggccagaucgugaccuucuuccaggaggucccccacgugaucgaggaggugaugaacaucguccugaucgcccucagccugcuggccauccucaaggggcuguacaacuucgcgaccugcggcgugaucgggcugaucacguuccuccugcugugcggccgcuccugcagcgccaccuacaaggggcaguacgagcuccagacccuggagcugaacauggagucccucaacaugugcaugccgcugagcugcacgaagaacaacucccaccacuacauccgggccggcaacaacaccggccuggagcucacccugaccaacacgagcaucaucucccacaaguucugcaaccugagcgacgcccacaagaagaaccucuacgaccacacccugauguccaucaucaccaccuuccaccugagcauccccaacuucaaccaguacgaggccauguccugcgacuucaacgggggcaagaucagcauccaguacaaccucucccacagcuacgcgggggacgccgcccagcacugcggcacgguggccaacgggguccugcagaccuucaugcgcauggcguggggcggcuccuaccuggcccucgacagcgggcggcgcggcugggacugcaucaucuccagcuaccaguaccugaucauccagaacaccaccugggacgaccacugccaguucucccggcccagccccaucggguaccugggcuucgugagccagaagacgcgcgacaucuacaucucccggcgccuccugggcaccuucaccuggacccugagcgacuccgaggggcacgacaugccgggcggguacugccucacgcgguggaugcugaucgaggccgaccugaagugcuucggcaacaccgccguggccaagugcaacgagaagcacgacgaggaguucugcgacauguggcgccucuucgacuucugcaagcaggcgauccagcggcugaaggccgaggcccagaugaacauccagcugaucaacaaggccgucaacgcccucaucaacgaccagcugaugaugaagaaccaccuccgcgacaucauggggauccccuacugcaacuacagcaaguucugguaccugaacaacaccaccacgggccggaccucccugccccgcugcuggcugaucagcaacggcuccuaccucaacgagacccacuucagcgacgacaucgagcagcaggcggacaacaugaucaccgagaugcugcagaaggaguacauggaccggcaggggaagacgccccugggccucguggaccuguucguguucuccaccagcuucuaccugaucaccaucuuccuccaccuggucaagaucccgacccaccgccacaucguggggaagcccugccccaagccccaccggcugaaccacaugggcaucugcuccugcgggcuguacaagcagccgggcgugcccguccgcuggaagcggugaggacuagucccuguucccagagcccacuuuuuuuucuuuuuuugaaauaaaauagccugucuuucagaucuaaaaaaaaaaaaaaaaaaaaaaaaaaaaaaaaaaaaaaaaaaaaaaaaaaaaaaaaaaaaaaaaaaaaaaaaaaaaaaaaaaaaaaaaaaaaaaaaaaaa

SEQ ID NO: 36940 - RNA, 1721 nt, Artificial Sequence; identical to SEQ ID NO: 36934
  mRNA product Design a-1 (A100) comprising derived and/or modified sequence from LASV(Pinneo-NIG-1969;Clade I)__AIT17836__GPCmut10 (opt1)

SEQ ID NO: 36941 - RNA, 1721 nt, Artificial Sequence
  mRNA product Design a-1 (A100) comprising derived and/or modified sequence from LASV(ISTH0009-NIG-2011;Clade II)__AIT17404__GPCmut10 (opt1)
aggagagucccgcagucggcguccagcggcucugcuuguucgugugugugucguugcaggccuuauucaagcuuaccaugggccagaucaucaccuucuuccaggaggugccccacgucaucgaggaggugaugaacaucgugcugaucgcccucagccugcuggccauccucaaggggaucuacaacgucgcgaccugcggccuguucgggcugguguccuuccuccugcugugcggccgcagcugcuccacgaccuacaaggggguguacgagcuccagacccuggagcuggacauggccagccucaacaugugcaugccgcuguccugcacgaagaacaacagccaccacuacaucauggucggcaacgagaccggccuggagcucacccugaccaacacguccaucaucaaccacaaguucugcaaccugagcgacgcccacaagaagaaccucuacgaccacgcccugauguccaucaucagcaccuuccaccuguccauccccaacuucaaccaguacgaggccaugagcugcgacuucaacgggggcaagaucuccgugcaguacaaccucagccacgcguacgccguggacgccgccaaccacugcgggaccaucgcgaacggcguccugcagaccuucaugcggauggccuggggcggguccuacaucgcccuggacagcggcaagggguccugggacugcaucaugacgagcuaccaguaccucaucauccagaacaccaccugggaggaccacugccaguucucccgccccagccccaucggcuaccuggggcugcucagccagcggacccgcgacaucuacaucucccggcgccugcugggcacguucaccuggacccucagcgacuccgagggcaacgagacccccgggggcuacugccugacgcgguggaugcugaucgaggccgagcucaagugcuucgggaacaccgccguggcgaagugcaacgagaagcacgacgaggaguucugcgacaugcugcgccuguucgacuucugcaagcaggccauccggcgccucaagaccgaggcccagaugagcauccagcugaucaacaaggccgugaacgcccugaucaacgaccagcucaucaugaagaaccaccuccgggacaucaugggcaucccguacugcaacuacuccaaguacugguaccugaaccacaccgucacggggaagaccagccugccccgcugcuggcugguguccaacggcagcuaccugaacgagacccacuucuccgacgacaucgagcagcaggcggacaacaugaucaccgagcuccugcagaaggaguacauggaccggcagggcaagacgccccuggggcucguggaccuguucgucuucagcaccuccuucuaccugaucagcaucuuccugcaccucaucaagaucccgacccaccgccacaucaccggcaagcccugccccaagccccaccggcugaaccacauggggaucugcuccugcggccuguacaagcacccgggggugcccgugaaguggaagcgcugaggacuagucccuguucccagagcccacuuuuuuuucuuuuuuugaaauaaaauagccugucuuucagaucuaaaaaaaaaaaaaaaaaaaaaaaaaaaaaaaaaaaaaaaaaaaaaaaaaaaaaaaaaaaaaaaaaaaaaaaaaaaaaaaaaaaaaaaaaaaaaaaaaaaa

SEQ ID NO: 36942 - RNA, 1721 nt, Artificial Sequence
  mRNA product Design a-1 (A100) comprising derived and/or modified sequence from LASV(ISTH2010-NIG-2012;Clade II)__AIT17482__GPCmut10 (opt1)
aggagagucccgcagucggcguccagcggcucugcuuguucgugugugugucguugcaggccuuauucaagcuuaccaugggccagaucaucaccuucuuccaggaggugccccacgucaucgaggaggugaugaacaucgugcugaucgcccucagccugcuggccauccucaaggggaucuacaacgucgcgaccugcggccuguucgggcugguguccuuccuccugcugugcggccgcagcugcuccacgaccuacaaggggguguacgagcuccagacccuggagcuggacauggccagccucaacaugugcaugccgcuguccugcacgaagaacaacagccaccacuacaucauggucggcaacgagaccggccuggagcucacccugaccaacacguccaucaucaaccacaaguucugcaaccugagcgacgcccacaagaagaaccucuacgaccacgcccugauguccaucaucagcaccuuccaccuguccauccccaacuucaaccaguacgaggccaugagcugcgacuucaacgggggcaagaucuccgugcaguacaaccucagccacgcguacgccguggacgccgccaaccacugcgggaccaucgcgaacggcguccugcagaccuucaugcggauggccuggggcggguccuacaucgcccuggacagcggcaagggguccugggacugcaucaugacgagcuaccaguaccucaucauccagaacaucaccugggaggaccacugccaguucucccgccccagccccaucggcuaccuggggcugcucagccagcggacccgcgacaucuacaucucccggcgccugcugggcaccuucacguggacccucagcgacuccgagggcaacgagacccccgggggcuacugccugacccgguggaugcugaucgaggccgagcucaagugcuucgggaacacggccguggcgaagugcaacgagaagcacgacgaggaguucugcgacaugcugcgccuguucgacuucugcaagcaggccauccggcgccucaagaccgaggcccagaugagcauccagcugaucaacaaggccgugaacgcccugaucaacgaccagcucaucaugaagaaccaccuccgggacaucaugggcauccccuacugcaacuacuccaaguacugguaccugaaccacaccgucaccgggaagacgagccugccccgcugcuggcugguguccaacggcagcuaccugaacgagacccacuucuccgacgacaucgagcagcaggcggacaacaugaucaccgagcuccugcagaaggaguacaucgaccggcagggcaagaccccgcuggggcucguggaccuguucgucuucagcacguccuucuaccugaucagcaucuuccugcaccucgugaagaucccgacccaccgccacguggucggcaagcccugccccaagccccaccggcugaaccacauggggaucugcuccugcggccuguacaagcacccgggggugcccgugaaguggaagcgcugaggacuagucccuguucccagagcccacuuuuuuuucuuuuuuugaaauaaaauagccugucuuucagaucuaaaaaaaaaaaaaaaaaaaaaaaaaaaaaaaaaaaaaaaaaaaaaaaaaaaaaaaaaaaaaaaaaaaaaaaaaaaaaaaaaaaaaaaaaaaaaaaaaaaa

SEQ ID NO: 36943 - RNA, 1721 nt, Artificial Sequence
  mRNA product Design a-1 (A100) comprising derived and/or modified sequence from LASV(Lassa virus/H.sapiens-wt/NGA/2015/ISTH_0543;Clade II)__AVO03639__GPCmut10 (opt1)
aggagagucccgcagucggcguccagcggcucugcuuguucgugugugugucguugcaggccuuauucaagcuuaccaugggccagaucaucaccuucuuccaggaggugccccacgucaucgaggaggugaugaacaucgugcugaucgcccucagccugcuggccauccucaaggggaucuacaacgucgcgaccugcggccuguucgggcugguguccuuccuccugcugugcggccgcagcugcuccacgaccuacaaggggguguacgagcuccagacccuggagcuggacauggccaaccucaacaugugcaugccgcugagcugcacgaagaacaacucccaccacuacaucauggucggcaacgagaccggccuggagcucacccugaccaacacgagcaucaucaaccacaaguucugcaaccuguccgacgcccacaagaagaaccucuacgaccacgcccugaugagcaucaucuccaccuuccaccugagcauccccaacuucaaccaguacgaggccauguccugcgacuucaacgggggcaagaucagcgugcaguacaaccucucccacaccuacgcgguggacgccgccaaccacugcgggaccaucgccaacggcguccugcagacguucaugcggauggcguggggcgggagcuacaucgcccuggacuccggcaaggggagcugggacugcaucaugaccuccuaccaguaccucgugauccagaacaccaccugggaggaccacugccaguucagccgccccucccccaucggcuaccuggggcugcucagccagcggacgcgcgacaucuacaucagccggcgccugcugggcaccuucaccuggacccucuccgacagcgagggcaacgagacgcccgggggcuacugccugacccgguggaugcugaucgaggccgagcucaagugcuucgggaacaccgccguggccaagugcaacgagaagcacgacgaggaguucugcgacaugcugcgccuguucgacuucugcaagcaggcgauccggcgccucaagaccgaggcccagauguccauccagcugaucaacaaggccgucaacgcccugaucaacgaccagcucaucaugaagaaccaccuccgggacaucaugggcauccccuacugcaacuacagcaaguacugguaccugaaccacacggugaccgggaagaccucccugccccgcugcuggcuggugagcaacggcuccuaccugaacgagacccacuucagcgacgacaucgagcagcaggccgacaacaugaucacggagcuccugcagaaggaguacaucgaccggcagggcaagaccccgcuggggcucgucgaccuguucguguucuccaccagcuucuaccugaucuccaucuuccugcaccucgugaagaucccgacccaccgccacaucacgggcaagcccugccccaagccccaccggcugaaccacauggggaucugcagcugcggccuguacaagcacccggggguccccgugaaguggaagcgcugaggacuagucccuguucccagagcccacuuuuuuuucuuuuuuugaaauaaaauagccugucuuucagaucuaaaaaaaaaaaaaaaaaaaaaaaaaaaaaaaaaaaaaaaaaaaaaaaaaaaaaaaaaaaaaaaaaaaaaaaaaaaaaaaaaaaaaaaaaaaaaaaaaaaa

SEQ ID NO: 36944 - RNA, 1721 nt, Artificial Sequence
  mRNA product Design a-1 (A100) comprising derived and/or modified sequence from LASV(Lassa virus/H.sapiens-wt/NGA/2016/ISTH_0009;Clade II)__AVO03571__GPCmut10 (opt1)
aggagagucccgcagucggcguccagcggcucugcuuguucgugugugugucguugcaggccuuauucaagcuuaccaugggccagaucaucaccuucuuccaggaggugccccacgucaucgaggaggugaugaacaucgugcugaucgcccucagccugcuggccauccucaaggggaucuacaacgucgcgaccugcggccugcuggggcucguguccuuccugcugcucugcggccgcagcugcuccacgaccuacaaggggguguacgagcugcagacccuggagcucgacauggccagccugaacaugugcaugccgcuguccugcacgaagaacaacagccaccacuacaucauggucggcaacgagaccggccucgagcugacccugaccaacacguccaucaucaaccacaaguucugcaaccucagcgacgcccacaagaagaaccuguacgaccacgcccugauguccaucaucagcaccuuccaccucuccauccccaacuucaaccaguacgaggccaugagcugcgacuucaacgggggccggaucuccgugcaguacaaccugagccacuccuacgcgguggacgccgccaaccacugcgggaccaucgccaacggcguccugcagaccuucaugcgcauggcguggggcgggagcuacaucgcccucgacuccggcaaggggagcugggacugcaucaugacguccuaccaguaccugaucauccagaacaccaccugggaggaccacugccaguucagccggcccagccccaucggcuaccuggggcuccugucccagcgcacccgggacaucuacaucagccgccggcugcucggcacguucaccuggacccuguccgacagcgagggcaacgagacccccgggggcuacugccugacgcgcuggaugcucaucgaggccgagcugaagugcuucgggaacaccgccguggccaagugcaacgagaagcacgacgaggaguucugcgacaugcugcggcuguucgacuucugcaagcaggcgauccgccggcugaagaccgaggcccagauguccauccagcugaucaacaaggccgugaacgcccucaucaacgaccagcugaucaugaagaaccaccuccgcgacaucaugggcaucccguacugcaacuacagcaaguacugguaccucaaccacaccgucacggggaagaccucccugccccggugcuggcuggugagcaacggcuccuaccucaacgagacccacuucagcgacgacaucgagcagcaggccgacaacaugaucaccgagcugcugcagaaggaguacaucgaccgccagggcaagacgccccucgggcugguggaccuguucgucuucuccaccagcuucuaccugaucuccaucuuccuccaccuggugaagaucccgacccaccggcacaucaccggcaagcccugccccaagccccaccgccugaaccacauggggaucugcagcugcggccucuacaaccacccgggggugcccgucaaguggaagcggugaggacuagucccuguucccagagcccacuuuuuuuucuuuuuuugaaauaaaauagccugucuuucagaucuaaaaaaaaaaaaaaaaaaaaaaaaaaaaaaaaaaaaaaaaaaaaaaaaaaaaaaaaaaaaaaaaaaaaaaaaaaaaaaaaaaaaaaaaaaaaaaaaaaaa

SEQ ID NO: 36945 - RNA, 1721 nt, Artificial Sequence
  mRNA product Design a-1 (A100) comprising derived and/or modified sequence from LASV(Lassa virus/H.sapiens-wt/NGA/2016/ISTH_0017;Clade II)__AVO03567__GPCmut10 (opt1)
aggagagucccgcagucggcguccagcggcucugcuuguucgugugugugucguugcaggccuuauucaagcuuaccaugggccagaucaucaccuucuuccaggaggugccccacgucaucgaggaggugaugaacaucgugcugaucgcccucagccugcuggccauccucaaggggaucuacaacgucgcgaccugcggccuguucgggcugguguccuuccuccugcugugcggccgcagcugcuccacgaccuacaaggggguguacgagcuccagacccuggagcuggacauggccagccucaacaugugcaugccgcuguccugcacgaagaacaacagccaccacuacaucauggucggcaacgagaccggccuggagcucacccugaccaacacguccaucaucaaccacaaguucugcaaccugagcgacgcccacaagaagaaccucuacgaccacgcccugauguccaucaucagcaccuuccaccuguccauccccaacuucaaccaguacgaggccaugagcugcgacuucaacgggggcaagaucuccgugcaguacaaccucagccacaccuacgcgaucgacgccgccaaccacugcgggaccaucgccaacggcgugcugcagacguucaugcggauggcguggggcggguccuacaucgcccuggacagcggcaagggguccugggacugcaucaugaccagcuaccaguaccucaucauccagaacaccaccugggaggaccacugccaguucucccgccccagccccaucggcuaccuggggcugcucagccagcggacgcgcgacaucuacaucucccggcgccugcugggcaccuucaccuggacccucagcgacuccgagggcaacgagacgcccgggggcuacugccugacccgguggaugcugaucgaggccgagcucaagugcuucgggaacaccgccgucgccaagugcaacgagaagcacgacgaggaguucugcgacaugcugcgccuguucgacuucugcaagcaggcgauccggcgccucaagaccgaggcccagaugagcauccagcugaucaacaaggccgugaacgcccugaucaacgaccagcucaucaugaagaaccaccuccgggacaucaugggcauccccuacugcaacuacuccaaguacugguaccugaaccacacggugaccgggaagaccagccugccccgcugcuggcuggucuccaacggcagcuaccugaacgagacccacuucuccgacgacaucgagcagcaggccgacaacaugaucacggagcuccugcagaaggaguacauggaccggcagggcaagaccccgcuggggcucguggaccuguucguguucagcaccuccuucuaccugaucagcaucuuccugcaccucguccgcaucccgacccaccggcacgugaucggcaagcccugccccaagccccaccgccugaaccacauggggaucugcuccugcggccuguacaagcacccgggggugcccgucaaguggaagcggugaggacuagucccuguucccagagcccacuuuuuuuucuuuuuuugaaauaaaauagccugucuuucagaucuaaaaaaaaaaaaaaaaaaaaaaaaaaaaaaaaaaaaaaaaaaaaaaaaaaaaaaaaaaaaaaaaaaaaaaaaaaaaaaaaaaaaaaaaaaaaaaaaaaaa

SEQ ID NO: 36946 - RNA, 1721 nt, Artificial Sequence
  mRNA product Design a-1 (A100) comprising derived and/or modified sequence from LASV(Lassa virus/H.sapiens-wt/NGA/2018/ISTH_0959;Clade II)__AVV65099__GPCmut10 (opt1)
aggagagucccgcagucggcguccagcggcucugcuuguucgugugugugucguugcaggccuuauucaagcuuaccaugggccagaucaucaccuucuuccaggaggugccccacgucaucgaggaggugaugaacaucgugcugaucgcccucagccugcuggccauccucaaggggaucuacaacgucgugaccugcggccuguucgggcugguguccuuccuccugcugugcggccgcagcugcuccacgaccuacaagggggucuacgagcuccagacccuggagcuggacauggcgagccucaacaugugcaugccgcuguccugcacgaagaacaacagccaccacuacaucauggugggcaacgagaccggccuggagcucacccugaccaacacguccaucaucaaccacaaguucugcaaccugagcgacgcccacaagaagaaccucuacgaccacgcccugauguccaucaucagcaccuuccaccuguccauccccaacuucaaccaguacgaggccaugagcugcgacuucaacgggggcaagaucuccgugcaguacaaccucagccacgccuacgcgaucgacgccgccaaccacugcgggaccaucgccaacggcguccugcagaccuucaugcggauggcguggggcggguccuacaucgcccuggacagcggcaagggguccugggacugcaucaugacgagcuaccaguaccucaucauccagaacaccaccugggaggaccacugccaguucucccgccccagccccaucggcuaccuggggcugcucagccagcggacccgcgacaucuacaucucccggcgccugcugggcacguucaccuggacccucagcgacuccgagggcaacgagacccccgggggcuacugccugacgcgguggaugcugaucgaggccgagcucaagugcuucgggaacaccgccguggccaagugcaacgagaagcacgacgaggaguucugcgacaugcugcgccuguucgacuucugcaagcaggcgauccggcgccucaagaccgaggcccagaugagcauccagcugaucaacaaggccgugaacgcccugaucaacgaccagcucaucaugaagaaccaccuccgggacaucaugggcaucccguacugcaacuacuccaaguacugguaccugaaccacaccgucacggggaagaccagccugccccgcugcuggcugguguccaacggcagcuaccugaacgagacccacuucuccgacgacaucgagcagcaggccgacaacaugaucaccgagcuccugcagaaggaguacaucgaccggcagggcaagacgccccuggggcucguggaccuguucgucuucagcaccuccuucuaccugaucagcaucuuccugcaccucgugaagaucccgacccaccgccacgugaucggcaagcccugccccaagccccaccggcugaaccacauggggaucugcuccugcggccuguacaagcacccggggguccccgugaaguggaagcgcugaggacuagucccuguucccagagcccacuuuuuuuucuuuuuuugaaauaaaauagccugucuuucagaucuaaaaaaaaaaaaaaaaaaaaaaaaaaaaaaaaaaaaaaaaaaaaaaaaaaaaaaaaaaaaaaaaaaaaaaaaaaaaaaaaaaaaaaaaaaaaaaaaaaaa

SEQ ID NO: 36947 - RNA, 1721 nt, Artificial Sequence
  mRNA product Design a-1 (A100) comprising derived and/or modified sequence from LASV(LASV003-NIG-2008;Clade II)__AIT17580__GPCmut10 (opt1)
aggagagucccgcagucggcguccagcggcucugcuuguucgugugugugucguugcaggccuuauucaagcuuaccaugggccagaucaucaccuucuuccaggaggugccccacgucaucgaggaggugaugaacaucgugcugaucgcccucagccugcuggccauccucaaggggaucuacaacgucgcgaccugcggccuguucgggcugguguccuuccuccugcugugcggccgcagcugcuccacgaccuacaaggggguguacgagcuccagacccuggagcuggacauggccagccucaacaugugcaugccgcuguccugcacgaagaacaacagccaccacuacaucauggucggcaacgagaccggccuggagcucacccugaccaacacguccaucaucaaccacaaguucugcaaccugagcgacgcccacaagaagaaccucuacgaccacgcccugauguccaucaucagcaccuuccaccuguccauccccaacuucaaccaguacgaggccaugagcugcgacuucaacgggggcaagaucuccgugcaguacaaccucagccacaccuacgcgguggacgccgccaaccacugcgggaccaucgccaacggcguccugcagacguucaugcggauggcguggggcggguccuacaucgcccuggacagcggcaagggguccugggacugcaucaugaccagcuaccaguaccucaucauccagaacaccaccugggaggaccacugccaguucucccgccccagccccaucggcuaccuggggcugcucagccagcggacgcgcgacaucuacaucucccggcgccugcugggcaccuucaccuggacccucagcgacuccgagagcaacgagacgccgggcggguacugccugacccgguggaugcugaucgaggccgagcucaagugcuucggcaacaccgccguggccaagugcaacgagaagcacgacgaggaguucugcgacaugcugcgccuguucgacuucugcaagcaggcgauccggcgccucaaggccgaggcccagauguccauccagcugaucaacaaggccgugaacgcccugaucaacgaccagcucaucaugaagaaccaccuccgggacaucauggggauccccuacugcaacuacagcaaguacugguaccugaaccacaccgucacgggccgcaccucccugccccggugcuggcuggugagcaacggguccuaccugaacgagacccacuucagcgacgacaucgagcagcaggcggacaacaugaucaccgagcuccugcagaaggaguacauggaccgccagggcaagacgccccugggccucguggaccuguucgucuucuccaccagcuucuaccugaucuccaucuuccugcaccucgugaagaucccgacccaccggcacgugaucgggaagcccugccccaagccccaccgccugaaccacaugggcaucugcagcugcgggcuguacaagcacccgggcguccccgugaaguggaagcggugaggacuagucccuguucccagagcccacuuuuuuuucuuuuuuugaaauaaaauagccugucuuucagaucuaaaaaaaaaaaaaaaaaaaaaaaaaaaaaaaaaaaaaaaaaaaaaaaaaaaaaaaaaaaaaaaaaaaaaaaaaaaaaaaaaaaaaaaaaaaaaaaaaaaa

SEQ ID NO: 36948 - RNA, 1721 nt, Artificial Sequence
  mRNA product Design a-1 (A100) comprising derived and/or modified sequence from LASV(LASV035-NIG-2009;Clade II)__AIT17588__GPCmut10 (opt1)
aggagagucccgcagucggcguccagcggcucugcuuguucgugugugugucguugcaggccuuauucaagcuuaccaugggccagaucaucaccuucuuccaggaggugccccacgucaucgaggaggugaugaacaucgugcugaucgcccucagccugcuggccauccucaaggggaucuacaacgucgcgaccugcggccuguucgggcugguguccuuccuccugcugugcggccgcagcugcuccacgaccuacaaggggguguacgagcuccagacccuggagcuggacauggccagccucaacaugugcaugccgcuguccugcacgaagaacaacagccaccacuacaucauggucggcaacgagaccggccuggagcucacccugaccaacacguccaucaucaaccacaaguucugcaaccugagcgacgcccacaagaagaaccucuacgaccacgcccugauguccaucaucagcaccuuccaccuguccauccccaacuucaaccaguacgaggccaugagcugcgacuucaacgggggcaagaucuccgugcaguacaaccucagccacgcguacgccguggacgccgccaaccacugcgggaccaucgcgaacggcguccugcagaccuucaugcggauggccuggggcggguccuacaucgcccuggacagcggcaagggguccugggacugcaucaugacgagcuaccaguaccucaucauccagaacaccaccugggaggaccacugccaguucucccgccccagccccaucggcuaccuggggcugcucagccagcggacccgcgacaucuacaucucccggcgccugcugggcacguucaccuggacccucagcgacuccgagggcaacgagacccccgggggcuacugccugacgcgguggaugcugaucgaggccgagcucaagugcuucgggaacaccgccguggcgaagugcaacgagaagcacgacgaggaguucugcgacaugcugcgccuguucgacuucugcaagcaggccauccggcgccucaaggccgaggcccagaugagcauccagcugaucaacaaggccgugaacgcgcugaucaacgaccagcucaucaugaagaaccaccuccgggacaucaugggcauccccuacugcaacuacuccaaguacugguaccugaaccacaccgucaccgggaagacgagccugccccgcugcuggcugguguccaacggcagcuaccugaacgagacccacuucuccgacgacaucgagcagcaggccgacaacaugaucaccgagcuccugcagaaggaguacaucgaccggcagggcaagaccccgcuggggcucguggaccuguucgucuucagcacguccuucuaccugaucagcaucuuccugcaccucgugaagaucccgacccaccgccacgugaucggcaagcccugccccaagccccaccggcugaaccacauggggaucugcuccugcggccuguacaagcacccggggguccccgugaaguggaagcgcugaggacuagucccuguucccagagcccacuuuuuuuucuuuuuuugaaauaaaauagccugucuuucagaucuaaaaaaaaaaaaaaaaaaaaaaaaaaaaaaaaaaaaaaaaaaaaaaaaaaaaaaaaaaaaaaaaaaaaaaaaaaaaaaaaaaaaaaaaaaaaaaaaaaaa

SEQ ID NO: 36949 - RNA, 1721 nt, Artificial Sequence
  mRNA product Design a-1 (A100) comprising derived and/or modified sequence from LASV(LASV1000-NIG-2009;Clade II)__AIT17782__GPCmut10 (opt1)
aggagagucccgcagucggcguccagcggcucugcuuguucgugugugugucguugcaggccuuauucaagcuuaccaugggccagaucaucaccuucuuccaggaggugccccacgucaucgaggaggugaugaacaucgugcugaucgcccucagccugcuggccauccucaaggggaucuacaacgucgcgaccugcggccuguucgggcugguguccuuccuccugcugugcggccgcagcugcuccacgaccuacaaggggguguacgagcuccagacccuggagcuggacauggccagccucaacaugugcaugccgcuguccugcacgaagaacaacagccaccacuacaucauggucggcaacgagaccggccuggagcucacccugaccaacacguccaucaucaaccacaaguucugcaaccugagcgacgcccacaagaagaaccucuacgaccacgcccugauguccaucaucagcaccuuccaccuguccauccccaacuucaaccaguacgaggccaugagcugcgacuucaacgggggcaagaucuccgugcaguacaaccucagccacaccuacgcgguggacgccgccaaccacugcgggaccaucgccaacggcguccugcagacguucaugcggauggcguggggcggguccuacaucgcccuggacagcggcaagggguccugggacugcaucaugaccagcuaccaguaccucaucauccagaacaccaccugggaggaccacugccaguucucccgccccagccccaucggcuaccuggggcugcucagccagcggacgcgcgacaucuacaucucccggcgccugcugggcaccuucaccuggacccucagcgacuccgagggcaacgagacgcccgggggcuacugccugacccgguggaugcugaucgaggccgagcucaagugcuucgggaacaccgccguggccaagugcaacgagaagcacgacgaggaguucugcgacaugcugcgccuguucgacuucugcaagcaggcgaucaagcggcucaagaccgaggcccagaugagcauccagcugaucaacaaggccgugaacgcccugaucaacgaccagcucaucaugaagaaccaccuccgcgacaucaugggcauccccuacugcaacuacuccaaguacugguaccugaaccacacggucaccgggaagaccagccugccccggugcuggcugguguccaacggcagcuaccugaacgagacccacuucuccgacgacaucgagcagcaggccgacaacaugaucacggagcuccugcagaaggaguacaucgaccgccagggcaagaccccgcuggggcucguggaccuguucgucuucagcaccuccuucuaccugaucagcaucuuccugcaccucgugaagaucccgacccaccggcacguggucggcaagcccugccccaagccccaccgccugaaccacauggggaucugcuccugcggccuguacaagcacccgggggugcccgugaaguggaagcggugaggacuagucccuguucccagagcccacuuuuuuuucuuuuuuugaaauaaaauagccugucuuucagaucuaaaaaaaaaaaaaaaaaaaaaaaaaaaaaaaaaaaaaaaaaaaaaaaaaaaaaaaaaaaaaaaaaaaaaaaaaaaaaaaaaaaaaaaaaaaaaaaaaaaa

SEQ ID NO: 36950 - RNA, 1721 nt, Artificial Sequence
  mRNA product Design a-1 (A100) comprising derived and/or modified sequence from LASV(LASV221-NIG-2010;Clade II)__AIT17624__GPCmut10 (opt1)
aggagagucccgcagucggcguccagcggcucugcuuguucgugugugugucguugcaggccuuauucaagcuuaccaugggccagaucaucaccuucuuccaggaggugccccacgucaucgaggaggugaugaacaucgugcugaucgcccucagccugcuggccauccucaaggggaucuacaacgucgcgaccugcggccuguucgggcugguguccuuccuccugcugugcggccgcagcugcuccacgaccuacaaggggguguacgagcuccagacccuggagcuggacauggccagccucaacaugugcaugccgcuguccugcacgaagaacaacagccaccacuacaucauggucggcaacgagaccggccuggagcucacccugaccaacacguccaucaucaaccacaaguucugcaaccugagcgacgcccacaagaagaaccucuacgaccacgcccugauguccaucaucagcaccuuccaccuguccauccccaacuucaaccaguacgaggccaugagcugcgacuucaacgggggcaagaucuccgugcaguacaaccucagccacaccuacgcgaucgacgccgccaaccacugcgggaccaucgccaacggcgugcugcagacguucaugcggauggcguggggcggguccuacaucgcccuggacagcggcaagggguccugggacugcaucaugaccagcuaccaguaccucaucauccagaacaccaccugggaggaccacugccaguucucccgccccagccccaucggcuaccuggggcugcucagccagcggacgcgcgacaucuacaucucccggcgccugcugggcaccuucaccuggacccucagcgacuccgagggcaacgagacgcccgggggcuacugccugacccgguggaugcugaucgaggccgagcucaagugcuucgggaacaccgccgucgccaagugcaacgagaagcacgacgaggaguucugcgacaugcugcgccuguucgacuucugcaagcaggcgauccggcgccucaagaccgaggcccagaugagcauccagcugaucaacaaggccgugaacgcccugaucaacgaccagcucaucaugaagaaccaccuccgggacaucaugggcauccccuacugcaacuacuccaaguacugguaccugaaccacacggugaccgggaagaccagccugccccgcugcuggcuggucuccaacggcagcuaccugaacgagacccacuucuccgacgacaucgagcagcaggccgacaacaugaucacggagaugcuccagaaggaguacauggaccggcagggcaagaccccgcuggggcugguggaccucuucguguucagcaccuccuucuaccugaucagcaucuuccugcaccuggucaagaucccgacccaccgccacgugaucggcaagcccugccccaagccccaccggcucaaccacauggggaucugcuccugcggccuguacaagcacccgggggugcccgucaaguggaagcgcugaggacuagucccuguucccagagcccacuuuuuuuucuuuuuuugaaauaaaauagccugucuuucagaucuaaaaaaaaaaaaaaaaaaaaaaaaaaaaaaaaaaaaaaaaaaaaaaaaaaaaaaaaaaaaaaaaaaaaaaaaaaaaaaaaaaaaaaaaaaaaaaaaaaaa

SEQ ID NO: 36951 - RNA, 1721 nt, Artificial Sequence
  mRNA product Design a-1 (A100) comprising derived and/or modified sequence from LASV(LASV237-NIG-2010;Clade II)__AIT17638__GPCmut10 (opt1)
aggagagucccgcagucggcguccagcggcucugcuuguucgugugugugucguugcaggccuuauucaagcuuaccaugggccagaucaucaccuucuuccaggaggugccccacgucaucgaggaggugaugaacaucgugcugaucgcccucagccugcuggccauccucaaggggaucuacaacgucgcgaccugcggccuguucgggcugguguccuuccuccugcugugcggccgcagcugcuccacgaccuacaaggggguguacgagcuccagacccuggagcuggacauggccagccucaacaugugcaugccgcuguccugcacgaagaacaacagccaccacuacaucauggucggcaacgagaccggccuggagcucacccugaccaacacguccaucaucaaccacaaguucugcaaccugagcgacgcccacaagaaggaccucuacgaccacgcccugauguccaucaucagcaccuuccaccuguccauccccaacuucaaccaguacgaggccaugagcugcgacuucaacgggggcaagaucuccgugcaguacaaccucagccacaccuacgcgguggacgccgccaaccacugcgggaccaucgccaacggcguccugcagacguucaugcggauggcguggggcggguccuacaucgcccuggacagcggcaagggguccugggacugcaucaugaccagcuaccaguaccucaucauccagaacaccaccugggaggaccacugccaguucucccgccccagccccaucggcuaccuggggcugcucagccagcggacgcgcgacaucuacaucucccggcgccugcugggcaccuucaccuggacccucagcgacuccgagggcaacgagacgcccgggggcuacugccugacccgguggaugcugaucgaggccgagcucaagugcuucgggaacaccgccguggccaagugcaacgagaagcacgacgaggaguucugcgacaugcugcgccuguucgacuucugcaagcaggcgauccggcgccucaagaccgaggcccagaugagcauccagcugaucaacaaggccgugaacgcccugaucaacgaccagcucaucaugaagaaccaccuccgggacaucaugggcauccccuacugcaacuacuccaaguacugguaccugaaccacacggucaccgggaagaccagccugccccgcugcuggcugguguccaacggcagcuaccugaacgagacccacuucuccgacgacaucgagcagcaggccgacaacaugaucacggagcuccugcagaaggaguacauggaccggcagggcaagaccccgcuggggcucguggaccuguucgucuucagcaccuccuucuaccugaucagcaucuuccugcaccucaucaagaucccgacccaccgccacaucacgggcaagcccugccccaagccccaccggcugaaccacauggggaucugcuccugcggccuguacaagcacccgggggugcccgugaaguggaagcgcugaggacuagucccuguucccagagcccacuuuuuuuucuuuuuuugaaauaaaauagccugucuuucagaucuaaaaaaaaaaaaaaaaaaaaaaaaaaaaaaaaaaaaaaaaaaaaaaaaaaaaaaaaaaaaaaaaaaaaaaaaaaaaaaaaaaaaaaaaaaaaaaaaaaaa

SEQ ID NO: 36952 - RNA, 1721 nt, Artificial Sequence
  mRNA product Design a-1 (A100) comprising derived and/or modified sequence from LASV(LASV253-NIG-2011;Clade II)__AIT17670__GPCmut10 (opt1)
aggagagucccgcagucggcguccagcggcucugcuuguucgugugugugucguugcaggccuuauucaagcuuaccaugggccagaucaucaccuucuuccaggaggugccccacgucaucgaggaggugaugaacaucgugcugaucgcccucagccugcuggccauccucaaggggaucuacaacgucgcgaccugcggccuguucgggcugguguccuuccuccugcugugcggccgcagcugcuccacgaccuacaaggggguguacgagcuccagacccuggagcuggacauggccagccucaacaugugcaugccgcuguccugcacgaagaacaacagccaccacuacaucauggucggcaacgagaccggccuggagcucacccugaccaacacguccaucaucaaccacaaguucugcaaccugagcgacgcccacaagaagaaccucuacgaccacgcccugauguccaucaucagcaccuuccaccuguccauccccaacuucaaccaguacgaggccaugagcugcgacuucaacgggggcaagaucuccgugcaguacaaccucagccacaccuacgcgguggacgccgccaaccacugcgggaccaucgccaacggcguccugcagacguucaugcggauggcguggggcggguccuacaucgcccuggacagcggcaagggguccugggacugcaucaugaccagcuaccaguaccucaucauccagaacaccaccugggaggaccacugccaguucucccgccccagccccaucggcuaccuggggcugcucagccagcggacgcgcgacaucuacaucucccggcgccugcugggcaccuucaccuggacccucagcgacuccgagggcaacgagacgcccgggggcuacugccugacccgguggaugcugaucgaggccgagcucaagugcuucgggaacaccgccguggccaagugcaacgagaagcacgacgaggaguucugcgacaugcugcgccuguucgacuucugcaagcaggcgauccggcgccucaaggccgaggcccagaugagcauccagcugaucaacaaggccgugaacgcccugaucaacgaccagcucaucaugaagaaccaccuccgggacaucaugggcaucccguacugcaacuacuccaaguacugguaccugaaccacaccgucacggggcgcaccagccugccccggugcuggcugguguccaacggcagcuaccugaacgagacccacuucuccgacgacaucgagcagcaggcggacaacaugaucaccgagcuccugcagaaggaguacaucgaccgccagggcaagacgccccuggggcucguggaccuguucgucuucagcaccuccuucuaccugaucagcaucuuccugcaccucgugaagaucccgacccaccggcacaucaucggcaagcccugccccaagccccaccgccugaaccacauggggaucugcuccugcggccuguacaagcacccgggggugcccgucaaguggaagcggugaggacuagucccuguucccagagcccacuuuuuuuucuuuuuuugaaauaaaauagccugucuuucagaucuaaaaaaaaaaaaaaaaaaaaaaaaaaaaaaaaaaaaaaaaaaaaaaaaaaaaaaaaaaaaaaaaaaaaaaaaaaaaaaaaaaaaaaaaaaaaaaaaaaaa

SEQ ID NO: 36953 - RNA, 1721 nt, Artificial Sequence
  mRNA product Design a-1 (A100) comprising derived and/or modified sequence from LASV(LASV254-NIG-2011;Clade II)__AIT17674__GPCmut10 (opt1)
aggagagucccgcagucggcguccagcggcucugcuuguucgugugugugucguugcaggccuuauucaagcuuaccaugggccagaucaucaccuucuuccaggaggugccccacgucaucgaggaggugaugaacaucgugcugaucgcccucagccugcuggccauccucaaggggaucuacaacgucgcgaccugcggccuguucgggcugguguccuuccuccugcugugcggccgcagcugcuccacgaccuacaaggggguguacgagcuccagacccuggagcuggacaugaccaaccucaacaugugcaugccgcugagcugcaccaagaacaacucccaccacuacaucauggucggcaacgagaccggccuggagcucacccugacgaacaccagcaucaucaaccacaaguucugcaaccuguccgacgcccacaagaagaaccucuacaaccacgcccugaugagcaucaucuccaccuuccaccugagcauccccaacuucaaccaguacgaggccauguccugcgacuucaacgggggcaagaucagcgugcaguacaaccucucccacagcuacgccguggacgcggccaaccacugcgggaccaucgccaacggcguccugcagacguucaugcggauggccuggggcggguccuacaucgcgcuggacagcggcaaggggaacugggacugcaucaugaccuccuaccaguaccucaucauccagaacaccaccugggaggaccacugccaguucagccgccccucccccaucggcuaccuggggcugcucagccagcggacgcgcgacaucuacaucagccggcgccugcugggcaccuucaccuggacccucuccgacagcgagggcaacgagacgcccgggggcuacugccugacccgguggaugcugaucgaggccgagcucaagugcuucgggaacaccgccguggccaagugcaacgagaagcacgacgaggaguucugcgacaugcugcgccuguucgacuucugcaagcaggccauccggcgccucaagaccgaggcgcaggccaacauccagcugaucaacaaggccgugaacgcccugaucaacgaccagcucaucaugaagaaccaccuccgggacaucaugggcauccccuacugcaacuacuccaaguacugguaccugaaccacacggucaccgggaagaccagccugccccgcugcuggcugguguccaacggcagcuaccugaacgagacccacuucuccgacgacaucgagcagcaggccgacaacaugaucacggagcuccugcagaaggaguacauggaccggcagggcaagaccccgcuggggcucguggaccuguucgucuucagcaccuccuucuaccugaucagcaucuuccugcaccucgugaagaucccgacccaccgccacgugaucggcaagcccugccccaagccccaccggcugaaccacauggggaucugcuccugcggccuguacaagcacccggggguccccgugaaguggaagcgcugaggacuagucccuguucccagagcccacuuuuuuuucuuuuuuugaaauaaaauagccugucuuucagaucuaaaaaaaaaaaaaaaaaaaaaaaaaaaaaaaaaaaaaaaaaaaaaaaaaaaaaaaaaaaaaaaaaaaaaaaaaaaaaaaaaaaaaaaaaaaaaaaaaaaa

SEQ ID NO: 36954 - RNA, 1721 nt, Artificial Sequence
  mRNA product Design a-1 (A100) comprising derived and/or modified sequence from LASV(Nig08-A19;Clade III)__ADU56618__GPCmut10 (opt1)
aggagagucccgcagucggcguccagcggcucugcuuguucgugugugugucguugcaggccuuauucaagcuuaccaugggccagaucgugaccuucuuccaggaggucccccacgugaucgaggaggugaugaacaucguccugaucgcccucagcauccuggccauccugaaggggcucuacaacaucgcgaccugcggccugaucgggcuggugacguuccuccugcuguccggccgcagcugcuccaugaccuacaaggggguguacgagcuccagacccuggagcugaacaugaacacccucaacaugugcaugccgcugagcugcaccaagaacaacucccaccacuacaucauggucggcaacgagaccggccuggagcucacccugacgaacaccagccugcuccaccacaaguucugcaaccuguccgacgcccacaagaagaaccuguacgaccacacccucaugagcaucaucuccaccuuccaccugagcauccccaacuucaaccaguacgaggccauguccugcgacuucaacgggggcaagaucacggugcaguacaaccugagccacuccuacgccaucgacgccgcgaaccacugcgggaccguggccaacggcguccuccagaccuucaugcggauggccuggggcgggagcuacaucgcccuggacuccggccgcgggaagugggacugcaucaugaccagcuaccaguaccugaucauccagaacacgaccugggaggaccacugccaguucucccggcccagccccaucggcuaccucgggcugcugucccagcgcacccgggacaucuacaucagccgccggcuccugggcaccuucacguggacccugagcgacuccgagggcaacgagacccccgggggcuacugccucacccgcuggaugcugaucgaggcggagcugaagugcuucgggaacacggccguggccaagugcaacgagaagcacgacgaggaguucugcgacaugcuccggcuguucgacuucugcaagcaggccauccgccggcugaaggccgaggcgcagaugagcauccagcucaucaacaaggccgugaacgcccugaucaacgaccagcugaucaugaagaaccaccuccgcgacaucaugggcauccccuacugcaacuacuccaaguacugguaccugaaccacaccagcaccgggcggaccucccugccccgcugcuggcucgucagcaacggcuccuaccugaacgagacgcacuucagcgacgacaucgagcagcaggccgacaacaugaucaccgagaugcugcagaaggaguaccucgaccggcagggcaagaccccgcuggggcugguggaccuguucguguucuccaccagcuucuaccucaucuccaucuuccugcaccuggucaagaucccgacgcaccgccacaucgugggcaagcccugccccaagccccaccggcucaaccacauggggaucugcagcugcggccuguacaagcagccgggggugcccguccgcuggaagcggugaggacuagucccuguucccagagcccacuuuuuuuucuuuuuuugaaauaaaauagccugucuuucagaucuaaaaaaaaaaaaaaaaaaaaaaaaaaaaaaaaaaaaaaaaaaaaaaaaaaaaaaaaaaaaaaaaaaaaaaaaaaaaaaaaaaaaaaaaaaaaaaaaaaaa

SEQ ID NO: 36955 - RNA, 1724 nt, Artificial Sequence
  mRNA product Design a-1 (A100) comprising derived and/or modified sequence from LASV(G1180-SLE-2010;Clade IV)__AIT17168__GPCmut10 (opt1)
aggagagucccgcagucggcguccagcggcucugcuuguucgugugugugucguugcaggccuuauucaagcuuaccaugggccagaucgugaccuucuuccaggaggucccccacgugaucgaggaggugaugaacaucguccugaucgcccucagcauccuggccgugcugaaggggcucuacaacuucgcgaccugcggccugguggggcugcucaccuuccugcugcucugcggccgcuccugcaccgccagccgguacaagggggucuacgagcugcagacccuggagcucaacauggagacccugaacaugugcaugccgcuguccugcaccaagaacaacagccaccacuacaucauggugggcaacgagaccggccucgagcugacccugacgaacaccuccaucaucaaccacaaguucugcaaccucagcgacgcccacaagaagaaccuguacgaccacgcccugauguccaucaucagcaccuuccaccucuccauccccaacuucaaccaguacgaggccaugagcugcgacuucaacgggggcaagaucuccgugcaguacaaccugagccacuccuacgcgggggacgccgccaaccacugcggcaccgucgccaacggggugcugcagacguucaugcgcauggcguggggcggcagcuacaucgcccucgacuccgggcacggcagcugggacugcaucaugaccuccuaccaguaccugaucauccagaacaccaccugggaggaccacugccaguucagccggcccucccccaucggguaccugggccuccugagccagcgcacgcgggacaucuacaucagccgccggcugcucggcaccuucaccuggacccuguccgacagcgaggggaaggacacgccgggcggguacugccugacccgcuggaugcucaucgaggccgagcugaagugcuucggcaacaccgccguggccaagugcaacgagaagcacgacgaggaguucugcgacaugcugcggcuguucgacuucugcaagcaggcgauccagcgccugaaggccgaggcccagauguccauccagcugaucaacaaggccgucaacgcccucaucaacgaccagcugaucaugaagaaccaccuccgggacaucauggggauccccuacugcaacuacagcaaguacugguaccucaaccacaccacgaccggcaagaccucccugcccaagugcuggcuggugagcaacggcuccuaccucaacgagacccacuucagcgacgacaucgagcagcaggcggacaacaugaucacggagaugcugcagaaggaguacauggagcgccaggggaagacgccccugggccucguggaccuguucgucuucuccaccagcuucuaccugaucuccaucuuccugcaccucgugaagaucccgacccaccggcacaucgugggcaagagcugccccaagccccaccgccugaaccacauggggaucugcuccugcgggcuguacaagcagcccggcgucccggugaaguggaagcggugaggacuagucccuguucccagagcccacuuuuuuuucuuuuuuugaaauaaaauagccugucuuucagaucuaaaaaaaaaaaaaaaaaaaaaaaaaaaaaaaaaaaaaaaaaaaaaaaaaaaaaaaaaaaaaaaaaaaaaaaaaaaaaaaaaaaaaaaaaaaaaaaaaaaa

SEQ ID NO: 36956 - RNA, 1724 nt, Artificial Sequence
  mRNA product Design a-1 (A100) comprising derived and/or modified sequence from LASV(G1442-SLE-2011;Clade IV)__AIT17180__GPCmut10 (opt1)
aggagagucccgcagucggcguccagcggcucugcuuguucgugugugugucguugcaggccuuauucaagcuuaccaugggccagaucgugaccuucuuccaggaggucccccacgugaucgaggaggugaugaacaucguccugaucgcccucagcauccuggccgugcugaaggggcucuacaacguggcgaccugcggccugaucgggcuggucacguuccuccugcugugcggccgcuccugcaccaccacccucuacaaggggguguacgagcugcagacgcuggagcucaacauggagacccugaacaugugcaugccgcugagcugcaccaagaacaacucccaccacuacauccgggugggcaacgagacgggccucgagcugacccugaccaacaccagcaucaucaaccacaaguucugcaaccucuccgacgcccacaagaagaaccuguacgaccacgcccugaugagcaucaucuccacguuccaccucagcauccccaacuucaaccaguacgaggccauguccugcgacuucaacgggggcaagaucagcguccaguacaaccugucccacagcuacgccggggacgcggccaaccacugcggcaccguggccaacggggugcugcagaccuucaugcgcauggccuggggcggcuccuacaucgcgcucgacagcgggcggggcaacugggacugcaucaugaccuccuaccaguaccugaucauccagaacacgaccugggacgaccacugccaguucagccgccccucccccaucggguaccugggccuccugagccagcggacccgcgacgucuacaucucccggcgccugcucggcaccuucacguggacccugagcgacagcgaggggaaggacaccccgggcggguacugccugacccgguggaugcucaucgaggccgagcugaagugcuucggcaacacggccguggccaagugcaacgagaagcacgacgaggaguucugcgacaugcugcgccucuucgacuucugcaagcaggccauccagcggcugaaggcggaggcccagauguccauccagcugaucaacaaggccgugaacgcccucaucaacgaccagcugaucaugaagaaccaccuccgcgacaucauggggauccccuacugcaacuacagcaaguacugguaccugaacaacaccgccaccggcaagaccucccugcccaagugcuggcugaucagcaacggcuccuaccucaacgagacgcacuucagcgacgacaucgagcaggaggcggacaacaugaucaccgagaugcugcagaaggaguacauggagcggcaggggaagacgccccugggccucgucgaccuguucguguucuccaccagcuucuaccugaucuccaucuuccugcaccucgugaagaucccgacccaccgccacaucgucggcaagagcugccccaagccccaccggcugaaccacauggggaucugcuccugcgggcuguacaagcagcccggcgugccggugcgcuggaagcggugaggacuagucccuguucccagagcccacuuuuuuuucuuuuuuugaaauaaaauagccugucuuucagaucuaaaaaaaaaaaaaaaaaaaaaaaaaaaaaaaaaaaaaaaaaaaaaaaaaaaaaaaaaaaaaaaaaaaaaaaaaaaaaaaaaaaaaaaaaaaaaaaaaaaa

SEQ ID NO: 36957 - RNA, 1724 nt, Artificial Sequence
  mRNA product Design a-1 (A100) comprising derived and/or modified sequence from LASV(G3010-SLE-2013;Clade IV)__AIT17344__GPCmut10 (opt1)
aggagagucccgcagucggcguccagcggcucugcuuguucgugugugugucguugcaggccuuauucaagcuuaccaugggccagaucgugaccuucuuccaggaggucccccacgugaucgaggaggugaugaacaucguccugaucgcccucagcauccuggccgugcugaaggggcucuacaacuucgcgaccugcggccugguggggcuggucacguuccuccugcugugcggccgcuccugcaccaccagccucuacaaggggguguacgagcugcagacccuggagcucaacauggagacgcugaacaugugcaugccgcuguccugcaccaagaacaacagccaccacuacaucauggugggcaacgagaccggccucgagcugacgcugaccaacaccuccaucaucaaccacaaguucugcaaccucagcgacgcccacaagaagaaccuguacaaccacgcccugauguccaucaucagcaccuuccaccucuccauccccaacuucaaccaguacgaggccaugagcugcgacuucaacgggggcaagaucuccguccaguacaaccugagccacuccuacgccggggacgcggccagccacugcggcacgguggccaacggggugcugcagaccuucaugcggauggccuggggcggcuccuacaucgcgcucgacagcggguacggcaagugggacugcaucaugaccuccuaccaguaccugaucauccagaacaccacgugggaggaccacugccaguucagccgccccucccccaucggguaccugggccuccugagccagcggacccgcgacaucuacaucagccggcgccugcucggcaccuucaccuggacgcuguccgacagcgaggggaaggacaccccgggcggguacugccugacccgguggaugcucaucgaggccgagcugaagugcuucggcaacaccgccgucgccaagugcaacgagaagcacgacgaggaguucugcgacaugcugcgccucuucgacuucugcaagcaggccauccagcggcugaagacggaggcgcagauguccauccagcugaucaacaaggccgugaacgcccucaucaacgaccagcugaucaugaagaaccaccuccgcgacaucauggggauccccuacugcaacuacagcaaguacugguaccugaaccacaccaccaccggcaagacgucccugcccaagugcuggcuggugagcaacggcuccuaccucaacgagacccacuucagcgacgacaucgagcagcaggccgacaacaugaucaccgagaugcugcagaaggaguacauggagcggcaggggaagacgccccugggccucgucgaccuguucguguucuccaccagcuucuaccugaucuccaucuuccugcaccucgugaagaucccgacccaccgccacaucgucggcaagagcugccccaagccccaccggcugaaccacauggggaucugcuccugcgggcuguacaagcagcccggcgugccggugcgcuggaagcggugaggacuagucccuguucccagagcccacuuuuuuuucuuuuuuugaaauaaaauagccugucuuucagaucuaaaaaaaaaaaaaaaaaaaaaaaaaaaaaaaaaaaaaaaaaaaaaaaaaaaaaaaaaaaaaaaaaaaaaaaaaaaaaaaaaaaaaaaaaaaaaaaaaaaa

SEQ ID NO: 36958 - RNA, 1724 nt, Artificial Sequence
  mRNA product Design a-1 (A100) comprising derived and/or modified sequence from LASV(G502-SLE-2009;Clade IV)__AIT17126__GPCmut10 (opt1)
aggagagucccgcagucggcguccagcggcucugcuuguucgugugugugucguugcaggccuuauucaagcuuaccaugggccagaucgugaccuucuuccaggaggucccccacgugaucgaggaggugaugaacaucguccugaucgcccucagcauccuggccgugcugaaggggcucuacaacuucgcgaccugcggccugguggggcugcucacguuccugcugcucugcggccgcuccugcaccaccgggcuguacaagggcgucuacgagcugcagacccucgagcugaacauggagacgcugaacaugugcaugccgcucagcugcaccaagaacaacucccaccacuacaucauggugggcaacgagaccgggcuggagcugacgcucaccaacaccagcaucaucaaccacaaguucugcaaccuguccgacgcccacaagaagaaccuguacgaccacgcccucaugagcaucaucuccaccuuccaccugagcauccccaacuucaaccaguacgaggccauguccugcgacuucaacggcgggaagaucagcgugcaguacaaccugucccacagcuacgccggcgacgcggccgaccacugcgggacggucgccaacggcgugcuccagaccuucaugcggauggccuggggcggguccuacaucgcgcuggacagcggccgcgggcggugggacugcaucaugaccuccuaccaguaccugaucauccagaacaccacgugggaggaccacugccaguucagccgccccucccccaucggcuaccucggccugcugagccagcggacccgcgacaucuacaucucccggcgccuccuggggaccuucaccuggacgcugagcgacagcgagggcaaggacacccccgggggcuacugccucacccgguggaugcugaucgaggccgagcugaagugcuucgggaacaccgccguggccaagugcaacgagaagcacgacgaggaguucugcgacaugcuccgccuguucgacuucugcaagcaggccauccagcggcugaaggcggaggcccagauguccauccagcucaucaacaaggccgucaacgcccugaucaacgaccagcuggugaugaagaaccaccuccgcgacaucaugggcauccccuacugcaacuacagccgguacugguaccugaaccacacgaccaccggccgcaccucccugcccaagugcuggcucgugagcaacggguccuaccugaacgagacgcacuucagcgacgacaucgagcagcaggccgacaacaugaucaccgagaugcugcagaaggaguacauggagcggcagggcaagaccccgcucgggcuggucgaccuguucguguucuccaccagcuucuaccugaucuccaucuuccuccaccuggugaagaucccgacgcaccgccacaucgucggcaagagcugccccaagccccaccggcugaaccacauggggaucugcuccugcggccucuacaagcagcccggcgugccggugaaguggaagcgcugaggacuagucccuguucccagagcccacuuuuuuuucuuuuuuugaaauaaaauagccugucuuucagaucuaaaaaaaaaaaaaaaaaaaaaaaaaaaaaaaaaaaaaaaaaaaaaaaaaaaaaaaaaaaaaaaaaaaaaaaaaaaaaaaaaaaaaaaaaaaaaaaaaaaa

SEQ ID NO: 36959 - RNA, 1724 nt, Artificial Sequence
  mRNA product Design a-1 (A100) comprising derived and/or modified sequence from LASV(G733-SLE-2010;Clade IV)__AIT17154__GPCmut10 (opt1)
aggagagucccgcagucggcguccagcggcucugcuuguucgugugugugucguugcaggccuuauucaagcuuaccaugggccagaucgugaccuucuuccaggaggucccccacgugaucgaggaggugaugaacaucguccugaucgcccucagcauccuggccgugcugaaggggcucuacaacuucgcgaccugcggcaucguggggcuggucuccuuccugcuccugugcggccgcagcugcacgaccucccuguacaaggggguguacgagcuccagacccuggagcugaacauggagacccucaacaugugcaugccgcugagcugcaccaagaacaacucccaccacuacaucauggugggcaacgagaccggccuggagcucacccugacgaacaccagcaucaucaaccacaaguucugcaaccuguccgacgcccacaagaagaaccucuacgaccacgcccugaugagcaucaucuccaccuuccaccugagcauccccaacuucaaccaguacgaggccauguccugcgacuucaacgggggcaagaucagcguccaguacaaccucucccacagcuacgccggggacgcggccaaccacugcggcaccaucgccaacggggugcugcagacguucaugcggauggccuggggcggcuccuacaucgcgcuggacagcgggcgcgaccggugggacugcaucaugaccuccuaccaguaccucaucauccagaacaccaccugggaggaccacugccaguucagccgccccucccccaucggcuaccuggggcugcucagccagcggacgcgcgacaucuacaucagccggcgccugcugggcaccuucaccuggacccucuccgacagcgagggcaaggacacgcccgggggcuacugccugacccgguggaugcugaucgaggccgagcucaagugcuucgggaacaccgccguggccaagugcaacgagaagcacgacgaggaguucugcgacaugcugcgccuguucgacuucugcaagcaggccauccagcggcucaaggcggaggcccagauguccauccagcugaucaacaaggccgucaacgcccugaucaacgaccagcucaucaugaagaaccaccuccgcgacaucaugggcauccccuacugcaacuacagcaaguacugguaccugaaccacaccacgaccgggaagaccucccugcccaagugcuggcuggugagcaacggcuccuaccugaacgagacccacuucagcgacgacaucgagcagcaggccgacaacaugaucacggagaugcuccagaaggaguacauggagcggcagggcaagaccccgcuggggcugguggaccucuucgucuucuccaccagcuucuaccugaucuccaucuuccugcaccuggugaagaucccgacccaccgccacguggucggcaagagcugccccaagccccaccggcucaaccacauggggaucugcuccugcggccuguacgggcagcccggcgugccggugaaguggaagcgcugaggacuagucccuguucccagagcccacuuuuuuuucuuuuuuugaaauaaaauagccugucuuucagaucuaaaaaaaaaaaaaaaaaaaaaaaaaaaaaaaaaaaaaaaaaaaaaaaaaaaaaaaaaaaaaaaaaaaaaaaaaaaaaaaaaaaaaaaaaaaaaaaaaaaa

SEQ ID NO: 36960 - RNA, 1724 nt, Artificial Sequence
  mRNA product Design a-1 (A100) comprising derived and/or modified sequence from MOPV/LASV reassortant(IGS-1;Clade IV)__AFY05576__GPCmut10 (opt1)
aggagagucccgcagucggcguccagcggcucugcuuguucgugugugugucguugcaggccuuauucaagcuuaccaugggccagaucgugaccuucuuccaggaggucccccacgugaucgaggaggugaugaacaucguccugaucgcccucagcgugcuggccgugcugaaggggcucuacaacuucgcgaccugcggccuggucgggcuggugacguuccuccugcugugcggccgcuccugcaccaccagccucuacaaggggguguacgagcugcagacccuggagcucaacauggagacgcugaacaugugcaugccgcuguccugcaccaagaacaacagccaccacuacaucauggucggcaacgagaccggccucgagcugacgcugaccaacaccuccaucaucaaccacaaguucugcaaccucagcgacgcccacaagaagaaccuguacgaccacgcccugauguccaucaucagcaccuuccaccucuccauccccaacuucaaccaguacgaggccaugagcugcgacuucaacgggggcaagaucuccgugcaguacaaccugagccacuccuacgccggggacgcggccaaccacugcggcacgguggccaacgggguccugcagaccuucaugcggauggccuggggcggcagcuacaucgcgcucgacuccgggcgcggcaacugggacugcaucaugaccagcuaccaguaccugaucauccagaacaccacgugggaggaccacugccaguucucccggcccagccccaucggguaccugggccuccugucccagcgcacccgggacaucuacaucagccgccggcugcucggcaccuucaccuggacgcugagcgacuccgagggggaggacaccccgggcggguacugccugacccgcuggaugcucaucgaggccgagcugaagugcuucggcaacaccgccguggccaagugcaacgagaagcacgacgaggaguucugcgacaugcugcggcuguucgacuucugcaagcaggccauccagcgccugaaggcggaggcccagaugagcauccagcugaucaacaaggccgugaacgcccucaucaacgaccagcugaucaugaagaaccaccuccgggacaucauggggauccccuacugcaacuacuccaaguacugguaccucaaccacacgaccaccggccgcaccagccugcccaagugcuggcuggucuccaacggcagcuaccucaacgagacgcacuucuccgacgacaucgagcagcaggccgacaacaugaucaccgagaugcugcagaaggaguacauggagcggcaggggaagacgccccugggccucguggaccuguucguguucagcaccuccuucuaccugaucagcaucuuccugcaccucgucaagaucccgacccaccgccacaucguggggaaguccugccccaagccccaccggcugaaccacaugggcaucugcagcugcgggcuguacaagcagcccggcgugccggucaaguggaagcgcugaggacuagucccuguucccagagcccacuuuuuuuucuuuuuuugaaauaaaauagccugucuuucagaucuaaaaaaaaaaaaaaaaaaaaaaaaaaaaaaaaaaaaaaaaaaaaaaaaaaaaaaaaaaaaaaaaaaaaaaaaaaaaaaaaaaaaaaaaaaaaaaaaaaaa

SEQ ID NO: 36961 - RNA, 1724 nt, Artificial Sequence
  mRNA product Design a-1 (A100) comprising derived and/or modified sequence from LASV(LM765-SLE-2012;Clade IV)__AIT17814__GPCmut10 (opt1)
aggagagucccgcagucggcguccagcggcucugcuuguucgugugugugucguugcaggccuuauucaagcuuaccaugggccagaucgugaccuucuuccaggaggucccccacgugaucgaggaggugaugaacaucguccugaucgcccucagcauccuggccgugcugaaggggcucuacaacuucgcgaccugcggccugguggggcuggucacguuccuccugcugugcggccgcuccugcaccaccagccucuacaaggggguguacgagcugcagacccuggagcucaacauggagacgcugaacaugugcaugccgcuguccugcaccaagaacaacagccaccacuacaucauggugggcaacgagaccggccucgagcugacgcugaccaacaccuccaucaucgaccacaaguucugcaaccucagcgacgcccaccggaagaaccuguacgaccacgcccugauguccaucaucagcaccuuccaccucuccauccccaacuucaaccaguacgaggccaugagcugcgacuucaacgggggcaagaucuccguccaguacaaccugagccacuccuacgccaaggacgcggccgaccacugcgggacgguggccaacggcgugcugcagaccuucaugcgcauggccuggggcgggagcuacaucgcgcucgacuccggccgggggcgcugggacugcaucaugaccagcuaccaguaccugaucauccagaacaccacgugggaggaccacugccaguucucccggcccagccccaucggcuaccuggggcuccugucccagcgcacccgggacaucuacaucagccgccggcugcucggcaccuucaccuggacgcugagcgacuccgagggcaaggacacccccgggggcuacugccugacccgcuggaugcucaucgaggccgagcugaagugcuucgggaacaccgccgucgccaagugcaacgagaagcacgacgaggaguucugcgacaugcugcggcuguucgacuucugcaagcaggccauccagcgccugaaggcggaggcccagaugagcauccagcugaucaacaaggccgugaacgcccucaucaacgaccagcugaucaugaagaaccaccuccgggacaucaugggcauccccuacugcaacuacuccaaguacugguaccucaaccacacgaccaccgggaagaccagccugcccaagugcuggcugguguccaacggcagcuaccucaacgagacgcacuucuccgacgacaucgagcagcaggccgacaacaugaucaccgagaugcugcagaaggaguacauggagcgccagggcaagaccccgcuggggcucgucgaccuguucguguucagcaccuccuucuaccugaucagcaucuuccugcaccucgugaagaucccgacgcaccggcacaucgucggcaagcccugccccaagccccaccgccugaaccacauggggaucugcuccugcggccuguacaagcagccgggggugcccgugaaguggaagcggugaggacuagucccuguucccagagcccacuuuuuuuucuuuuuuugaaauaaaauagccugucuuucagaucuaaaaaaaaaaaaaaaaaaaaaaaaaaaaaaaaaaaaaaaaaaaaaaaaaaaaaaaaaaaaaaaaaaaaaaaaaaaaaaaaaaaaaaaaaaaaaaaaaaaa

SEQ ID NO: 36962 - RNA, 1724 nt, Artificial Sequence
  mRNA product Design a-1 (A100) comprising derived and/or modified sequence from LASV(LM776-SLE-2012;Clade IV)__AIT17824__GPCmut10 (opt1)
aggagagucccgcagucggcguccagcggcucugcuuguucgugugugugucguugcaggccuuauucaagcuuaccaugggccagaucgugaccuucuuccaggaggucccccacgugaucgaggaggugaugaacaucguccugaucgcccucagcauccuggccgugcugaaggggcucuacaacuucgcgaccugcggccugguggggcuggucacguuccuccugcugugcggccgcuccugcaccaccagcguguacaaggggguguacgagcuccagacccuggagcugaacauggagacgcucaacaugugcaugccgcuguccugcaccaagaacaacagccaccacuacaucauggucggcaacgagaccggccuggagcucacgcugaccaacaccuccaucaucaaccacaaguucugcaaccugagcgacgcccacaagaagaaccucuacgaccacgcccugauguccaucaucagcaccuuccaccuguccauccccaacuucaaccaguacgaggccaugagcugcgacuucaacgggggcaagaucuccgugcaguacaaccucagccacuccuacgccggggacgcggccaaccacugcggcacgguggccaacgggguccugcagaccuucaugcggauggccuggggcggcagcuacaucgcgcuggacuccgggcacggcaagugggacugcaucaugaccagcuaccaguaccucaucauccagaacaccacgugggaggaccacugccaguucucccgccccagccccaucggguaccugggccugcucucccagcggacccgcgacaucuacaucagccggcgccugcugggcaccuucaccuggacgcucagcgacuccgaggggaaggacaccccgggcggguacugccugacccgguggaugcugaucgaggccgagcucaagugcuucggcaacaccgccguggccaagugcaacgagaagcacgacgaggaguucugcgacaugcugcgccuguucgacuucugcaagcaggccauccagcggcucaaggcggaggcccagaugagcauccagcugaucaacaaggccgugaacgcccugaucaacgaccagcucaucaugaagaaccaccuccgcgacaucauggggauccccuacugcaacuacuccaaguacugguaccugaaccacacgaccaccggcaagaccagccugcccaagugcuggcuggucuccaacggcagcuaccugaacgagacgcacuucuccgacgacaucgagcagcaggccgacaacaugaucaccgagaugcuccagaaggaguacauggagcggcaggggaagacgccccugggccugguggaccucuucguguucagcaccuccuucuaccugaucagcaucuuccugcaccuggucaagaucccgacccaccgccacaucguggggaaguccugccccaagccccaccggcucaaccacaugggcaucugcagcugcgggcuguacaagcagcccggcgugccgguccgcuggaagcggugaggacuagucccuguucccagagcccacuuuuuuuucuuuuuuugaaauaaaauagccugucuuucagaucuaaaaaaaaaaaaaaaaaaaaaaaaaaaaaaaaaaaaaaaaaaaaaaaaaaaaaaaaaaaaaaaaaaaaaaaaaaaaaaaaaaaaaaaaaaaaaaaaaaaa

SEQ ID NO: 36963 - RNA, 1724 nt, Artificial Sequence
  mRNA product Design a-1 (A100) comprising derived and/or modified sequence from LASV(Mad39;Clade IV)__ANH09722__GPCmut10 (opt1)
aggagagucccgcagucggcguccagcggcucugcuuguucgugugugugucguugcaggccuuauucaagcuuaccaugggccagaucgugaccuucuuccaggaggucccccacgugaucgaggaggugaugaacaucguccugaucgcccucagcauccuggccgugcugaaggggcucuacaacguggcgaccugcggccugaucgggcuggucacguuccuccugcugugcggccgcuccugcaccaccacccucuacaaggggguguacgagcugcaggcccuggagcucaacauggagacgcugaacaugugcaugccgcugagcugcaccaagaacaacucccaccacuacauccgggugggcaacgagaccggccucgagcugacgcugaccaacaccagccucaucaaccacaaguucugcaaccuguccgacgcccacaagaagaaccuguacgaccacgcccucaugagcaucaucuccaccuuccaccugagcauccccaacuucaaccaguacgaggccauguccugcgacuucaacgacgggaagaucagcguccaguacaaccugucccacacguacgcgggcgacaccgccaaccacugcgggaccguggccaacggcgugcuccagaccuucaugcgcauggccuggggcgggagcuacaucgcgcuggacuccggccgcgggggcugggacugcaucaugacgagcuaccaguaccugaucauccagaacaccaccugggaggaccacugccaguucucccggcccagccccaucggguaccucggccugcugucccagcggacccgcgacaucuacaucagccggcgccuccugggcacguucaccuggacccuguccgacagcgaggggaaggacaccccgggcggguacugccucacgcgguggaugcugaucgaggccgagcugaagugcuucggcaacaccgccgucgccaagugcaacgagaagcacgacgaggaguucugcgacaugcuccgccuguucgacuucugcaagcaggccauccagcggcugaaggcggaggcccagaugagcauccagcucaucaacaaggccgugaacgcccugaucaacgaccagcugaucaugaagaaccaccuccgcgacaucauggggauccccuacugcaacuacuccaaguacugguaccugaaccacaccgugaccggcaagacgagccugcccaagugcuggcucgucuccaacggcagcuaccugaacgagacccacuucuccgacgacaucgagcagcaggccgacaacaugaucaccgagaugcugcagaaggaguacauggagcggcaggggaagacgccccucggccugguggaccuguucguguucagcaccuccuucuaccugaucagcaucuuccuccaccuggucaagaucccgacccaccgccacgugguggggaagcccugccccaagccccaccggcugaaccacaugggcaucugcuccugcggguucuacaagcagccgggcguccccgugcgcuggaagcggugaggacuagucccuguucccagagcccacuuuuuuuucuuuuuuugaaauaaaauagccugucuuucagaucuaaaaaaaaaaaaaaaaaaaaaaaaaaaaaaaaaaaaaaaaaaaaaaaaaaaaaaaaaaaaaaaaaaaaaaaaaaaaaaaaaaaaaaaaaaaaaaaaaaaa

SEQ ID NO: 36964 - RNA, 1724 nt, Artificial Sequence
  mRNA product Design a-1 (A100) comprising derived and/or modified sequence from LASV(Z0947-SLE-2011;Clade IV)__AIT17840__GPCmut10 (opt1)
aggagagucccgcagucggcguccagcggcucugcuuguucgugugugugucguugcaggccuuauucaagcuuaccaugggccagaucgugaccuucuuccaggaggucccccacgugaucgaggaggugaugaacaucguccugaucgcccucagcauccuggccgugcugaaggggcucuacaacuucgcgaccugcggccugguggggcuggucacguuccuccugcugugcggccgcuccugcaccaucagccucuacaaggggguguacgagcugcagacccuggagcucaacauggagacccugaacaugugcaugccgcuguccugcaccaagaacaacagccaccacuacaucauggugggcaacgagaccggccucgagcugacccugacgaacaccuccaucaucaaccacaaguucugcaaccucagcgacgcccacaagaagaaccuguacgaccacgcccugauguccaucaucagcaccuuccaccucuccauccccaacuucaaccaguacgaggccaugagcugcgacuucaacgggggcaagaucuccguccaguacaaccugagccacuccuacgccggggacgcggccaaccacugcggcaccguggccaacggggugcugcagacguucaugcggauggccuggggcggcagcuacaucgcgcucgacuccgggcgcgaccggugggacugcaucaugaccagcuaccaguaccugaucauccagaacaccaccugggaggaccacugccaguucucccgccccagccccaucggcuaccuggggcuccugucccagcggacgcgcgacaucuacaucagccggcgccugcucggcaccuucaccuggacccugagcgacuccgagggcaaggacacgcccgggggcuacugccugacccgguggaugcucaucgaggccgagcugaagugcuucgggaacaccgccgucgccaagugcaacgagaagcacgacgaggaguucugcgacaugcugcgccucuucgacuucugcaagcaggccauccagcggcugaaggcggaggcccagaugagcauccagcugaucaacaaggccgugaacgcccucaucaacgaccagcugaucaugaagaaccaccuccgcgacaucaugggcauccccuacugcaacuacuccaaguacugguaccugaaccacaccacgaccgggaagaccagccugcccaagugcuggcugguguccaacggcagcuaccucaacgagacccacuucuccgacgacaucgagcagcaggccgacaacaugaucacggagaugcugcagaaggaguacauggagcggcagggcaagaccccgcuggggcucgucgaccuguucguguucagcaccuccuucuaccugaucagcaucuuccugcaccucgugaagaucccgacccaccgccacaucgucggcaagcccugccccaagccccaccggcugaaccacauggggaucugcuccugcggccuguacaagcagccgggggugcccgugaaguggaagcgcugaggacuagucccuguucccagagcccacuuuuuuuucuuuuuuugaaauaaaauagccugucuuucagaucuaaaaaaaaaaaaaaaaaaaaaaaaaaaaaaaaaaaaaaaaaaaaaaaaaaaaaaaaaaaaaaaaaaaaaaaaaaaaaaaaaaaaaaaaaaaaaaaaaaaa

SEQ ID NO: 36965 - RNA, 1724 nt, Artificial Sequence
  mRNA product Design a-1 (A100) comprising derived and/or modified sequence from LASV(Josiah;Clade IV)__NP_694870__GPCmut10 (opt1)
aggagagucccgcagucggcguccagcggcucugcuuguucgugugugugucguugcaggccuuauucaagcuuaccaugggccagaucgugaccuucuuccaggaggucccccacgugaucgaggaggugaugaacaucguccugaucgcccucagcgugcuggccgugcugaaggggcucuacaacuucgcgaccugcggccuggucgggcuggugaccuuccuccugcugugcggccgcuccugcaccaccagccucuacaaggggguguacgagcugcagacccuggagcucaacauggagacgcugaacaugugcaugccgcuguccugcaccaagaacaacagccaccacuacaucauggucggcaacgagaccggccucgagcugacccugacgaacaccuccaucaucaaccacaaguucugcaaccucagcgacgcccacaagaagaaccuguacgaccacgcccugauguccaucaucagcaccuuccaccucuccauccccaacuucaaccaguacgaggccaugagcugcgacuucaacgggggcaagaucuccgugcaguacaaccugagccacuccuacgccggggacgcggccaaccacugcggcaccguggccaacgggguccugcagacguucaugcggauggccuggggcggcagcuacaucgcgcucgacuccgggcgcggcaacugggacugcaucaugaccagcuaccaguaccugaucauccagaacaccaccugggaggaccacugccaguucucccggcccagccccaucggguaccugggccuccugucccagcgcacgcgggacaucuacaucagccgccggcugcucggcaccuucaccuggacccugagcgacuccgaggggaaggacacgccgggcggguacugccugacccgcuggaugcucaucgaggccgagcugaagugcuucggcaacaccgccguggccaagugcaacgagaagcacgacgaggaguucugcgacaugcugcggcuguucgacuucugcaagcaggccauccagcgccugaaggcggaggcccagaugagcauccagcugaucaacaaggccgugaacgcccucaucaacgaccagcugaucaugaagaaccaccuccgggacaucauggggauccccuacugcaacuacuccaaguacugguaccucaaccacaccacgaccggccgcaccagccugcccaagugcuggcuggucuccaacggcagcuaccucaacgagacccacuucuccgacgacaucgagcagcaggccgacaacaugaucacggagaugcugcagaaggaguacauggagcggcaggggaagacgccccugggccugguggaccucuucguguucagcaccuccuucuaccugaucagcaucuuccugcaccucgucaagaucccgacccaccgccacaucguggggaaguccugccccaagccccaccggcugaaccacaugggcaucugcagcugcgggcuguacaagcagcccggcgugccggucaaguggaagcgcugaggacuagucccuguucccagagcccacuuuuuuuucuuuuuuugaaauaaaauagccugucuuucagaucuaaaaaaaaaaaaaaaaaaaaaaaaaaaaaaaaaaaaaaaaaaaaaaaaaaaaaaaaaaaaaaaaaaaaaaaaaaaaaaaaaaaaaaaaaaaaaaaaaaaa

SEQ ID NO: 36966 - RNA, 1721 nt, Artificial Sequence
  mRNA product Design a-1 (A100) comprising derived and/or modified sequence from LASV(LP;Clade I)__AAF86701__GPCmut10 (opt1)
aggagagucccgcagucggcguccagcggcucugcuuguucgugugugugucguugcaggccuuauucaagcuuaccaugggccagaucaucaccuucuuccaggaggugccccacgucaucgaggaggugaugaacaucgugcugaucgcccucagccugcuggccauccucaaggggcuguacaacaucgcgaccugcggcaucaucgggcuggucgccuuccucuuccugugcggcaaguccugcagccugacgcucaagggcggguacgagcugcagacccuggagcucaacauggagacccugaacaugugcaugccgcuguccugcaccaagaacagcucccaccacuacauccgcgugggcaacgagacggggcucgagcugacccugaccaacaccagcaucaucaaccacaaguucugcaaccucuccgacgcccacaagaagaaccuguacgaccacgcccugaugagcaucaucuccacguuccaccucagcauccccaacuucaaccaguacgaggccauguccugcgacuucaacggcgggaagaucagcgugcaguacaaccugucccacagcuacgcgggcgacgccgccgagcacugcgggaccgucgccaacggcgugcugcagaccuucaugcggauggcguggggcgggcgcuacaucgcccucgacuccggcaaggggaacugggacugcaucaugaccagcuaccaguaccugaucauccagaacacgaccugggaggaccacugccaguucucccggcccagccccaucggcuaccugggccuccugucccagcgcacccgggacaucuacaucagccgccggcugcucgggaccuucacguggacccugagcgacuccgagggcaacgagacccccgggggcuacugccugacccgcuggaugcucaucgaggccgagcugaagugcuucgggaacacggccguggccaagugcaacgagaagcacgacgaggaguucugcgacaugcugcggcuguucgacuucugcaagcaggcgauccgccggcugaaggccgaggcccagaugagcauccagcugaucaacaaggccgucaacgcccucaucaacgaccagcugaucaugaagaaccaccuccgcgacaucaugggcauccccuacugcaacuacuccaaguacugguaccucaaccacaccagcuccggccggaccagccugcccaagugcuggcugaucuccaacgggagcuaccucaacgagacccaguucuccgacgacaucgagcagcaggcggacaacaugaucacggagaugcugcagaaggaguacaucgagcgccagggcaagaccccgcuggggcugguggacaucuucaucuucagcaccuccuucuaccucaucagcaucuuccugcaccugaucaagaucccgacccaccggcacaucgugggcaagcccugccccaagccccaccgccucaaccacaugggggucugcuccugcggccuguacaagcacccgggcgugcccacgaaguggaagcggugaggacuagucccuguucccagagcccacuuuuuuuucuuuuuuugaaauaaaauagccugucuuucagaucuaaaaaaaaaaaaaaaaaaaaaaaaaaaaaaaaaaaaaaaaaaaaaaaaaaaaaaaaaaaaaaaaaaaaaaaaaaaaaaaaaaaaaaaaaaaaaaaaaaaa

SEQ ID NO: 36967 - RNA, 1721 nt, Artificial Sequence
  mRNA product Design a-1 (A100) comprising derived and/or modified sequence from LASV(803213;Clade II)__AAF86703__GPCmut10 (opt1)
aggagagucccgcagucggcguccagcggcucugcuuguucgugugugugucguugcaggccuuauucaagcuuaccaugggccagaucaucaccuucuuccaggaggugccccacgucaucgaggaggugaugaacaucgugcugaucgcccucagccugcuggccauccucaaggggaucuacaacgucgcgaccugcggccuguucgggcugaucuccuuccuccugcugugcggccgcagcugcuccgugacguacaaggggguguacgagcuccagacccuggagcugaacauggccaaccucaacaugugcaugccgcugagcugcaccaagaacaacucccaccacuacaucauggucggcaacgagaccggccuggagcucacgcugaccaacaccagcaucaucaaccacaaguucugcaaccuguccgacgcccacaagaagaaccucuacgaccacgcccugaugagcaucaucuccaccuuccaccugagcauccccaacuucaaccaguacgaggccauguccugcgacuucaacgggggcaagaucagcgugcaguacaaccucucccacagcuucgcgguggacgccgccaaccacugcgggacgaucgccaacggcguccugcagaccuucaugcggauggcguggggcggguccuacaucgcccuggacagcggcaaggggaacugggacugcaucaugaccuccuaccaguaccucaucauccagaacaccacgugggaggaccacugccaguucagccgccccucccccaucggcuaccuggggcugcucagccagcggacccgcgacaucuacaucagccggcgccugcugggcaccuucaccuggacgcucuccgacagcgagggcaacgaggcccccgggggcuacugccugacccgguggaugcugaucgaggccgagcucaagugcuucgggaacaccgccguggcgaagugcaacgagaagcacgacgaggaguucugcgacaugcugcgccuguucgacuucugcaagcaggccaucaagcggcucaagaccgaggcccagauguccauccagcugaucaacaaggccgugaacgcccugaucaacgaccagcucaucaugaagaaccaccuccgcgacaucaugggcauccccuacugcaacuacagccgguacugguaccugaaccacacggucaccgggaagaccucccugccccgcugcuggcuggugagcaacggcuccuaccugaacgagacccacuucagcgacgacaucgagcagcaggcggacaacaugaucacggagaugcuccagaaggaguacauggaccggcagggcaagaccccgcuggggcugguggaccuguucgucuucuccaccagcuucuaccucaucuccaucuuccugcaccuggugaagaucccgacccaccgccacaucgugggcaagcccugccccaagccccaccggcucaaccacauggggaucugcagcugcggccuguacaagcacccggggguccccgugaaguggaagcgcugaggacuagucccuguucccagagcccacuuuuuuuucuuuuuuugaaauaaaauagccugucuuucagaucuaaaaaaaaaaaaaaaaaaaaaaaaaaaaaaaaaaaaaaaaaaaaaaaaaaaaaaaaaaaaaaaaaaaaaaaaaaaaaaaaaaaaaaaaaaaaaaaaaaaa

SEQ ID NO: 36968 - RNA, 1721 nt, Artificial Sequence
  mRNA product Design a-1 (A100) comprising derived and/or modified sequence from LASV(GA391;Clade III)__CAA36645__GPCmut10 (opt1)
aggagagucccgcagucggcguccagcggcucugcuuguucgugugugugucguugcaggccuuauucaagcuuaccaugggccagaucgugaccuucuuccaggaggucccccacgugaucgaggaggugaugaacaucguccugaucgcccucagcauccuggccauccugaaggggcucuacaacguggcgaccugcggccugaucgggcuggugaccuuccuccugcuguccggccgcagcugcucccucaucuacaaggggaccuacgagcugcagacccuggagcucaacauggagacccugaacaugugcaugccgcugagcugcacgaagaacaacucccaccacuacauccgggucggcaacgagaccggccucgagcugacccugaccaacacgagcauccucaaccacaaguucugcaaccuguccgacgcccacaagcgcaaccuguacgaccacagccucauguccaucaucagcaccuuccaccuguccauccccaacuucaaccaguacgaggccaugagcugcgacuucaacgggggcaagaucaccgugcaguacaaccugucccacagcuucgccguggacgccgcggggcacugcggcacccucgccaacgggguccugcagacguucaugcggauggccuggggcggcuccuacaucgcccuggacagcgggcgcggcaacugggacugcaucaugaccuccuaccaguaccucaucauccagaacaccaccugggacgaccacugccaguucagccggcccucccccaucggguaccugggccugcucagccagcgcacgcgggacaucuacaucagccgccggcugcugggcaccuucaccuggacccucuccgacagcgaggggaacgagacgccgggcggguacugccugacccgcuggaugcugaucgaggcggagcucaagugcuucggcaacaccgccguggccaagugcaacgagaagcacgacgaggaguucugcgacaugcugcggcuguucgacuucugcaagcaggccauccgccggcucaagaccgaggcccagauguccauccagcugaucaacaaggcggugaacgcccugaucaacgaccagcucaucaugaagaaccaccuccgcgacaucauggggauccccuacugcaacuacagccgguacugguaccugaaccacacguccaccggcaagaccagccugccccgcugcuggcugaucuccaacggcagcuaccugaacgagaccaaguucuccgacgacaucgagcagcaggccgacaacaugaucacggagaugcugcagaaggaguacaucgaccggcaggggaagacgccccucggccuggucgaccuguucguguucagcaccuccuucuaccucaucagcaucuuccugcaccuggugaagaucccgacccaccgccacaucgucgggaagcccugccccaagccccaccggcucaaccacaugggcaucugcuccugcgggcuguacaagcagccgggcgugcccgugcgcuggaagcggugaggacuagucccuguucccagagcccacuuuuuuuucuuuuuuugaaauaaaauagccugucuuucagaucuaaaaaaaaaaaaaaaaaaaaaaaaaaaaaaaaaaaaaaaaaaaaaaaaaaaaaaaaaaaaaaaaaaaaaaaaaaaaaaaaaaaaaaaaaaaaaaaaaaaa

SEQ ID NO: 36969 - RNA, 1724 nt, Artificial Sequence
  mRNA product Design a-1 (A100) comprising derived and/or modified sequence from LASV(AV;Clade V)__CCA30314__GPCmut10 (opt1)
aggagagucccgcagucggcguccagcggcucugcuuguucgugugugugucguugcaggccuuauucaagcuuaccaugggccagaucgugaccuucuuccaggaggucccccacgugaucgaggaggugaugaacaucguccugaucgcccucagcauccuggccgugcugaaggggcucuacaacaucgcgaccugcggccugaucgggcugaucacguuccuccugcugugcggccgcuccugcagcuccaaccucuacaaggggguguacgagcugcagagccuggaccucaacauggagacccugaacaugugcaugccgcuguccugcaccaagaacaacagccaccacuacauccgggucggcaacgacaccggccucgagcugacgcugaccaacaccuccauccucaaccacaaguucugcaaccugagcgacgcccacaagaaggaccuguacgaccacgcccucauguccaucaucagcaccuuccaccuguccauccccaacuucaaccaguacgaggccaugagcugcgacuucaacgggggcaagaucuccgugcaguacaaccugagccacuccuacgccaucgacgcggccaaccacugcgggacgguggccaacggcauccuccagaccuucaugcgcauggccuggggcgggagcuacaucgcgcuggacuccggccgggggaacugggacugcaucaugaccagcuaccaguaccugaucauccagaacaccacgugggagaaccacugccaguucucccgccccagccccaucggcuaccucgggcugcugagccagcggacccgcgacaucuacaucucccggcgccuccugggcaccuucaccuggacgcugagcgacuccgagggcaacgccacccccgggggcuacugccucacccgguggaugcugaucgaggccgagcugaagugcuucgggaacaccgccgucgccaagugcaacgagaagcacgacgaggaguucugcgacaugcuccgccuguucgacuucugcaagcaggcgaucagccggcugaaguccgaggcccagaugagcauccagcucaucaacaaggccgugaacgcccugaucaacgaccagcugaucaugaagaaccaccuccgcgacaucaugggcauccccuacugcaacuacuccaaguacugguaccugaaccacacgaucaccgggaagaccagccugcccaagugcuggcucguguccaacggcagcuaccugaacgagacccacuucuccgacgacaucgagcagcaggccgacaacaugaucacggagaugcugcagaaggaguacauggagcggcagggcaagaccccgcuggggcucgucgaccuguucguguucagcaccuccuucuaccugaucagcaucuuccuccgccuggugaagaucccgacccaccggcacaucgucggcaagcccugccccaagccccaccgccugaaccacauggggaucugcuccugcggccucuacaagcagccgggggugcccgugcgguggaagcgcugaggacuagucccuguucccagagcccacuuuuuuuucuuuuuuugaaauaaaauagccugucuuucagaucuaaaaaaaaaaaaaaaaaaaaaaaaaaaaaaaaaaaaaaaaaaaaaaaaaaaaaaaaaaaaaaaaaaaaaaaaaaaaaaaaaaaaaaaaaaaaaaaaaaaa

SEQ ID NO: 36970 - RNA, 1721 nt, Artificial Sequence
  mRNA product Design a-1 (A100) comprising derived and/or modified sequence from LASV(Togo/2016/7082;Clade VI)__AMR44577__GPCmut10 (opt1)
aggagagucccgcagucggcguccagcggcucugcuuguucgugugugugucguugcaggccuuauucaagcuuaccaugggccagaucaucaccuucuuccaggaggugccccacgucaucgaggaggugaugaacaucgugcugaucgcccucagccugcuggccauccucaagggggucuacaacguggcgaccugcggcaucaucgggcuggugacguuccuguuccucugcggccgcuccugcagccugaucuacaagggguccuacgagcugcagacccucgagcugaacauggagacccugaacaugugcaugccgcucagcugcaccaagaacuccagccaccacuacauccgggucggcaacgagacgggccuggagcugacccucaccaacaccuccaucaucaaccacaaguucugcaaccugagcgacgcccacaagcgcaaccuguacgaccacgcccucauguccauccugagcacguuccaccuguccauccccaacuucaaccaguacgaggccaugagcugcgacuucaacgggggcaagaucuccgugcaguacaaccucagccacgccuacgcgguggacgccgccgagcacugcgggaccgucgccaacggcgugcugcagaccuucaugcggauggcguggggcggguccuacaucgcccuggacagcggccgcgggaacugggacugcaucaugaccuccuaccaguaccucaucauccagaacacgaccugggaggaccacugccaguucagccggcccucccccaucggcuaccuggggcugcucagccagcgcacccgggacaucuacaucagccgccggcugcugggcaccuucacguggacccucuccgacagcgagggcaacgagacccccgggggcuacugccugacccgcuggaugcugaucgaggccgagcucaagugcuucgggaacacggccguggccaagugcaacgagaagcacgacgaggaguucugcgacaugcugcggcuguucgacuucugcaagcaggcgauccagcgccucaaguccgaggcccagaugagcauccagcugaucaacaaggccgucaacgcccugaucaacgaccagcucaucaugaagaaccaccuccgggacaugaugggcauccccuacugcaacuacuccaaguacugguaccugaaccacaccagcuccgggcgcaccagccugcccaagugcuggcugguguccaacggcagcuaccugaacgagacccacuucuccgacgacaucgagcagcaggccgacaacaugaucacggagaugcuccagaaggaguacaucgaccggcagggcaagaccccgcuggggcugguggaccuguucgucuucagcaccuccuucuaccucaucagcaucuuccugcaccugaucaagaucccgacccaccgccacaucgugggcaagcccugccccaagccccaccggcucaaccacauggggaucugcuccugcggccuguacaagcagccgggggugcccacgcgcuggaagcggugaggacuagucccuguucccagagcccacuuuuuuuucuuuuuuugaaauaaaauagccugucuuucagaucuaaaaaaaaaaaaaaaaaaaaaaaaaaaaaaaaaaaaaaaaaaaaaaaaaaaaaaaaaaaaaaaaaaaaaaaaaaaaaaaaaaaaaaaaaaaaaaaaaaaa

SEQ ID NO: 36971 - RNA, 1721 nt, Artificial Sequence
  mRNA product Design a-1 (A100) comprising derived and/or modified sequence from LASV(KAK-428;Clade n.d. (VII))__ANH09740__GPCmut10 (opt1)
aggagagucccgcagucggcguccagcggcucugcuuguucgugugugugucguugcaggccuuauucaagcuuaccaugggccagaucgugaccuucuuccaggaggucccccacgugaucgaggaggugaugaacaucguccugaucgcccucagccugcuggccauccucaaggggcuguacaacuucgcgaccugcggcgugaucgggcugaucacguuccuccugcugugcggccgcuccugcagcgccaccuacaaggggcaguacgagcuccagacccuggagcugaacauggagucccucaacaugugcaugccgcugagcugcaccaagaacaacucccaccacuacauccgggccggcaacaacacgggccuggagcucacccugaccaacaccagcaucaucucccacaaguucugcaaccugagcgacgcccacaagaagaaccucuacgaccacacgcugauguccaucaucaccaccuuccaccugagcauccccaacuucaaccaguacgaggccauguccugcgacuucaacgggggcaagaucagcauccaguacaaccucucccacagcuacgcgggggacgccgcccagcacugcggcaccguggccaacgggguccugcagacguucaugcgcauggcguggggcggcuccuaccuggcccucgacagcgggcggcgcggcugggacugcaucaucuccagcuaccaguaccugaucauccagaacaccaccugggacgaccacugccaguucucccggcccagccccaucggguaccugggcuucgugagccagaagacccgcgacaucuacaucucccggcgccuccugggcacguucaccuggacccugagcgacuccgaggggcacgacaugccgggcggguacugccucacccgguggaugcugaucgaggccgaccugaagugcuucggcaacacggccguggccaagugcaacgagaagcacgacgaggaguucugcgacauguggcgccucuucgacuucugcaagcaggcgauccagcggcugaaggccgaggcccagaugaacauccagcugaucaacaaggccgucaacgcccucaucaacgaccagcugaugaugaagaaccaccuccgcgacaucauggggauccccuacugcaacuacagcaaguucugguaccugaacaacaccaccaccggccggacgucccugccccgcugcuggcugaucagcaacggcuccuaccucaacgagacccacuucagcgacgacaucgagcagcaggcggacaacaugaucaccgagaugcugcagaaggaguacauggaccggcaggggaagacgccccugggccucguggaccuguucguguucuccaccagcuucuaccugaucaccaucuuccugcaccucgucaagaucccgacccaccgccacaucguggggaagcccugccccaagccccaccggcugaaccacaugggcaucugcuccugcgggcuguacaagcagccgggcgugcccguccgcuggaagcggugaggacuagucccuguucccagagcccacuuuuuuuucuuuuuuugaaauaaaauagccugucuuucagaucuaaaaaaaaaaaaaaaaaaaaaaaaaaaaaaaaaaaaaaaaaaaaaaaaaaaaaaaaaaaaaaaaaaaaaaaaaaaaaaaaaaaaaaaaaaaaaaaaaaaa

SEQ ID NO: 36972 - RNA, 1721 nt, Artificial Sequence; identical to SEQ ID NO: 36966
  mRNA product Design a-1 (A100) comprising derived and/or modified sequence from LASV(Pinneo-NIG-1969;Clade I)__AIT17836__GPCmut10 (opt1)

SEQ ID NO: 36973 - RNA, 1721 nt, Artificial Sequence
  mRNA product Design a-1 (A100) comprising derived and/or modified sequence from LASV(ISTH0009-NIG-2011;Clade II)__AIT17404__GPCmut10 (opt1)
aggagagucccgcagucggcguccagcggcucugcuuguucgugugugugucguugcaggccuuauucaagcuuaccaugggccagaucaucaccuucuuccaggaggugccccacgucaucgaggaggugaugaacaucgugcugaucgcccucagccugcuggccauccucaaggggaucuacaacgucgcgaccugcggccuguucgggcugguguccuuccuccugcugugcggccgcagcugcuccacgaccuacaaggggguguacgagcuccagacccuggagcuggacauggccagccucaacaugugcaugccgcuguccugcaccaagaacaacagccaccacuacaucauggucggcaacgagacgggccuggagcucacccugaccaacaccuccaucaucaaccacaaguucugcaaccugagcgacgcccacaagaagaaccucuacgaccacgcccugauguccaucaucagcacguuccaccuguccauccccaacuucaaccaguacgaggccaugagcugcgacuucaacgggggcaagaucuccgugcaguacaaccucagccacgcguacgccguggacgccgccaaccacugcgggaccaucgcgaacggcguccugcagaccuucaugcggauggccuggggcggguccuacaucgcccuggacagcggcaagggguccugggacugcaucaugaccagcuaccaguaccucaucauccagaacacgaccugggaggaccacugccaguucucccgccccagccccaucggcuaccuggggcugcucagccagcggacccgcgacaucuacaucucccggcgccugcugggcaccuucacguggacccucagcgacuccgagggcaacgagacccccgggggcuacugccugacccgguggaugcugaucgaggccgagcucaagugcuucgggaacacggccguggcgaagugcaacgagaagcacgacgaggaguucugcgacaugcugcgccuguucgacuucugcaagcaggccauccggcgccucaagaccgaggcccagaugagcauccagcugaucaacaaggccgugaacgcccugaucaacgaccagcucaucaugaagaaccaccuccgggacaucaugggcauccccuacugcaacuacuccaaguacugguaccugaaccacaccgucaccgggaagacgagccugccccgcugcuggcugguguccaacggcagcuaccugaacgagacccacuucuccgacgacaucgagcagcaggcggacaacaugaucaccgagcuccugcagaaggaguacauggaccggcagggcaagaccccgcuggggcugguggaccucuucgucuucagcacguccuucuaccugaucagcaucuuccugcaccucaucaagaucccgacccaccgccacaucaccggcaagcccugccccaagccccaccggcugaaccacauggggaucugcuccugcggccuguacaagcacccgggggugcccgugaaguggaagcgcugaggacuagucccuguucccagagcccacuuuuuuuucuuuuuuugaaauaaaauagccugucuuucagaucuaaaaaaaaaaaaaaaaaaaaaaaaaaaaaaaaaaaaaaaaaaaaaaaaaaaaaaaaaaaaaaaaaaaaaaaaaaaaaaaaaaaaaaaaaaaaaaaaaaaa

SEQ ID NO: 36974 - RNA, 1721 nt, Artificial Sequence
  mRNA product Design a-1 (A100) comprising derived and/or modified sequence from LASV(ISTH2010-NIG-2012;Clade II)__AIT17482__GPCmut10 (opt1)
aggagagucccgcagucggcguccagcggcucugcuuguucgugugugugucguugcaggccuuauucaagcuuaccaugggccagaucaucaccuucuuccaggaggugccccacgucaucgaggaggugaugaacaucgugcugaucgcccucagccugcuggccauccucaaggggaucuacaacgucgcgaccugcggccuguucgggcugguguccuuccuccugcugugcggccgcagcugcuccacgaccuacaaggggguguacgagcuccagacccuggagcuggacauggccagccucaacaugugcaugccgcuguccugcaccaagaacaacagccaccacuacaucauggucggcaacgagacgggccuggagcucacccugaccaacaccuccaucaucaaccacaaguucugcaaccugagcgacgcccacaagaagaaccucuacgaccacgcccugauguccaucaucagcacguuccaccuguccauccccaacuucaaccaguacgaggccaugagcugcgacuucaacgggggcaagaucuccgugcaguacaaccucagccacgcguacgccguggacgccgccaaccacugcgggaccaucgcgaacggcguccugcagaccuucaugcggauggccuggggcggguccuacaucgcccuggacagcggcaagggguccugggacugcaucaugaccagcuaccaguaccucaucauccagaacaucacgugggaggaccacugccaguucucccgccccagccccaucggcuaccuggggcugcucagccagcggacccgcgacaucuacaucucccggcgccugcugggcaccuucaccuggacgcucagcgacuccgagggcaacgagacccccgggggcuacugccugacccgguggaugcugaucgaggccgagcucaagugcuucgggaacaccgccguggcgaagugcaacgagaagcacgacgaggaguucugcgacaugcugcgccuguucgacuucugcaagcaggccauccggcgccucaagacggaggcccagaugagcauccagcugaucaacaaggccgugaacgcccugaucaacgaccagcucaucaugaagaaccaccuccgggacaucaugggcauccccuacugcaacuacuccaaguacugguaccugaaccacaccgucaccgggaagaccagccugccccgcugcuggcugguguccaacggcagcuaccugaacgagacgcacuucuccgacgacaucgagcagcaggcggacaacaugaucaccgagcuccugcagaaggaguacaucgaccggcagggcaagaccccgcuggggcugguggaccucuucgucuucagcaccuccuucuaccugaucagcaucuuccugcaccucgugaagaucccgacgcaccgccacguggucggcaagcccugccccaagccccaccggcugaaccacauggggaucugcuccugcggccuguacaagcacccgggggugcccgugaaguggaagcgcugaggacuagucccuguucccagagcccacuuuuuuuucuuuuuuugaaauaaaauagccugucuuucagaucuaaaaaaaaaaaaaaaaaaaaaaaaaaaaaaaaaaaaaaaaaaaaaaaaaaaaaaaaaaaaaaaaaaaaaaaaaaaaaaaaaaaaaaaaaaaaaaaaaaaa

SEQ ID NO: 36975 - RNA, 1721 nt, Artificial Sequence
  mRNA product Design a-1 (A100) comprising derived and/or modified sequence from LASV(Lassa virus/H.sapiens-wt/NGA/2015/ISTH_0543;Clade II)__AVO03639__GPCmut10 (opt1)
aggagagucccgcagucggcguccagcggcucugcuuguucgugugugugucguugcaggccuuauucaagcuuaccaugggccagaucaucaccuucuuccaggaggugccccacgucaucgaggaggugaugaacaucgugcugaucgcccucagccugcuggccauccucaaggggaucuacaacgucgcgaccugcggccuguucgggcugguguccuuccuccugcugugcggccgcagcugcuccacgaccuacaaggggguguacgagcuccagacccuggagcuggacauggccaaccucaacaugugcaugccgcugagcugcaccaagaacaacucccaccacuacaucauggucggcaacgagacgggccuggagcucacccugaccaacaccagcaucaucaaccacaaguucugcaaccuguccgacgcccacaagaagaaccucuacgaccacgcccugaugagcaucaucuccacguuccaccugagcauccccaacuucaaccaguacgaggccauguccugcgacuucaacgggggcaagaucagcgugcaguacaaccucucccacaccuacgcgguggacgccgccaaccacugcgggaccaucgccaacggcguccugcagaccuucaugcggauggcguggggcgggagcuacaucgcccuggacuccggcaaggggagcugggacugcaucaugacguccuaccaguaccucgugauccagaacaccaccugggaggaccacugccaguucagccgccccucccccaucggcuaccuggggcugcucagccagcggacccgcgacaucuacaucagccggcgccugcugggcacguucaccuggacccucuccgacagcgagggcaacgagacccccgggggcuacugccugacgcgguggaugcugaucgaggccgagcucaagugcuucgggaacaccgccguggccaagugcaacgagaagcacgacgaggaguucugcgacaugcugcgccuguucgacuucugcaagcaggcgauccggcgccucaagaccgaggcccagauguccauccagcugaucaacaaggccgucaacgcccugaucaacgaccagcucaucaugaagaaccaccuccgggacaucaugggcaucccguacugcaacuacagcaaguacugguaccugaaccacaccgugacggggaagaccucccugccccgcugcuggcuggugagcaacggcuccuaccugaacgagacccacuucagcgacgacaucgagcagcaggccgacaacaugaucaccgagcuccugcagaaggaguacaucgaccggcagggcaagacgccccuggggcuggucgaccucuucguguucuccaccagcuucuaccugaucuccaucuuccugcaccucgugaagaucccgacccaccgccacaucaccggcaagcccugccccaagccccaccggcugaaccacauggggaucugcagcugcggccuguacaagcacccggggguccccgugaaguggaagcgcugaggacuagucccuguucccagagcccacuuuuuuuucuuuuuuugaaauaaaauagccugucuuucagaucuaaaaaaaaaaaaaaaaaaaaaaaaaaaaaaaaaaaaaaaaaaaaaaaaaaaaaaaaaaaaaaaaaaaaaaaaaaaaaaaaaaaaaaaaaaaaaaaaaaaa

SEQ ID NO: 36976 - RNA, 1721 nt, Artificial Sequence
  mRNA product Design a-1 (A100) comprising derived and/or modified sequence from LASV(Lassa virus/H.sapiens-wt/NGA/2016/ISTH_0009;Clade II)__AVO03571__GPCmut10 (opt1)
aggagagucccgcagucggcguccagcggcucugcuuguucgugugugugucguugcaggccuuauucaagcuuaccaugggccagaucaucaccuucuuccaggaggugccccacgucaucgaggaggugaugaacaucgugcugaucgcccucagccugcuggccauccucaaggggaucuacaacgucgcgaccugcggccugcuggggcucguguccuuccugcugcucugcggccgcagcugcuccacgaccuacaaggggguguacgagcugcagacccuggagcucgacauggccagccugaacaugugcaugccgcuguccugcaccaagaacaacagccaccacuacaucauggucggcaacgagacgggccucgagcugacccugaccaacaccuccaucaucaaccacaaguucugcaaccucagcgacgcccacaagaagaaccuguacgaccacgcccugauguccaucaucagcacguuccaccucuccauccccaacuucaaccaguacgaggccaugagcugcgacuucaacgggggccggaucuccgugcaguacaaccugagccacuccuacgcgguggacgccgccaaccacugcgggaccaucgccaacggcguccugcagaccuucaugcgcauggcguggggcgggagcuacaucgcccucgacuccggcaaggggagcugggacugcaucaugaccuccuaccaguaccugaucauccagaacacgaccugggaggaccacugccaguucagccggcccagccccaucggcuaccuggggcuccugucccagcgcacccgggacaucuacaucagccgccggcugcucggcaccuucacguggacccuguccgacagcgagggcaacgagacccccgggggcuacugccugacccgcuggaugcucaucgaggccgagcugaagugcuucgggaacacggccguggccaagugcaacgagaagcacgacgaggaguucugcgacaugcugcggcuguucgacuucugcaagcaggcgauccgccggcugaagaccgaggcccagauguccauccagcugaucaacaaggccgugaacgcccucaucaacgaccagcugaucaugaagaaccaccuccgcgacaucaugggcauccccuacugcaacuacagcaaguacugguaccucaaccacaccgucaccgggaagacgucccugccccggugcuggcuggugagcaacggcuccuaccucaacgagacccacuucagcgacgacaucgagcagcaggccgacaacaugaucaccgagcugcugcagaaggaguacaucgaccgccagggcaagaccccgcuggggcucguggaccuguucgucuucuccacgagcuucuaccugaucuccaucuuccuccaccuggugaagaucccgacccaccggcacaucaccggcaagcccugccccaagccccaccgccugaaccacauggggaucugcagcugcggccucuacaaccacccgggggugcccgucaaguggaagcggugaggacuagucccuguucccagagcccacuuuuuuuucuuuuuuugaaauaaaauagccugucuuucagaucuaaaaaaaaaaaaaaaaaaaaaaaaaaaaaaaaaaaaaaaaaaaaaaaaaaaaaaaaaaaaaaaaaaaaaaaaaaaaaaaaaaaaaaaaaaaaaaaaaaaa

SEQ ID NO: 36977 - RNA, 1721 nt, Artificial Sequence
  mRNA product Design a-1 (A100) comprising derived and/or modified sequence from LASV(Lassa virus/H.sapiens-wt/NGA/2016/ISTH_0017;Clade II)__AVO03567__GPCmut10 (opt1)
aggagagucccgcagucggcguccagcggcucugcuuguucgugugugugucguugcaggccuuauucaagcuuaccaugggccagaucaucaccuucuuccaggaggugccccacgucaucgaggaggugaugaacaucgugcugaucgcccucagccugcuggccauccucaaggggaucuacaacgucgcgaccugcggccuguucgggcugguguccuuccuccugcugugcggccgcagcugcuccacgaccuacaaggggguguacgagcuccagacccuggagcuggacauggccagccucaacaugugcaugccgcuguccugcaccaagaacaacagccaccacuacaucauggucggcaacgagacgggccuggagcucacccugaccaacaccuccaucaucaaccacaaguucugcaaccugagcgacgcccacaagaagaaccucuacgaccacgcccugauguccaucaucagcacguuccaccuguccauccccaacuucaaccaguacgaggccaugagcugcgacuucaacgggggcaagaucuccgugcaguacaaccucagccacaccuacgcgaucgacgccgccaaccacugcgggaccaucgccaacggcgugcugcagaccuucaugcggauggcguggggcggguccuacaucgcccuggacagcggcaagggguccugggacugcaucaugacgagcuaccaguaccucaucauccagaacaccaccugggaggaccacugccaguucucccgccccagccccaucggcuaccuggggcugcucagccagcggacccgcgacaucuacaucucccggcgccugcugggcacguucaccuggacccucagcgacuccgagggcaacgagacccccgggggcuacugccugacgcgguggaugcugaucgaggccgagcucaagugcuucgggaacaccgccgucgccaagugcaacgagaagcacgacgaggaguucugcgacaugcugcgccuguucgacuucugcaagcaggcgauccggcgccucaagaccgaggcccagaugagcauccagcugaucaacaaggccgugaacgcccugaucaacgaccagcucaucaugaagaaccaccuccgggacaucaugggcaucccguacugcaacuacuccaaguacugguaccugaaccacaccgugacggggaagaccagccugccccgcugcuggcuggucuccaacggcagcuaccugaacgagacccacuucuccgacgacaucgagcagcaggccgacaacaugaucaccgagcuccugcagaaggaguacauggaccggcagggcaagacgccccuggggcugguggaccucuucguguucagcaccuccuucuaccugaucagcaucuuccugcaccucguccgcaucccgacccaccggcacgugaucggcaagcccugccccaagccccaccgccugaaccacauggggaucugcuccugcggccuguacaagcacccgggggugcccgucaaguggaagcggugaggacuagucccuguucccagagcccacuuuuuuuucuuuuuuugaaauaaaauagccugucuuucagaucuaaaaaaaaaaaaaaaaaaaaaaaaaaaaaaaaaaaaaaaaaaaaaaaaaaaaaaaaaaaaaaaaaaaaaaaaaaaaaaaaaaaaaaaaaaaaaaaaaaaa

SEQ ID NO: 36978 - RNA, 1721 nt, Artificial Sequence
  mRNA product Design a-1 (A100) comprising derived and/or modified sequence from LASV(Lassa virus/H.sapiens-wt/NGA/2018/ISTH_0959;Clade II)__AVV65099__GPCmut10 (opt1)
aggagagucccgcagucggcguccagcggcucugcuuguucgugugugugucguugcaggccuuauucaagcuuaccaugggccagaucaucaccuucuuccaggaggugccccacgucaucgaggaggugaugaacaucgugcugaucgcccucagccugcuggccauccucaaggggaucuacaacgucgugaccugcggccuguucgggcugguguccuuccuccugcugugcggccgcagcugcuccacgaccuacaagggggucuacgagcuccagacccuggagcuggacauggcgagccucaacaugugcaugccgcuguccugcaccaagaacaacagccaccacuacaucauggugggcaacgagacgggccuggagcucacccugaccaacaccuccaucaucaaccacaaguucugcaaccugagcgacgcccacaagaagaaccucuacgaccacgcccugauguccaucaucagcacguuccaccuguccauccccaacuucaaccaguacgaggccaugagcugcgacuucaacgggggcaagaucuccgugcaguacaaccucagccacgccuacgcgaucgacgccgccaaccacugcgggaccaucgccaacggcguccugcagaccuucaugcggauggcguggggcggguccuacaucgcccuggacagcggcaagggguccugggacugcaucaugaccagcuaccaguaccucaucauccagaacacgaccugggaggaccacugccaguucucccgccccagccccaucggcuaccuggggcugcucagccagcggacccgcgacaucuacaucucccggcgccugcugggcaccuucacguggacccucagcgacuccgagggcaacgagacccccgggggcuacugccugacccgguggaugcugaucgaggccgagcucaagugcuucgggaacacggccguggccaagugcaacgagaagcacgacgaggaguucugcgacaugcugcgccuguucgacuucugcaagcaggcgauccggcgccucaagaccgaggcccagaugagcauccagcugaucaacaaggccgugaacgcccugaucaacgaccagcucaucaugaagaaccaccuccgggacaucaugggcauccccuacugcaacuacuccaaguacugguaccugaaccacaccgucaccgggaagacgagccugccccgcugcuggcugguguccaacggcagcuaccugaacgagacccacuucuccgacgacaucgagcagcaggccgacaacaugaucaccgagcuccugcagaaggaguacaucgaccggcagggcaagaccccgcuggggcugguggaccucuucgucuucagcacguccuucuaccugaucagcaucuuccugcaccucgugaagaucccgacccaccgccacgugaucggcaagcccugccccaagccccaccggcugaaccacauggggaucugcuccugcggccuguacaagcacccggggguccccgugaaguggaagcgcugaggacuagucccuguucccagagcccacuuuuuuuucuuuuuuugaaauaaaauagccugucuuucagaucuaaaaaaaaaaaaaaaaaaaaaaaaaaaaaaaaaaaaaaaaaaaaaaaaaaaaaaaaaaaaaaaaaaaaaaaaaaaaaaaaaaaaaaaaaaaaaaaaaaaa

SEQ ID NO: 36979 - RNA, 1721 nt, Artificial Sequence
  mRNA product Design a-1 (A100) comprising derived and/or modified sequence from LASV(LASV003-NIG-2008;Clade II)__AIT17580__GPCmut10 (opt1)
aggagagucccgcagucggcguccagcggcucugcuuguucgugugugugucguugcaggccuuauucaagcuuaccaugggccagaucaucaccuucuuccaggaggugccccacgucaucgaggaggugaugaacaucgugcugaucgcccucagccugcuggccauccucaaggggaucuacaacgucgcgaccugcggccuguucgggcugguguccuuccuccugcugugcggccgcagcugcuccacgaccuacaaggggguguacgagcuccagacccuggagcuggacauggccagccucaacaugugcaugccgcuguccugcaccaagaacaacagccaccacuacaucauggucggcaacgagacgggccuggagcucacccugaccaacaccuccaucaucaaccacaaguucugcaaccugagcgacgcccacaagaagaaccucuacgaccacgcccugauguccaucaucagcacguuccaccuguccauccccaacuucaaccaguacgaggccaugagcugcgacuucaacgggggcaagaucuccgugcaguacaaccucagccacaccuacgcgguggacgccgccaaccacugcgggaccaucgccaacggcguccugcagaccuucaugcggauggcguggggcggguccuacaucgcccuggacagcggcaagggguccugggacugcaucaugacgagcuaccaguaccucaucauccagaacaccaccugggaggaccacugccaguucucccgccccagccccaucggcuaccuggggcugcucagccagcggacccgcgacaucuacaucucccggcgccugcugggcacguucaccuggacccucagcgacuccgagagcaacgagaccccgggcggguacugccugacgcgguggaugcugaucgaggccgagcucaagugcuucggcaacaccgccguggccaagugcaacgagaagcacgacgaggaguucugcgacaugcugcgccuguucgacuucugcaagcaggcgauccggcgccucaaggccgaggcccagauguccauccagcugaucaacaaggccgugaacgcccugaucaacgaccagcucaucaugaagaaccaccuccgggacaucauggggauccccuacugcaacuacagcaaguacugguaccugaaccacaccgucaccggccgcacgucccugccccggugcuggcuggugagcaacggguccuaccugaacgagacccacuucagcgacgacaucgagcagcaggcggacaacaugaucaccgagcuccugcagaaggaguacauggaccgccagggcaagacgccccugggccugguggaccucuucgucuucuccaccagcuucuaccugaucuccaucuuccugcaccucgugaagaucccgacccaccggcacgugaucgggaagcccugccccaagccccaccgccugaaccacaugggcaucugcagcugcgggcuguacaagcacccgggcguccccgugaaguggaagcggugaggacuagucccuguucccagagcccacuuuuuuuucuuuuuuugaaauaaaauagccugucuuucagaucuaaaaaaaaaaaaaaaaaaaaaaaaaaaaaaaaaaaaaaaaaaaaaaaaaaaaaaaaaaaaaaaaaaaaaaaaaaaaaaaaaaaaaaaaaaaaaaaaaaaa

SEQ ID NO: 36980 - RNA, 1721 nt, Artificial Sequence
  mRNA product Design a-1 (A100) comprising derived and/or modified sequence from LASV(LASV035-NIG-2009;Clade II)__AIT17588__GPCmut10 (opt1)
aggagagucccgcagucggcguccagcggcucugcuuguucgugugugugucguugcaggccuuauucaagcuuaccaugggccagaucaucaccuucuuccaggaggugccccacgucaucgaggaggugaugaacaucgugcugaucgcccucagccugcuggccauccucaaggggaucuacaacgucgcgaccugcggccuguucgggcugguguccuuccuccugcugugcggccgcagcugcuccacgaccuacaaggggguguacgagcuccagacccuggagcuggacauggccagccucaacaugugcaugccgcuguccugcaccaagaacaacagccaccacuacaucauggucggcaacgagacgggccuggagcucacccugaccaacaccuccaucaucaaccacaaguucugcaaccugagcgacgcccacaagaagaaccucuacgaccacgcccugauguccaucaucagcacguuccaccuguccauccccaacuucaaccaguacgaggccaugagcugcgacuucaacgggggcaagaucuccgugcaguacaaccucagccacgcguacgccguggacgccgccaaccacugcgggaccaucgcgaacggcguccugcagaccuucaugcggauggccuggggcggguccuacaucgcccuggacagcggcaagggguccugggacugcaucaugaccagcuaccaguaccucaucauccagaacacgaccugggaggaccacugccaguucucccgccccagccccaucggcuaccuggggcugcucagccagcggacccgcgacaucuacaucucccggcgccugcugggcaccuucacguggacccucagcgacuccgagggcaacgagacccccgggggcuacugccugacccgguggaugcugaucgaggccgagcucaagugcuucgggaacacggccguggcgaagugcaacgagaagcacgacgaggaguucugcgacaugcugcgccuguucgacuucugcaagcaggccauccggcgccucaaggccgaggcccagaugagcauccagcugaucaacaaggccgugaacgcgcugaucaacgaccagcucaucaugaagaaccaccuccgggacaucaugggcauccccuacugcaacuacuccaaguacugguaccugaaccacaccgucaccgggaagaccagccugccccgcugcuggcugguguccaacggcagcuaccugaacgagacgcacuucuccgacgacaucgagcagcaggccgacaacaugaucaccgagcuccugcagaaggaguacaucgaccggcagggcaagaccccgcuggggcugguggaccucuucgucuucagcaccuccuucuaccugaucagcaucuuccugcaccucgugaagaucccgacgcaccgccacgugaucggcaagcccugccccaagccccaccggcugaaccacauggggaucugcuccugcggccuguacaagcacccggggguccccgugaaguggaagcgcugaggacuagucccuguucccagagcccacuuuuuuuucuuuuuuugaaauaaaauagccugucuuucagaucuaaaaaaaaaaaaaaaaaaaaaaaaaaaaaaaaaaaaaaaaaaaaaaaaaaaaaaaaaaaaaaaaaaaaaaaaaaaaaaaaaaaaaaaaaaaaaaaaaaaa

SEQ ID NO: 36981 - RNA, 1721 nt, Artificial Sequence
  mRNA product Design a-1 (A100) comprising derived and/or modified sequence from LASV(LASV1000-NIG-2009;Clade II)__AIT17782__GPCmut10 (opt1)
aggagagucccgcagucggcguccagcggcucugcuuguucgugugugugucguugcaggccuuauucaagcuuaccaugggccagaucaucaccuucuuccaggaggugccccacgucaucgaggaggugaugaacaucgugcugaucgcccucagccugcuggccauccucaaggggaucuacaacgucgcgaccugcggccuguucgggcugguguccuuccuccugcugugcggccgcagcugcuccacgaccuacaaggggguguacgagcuccagacccuggagcuggacauggccagccucaacaugugcaugccgcuguccugcaccaagaacaacagccaccacuacaucauggucggcaacgagacgggccuggagcucacccugaccaacaccuccaucaucaaccacaaguucugcaaccugagcgacgcccacaagaagaaccucuacgaccacgcccugauguccaucaucagcacguuccaccuguccauccccaacuucaaccaguacgaggccaugagcugcgacuucaacgggggcaagaucuccgugcaguacaaccucagccacaccuacgcgguggacgccgccaaccacugcgggaccaucgccaacggcguccugcagaccuucaugcggauggcguggggcggguccuacaucgcccuggacagcggcaagggguccugggacugcaucaugacgagcuaccaguaccucaucauccagaacaccaccugggaggaccacugccaguucucccgccccagccccaucggcuaccuggggcugcucagccagcggacccgcgacaucuacaucucccggcgccugcugggcacguucaccuggacccucagcgacuccgagggcaacgagacccccgggggcuacugccugacgcgguggaugcugaucgaggccgagcucaagugcuucgggaacaccgccguggccaagugcaacgagaagcacgacgaggaguucugcgacaugcugcgccuguucgacuucugcaagcaggcgaucaagcggcucaagaccgaggcccagaugagcauccagcugaucaacaaggccgugaacgcccugaucaacgaccagcucaucaugaagaaccaccuccgcgacaucaugggcaucccguacugcaacuacuccaaguacugguaccugaaccacaccgucacggggaagaccagccugccccggugcuggcugguguccaacggcagcuaccugaacgagacccacuucuccgacgacaucgagcagcaggccgacaacaugaucaccgagcuccugcagaaggaguacaucgaccgccagggcaagacgccccuggggcugguggaccucuucgucuucagcaccuccuucuaccugaucagcaucuuccugcaccucgugaagaucccgacccaccggcacguggucggcaagcccugccccaagccccaccgccugaaccacauggggaucugcuccugcggccuguacaagcacccgggggugcccgugaaguggaagcggugaggacuagucccuguucccagagcccacuuuuuuuucuuuuuuugaaauaaaauagccugucuuucagaucuaaaaaaaaaaaaaaaaaaaaaaaaaaaaaaaaaaaaaaaaaaaaaaaaaaaaaaaaaaaaaaaaaaaaaaaaaaaaaaaaaaaaaaaaaaaaaaaaaaaa

SEQ ID NO: 36982 - RNA, 1721 nt, Artificial Sequence
  mRNA product Design a-1 (A100) comprising derived and/or modified sequence from LASV(LASV221-NIG-2010;Clade II)__AIT17624__GPCmut10 (opt1)
aggagagucccgcagucggcguccagcggcucugcuuguucgugugugugucguugcaggccuuauucaagcuuaccaugggccagaucaucaccuucuuccaggaggugccccacgucaucgaggaggugaugaacaucgugcugaucgcccucagccugcuggccauccucaaggggaucuacaacgucgcgaccugcggccuguucgggcugguguccuuccuccugcugugcggccgcagcugcuccacgaccuacaaggggguguacgagcuccagacccuggagcuggacauggccagccucaacaugugcaugccgcuguccugcaccaagaacaacagccaccacuacaucauggucggcaacgagacgggccuggagcucacccugaccaacaccuccaucaucaaccacaaguucugcaaccugagcgacgcccacaagaagaaccucuacgaccacgcccugauguccaucaucagcacguuccaccuguccauccccaacuucaaccaguacgaggccaugagcugcgacuucaacgggggcaagaucuccgugcaguacaaccucagccacaccuacgcgaucgacgccgccaaccacugcgggaccaucgccaacggcgugcugcagaccuucaugcggauggcguggggcggguccuacaucgcccuggacagcggcaagggguccugggacugcaucaugacgagcuaccaguaccucaucauccagaacaccaccugggaggaccacugccaguucucccgccccagccccaucggcuaccuggggcugcucagccagcggacccgcgacaucuacaucucccggcgccugcugggcacguucaccuggacccucagcgacuccgagggcaacgagacccccgggggcuacugccugacgcgguggaugcugaucgaggccgagcucaagugcuucgggaacaccgccgucgccaagugcaacgagaagcacgacgaggaguucugcgacaugcugcgccuguucgacuucugcaagcaggcgauccggcgccucaagaccgaggcccagaugagcauccagcugaucaacaaggccgugaacgcccugaucaacgaccagcucaucaugaagaaccaccuccgggacaucaugggcaucccguacugcaacuacuccaaguacugguaccugaaccacaccgugacggggaagaccagccugccccgcugcuggcuggucuccaacggcagcuaccugaacgagacccacuucuccgacgacaucgagcagcaggccgacaacaugaucaccgagaugcuccagaaggaguacauggaccggcagggcaagacgccccuggggcugguggaccuguucguguucagcaccuccuucuaccucaucagcaucuuccugcaccuggucaagaucccgacccaccgccacgugaucggcaagcccugccccaagccccaccggcucaaccacauggggaucugcuccugcggccuguacaagcacccgggggugcccgucaaguggaagcgcugaggacuagucccuguucccagagcccacuuuuuuuucuuuuuuugaaauaaaauagccugucuuucagaucuaaaaaaaaaaaaaaaaaaaaaaaaaaaaaaaaaaaaaaaaaaaaaaaaaaaaaaaaaaaaaaaaaaaaaaaaaaaaaaaaaaaaaaaaaaaaaaaaaaaa

SEQ ID NO: 36983 - RNA, 1721 nt, Artificial Sequence
  mRNA product Design a-1 (A100) comprising derived and/or modified sequence from LASV(LASV237-NIG-2010;Clade II)__AIT17638__GPCmut10 (opt1)
aggagagucccgcagucggcguccagcggcucugcuuguucgugugugugucguugcaggccuuauucaagcuuaccaugggccagaucaucaccuucuuccaggaggugccccacgucaucgaggaggugaugaacaucgugcugaucgcccucagccugcuggccauccucaaggggaucuacaacgucgcgaccugcggccuguucgggcugguguccuuccuccugcugugcggccgcagcugcuccacgaccuacaaggggguguacgagcuccagacccuggagcuggacauggccagccucaacaugugcaugccgcuguccugcaccaagaacaacagccaccacuacaucauggucggcaacgagacgggccuggagcucacccugaccaacaccuccaucaucaaccacaaguucugcaaccugagcgacgcccacaagaaggaccucuacgaccacgcccugauguccaucaucagcacguuccaccuguccauccccaacuucaaccaguacgaggccaugagcugcgacuucaacgggggcaagaucuccgugcaguacaaccucagccacaccuacgcgguggacgccgccaaccacugcgggaccaucgccaacggcguccugcagaccuucaugcggauggcguggggcggguccuacaucgcccuggacagcggcaagggguccugggacugcaucaugacgagcuaccaguaccucaucauccagaacaccaccugggaggaccacugccaguucucccgccccagccccaucggcuaccuggggcugcucagccagcggacccgcgacaucuacaucucccggcgccugcugggcacguucaccuggacccucagcgacuccgagggcaacgagacccccgggggcuacugccugacgcgguggaugcugaucgaggccgagcucaagugcuucgggaacaccgccguggccaagugcaacgagaagcacgacgaggaguucugcgacaugcugcgccuguucgacuucugcaagcaggcgauccggcgccucaagaccgaggcccagaugagcauccagcugaucaacaaggccgugaacgcccugaucaacgaccagcucaucaugaagaaccaccuccgggacaucaugggcaucccguacugcaacuacuccaaguacugguaccugaaccacaccgucacggggaagaccagccugccccgcugcuggcugguguccaacggcagcuaccugaacgagacccacuucuccgacgacaucgagcagcaggccgacaacaugaucaccgagcuccugcagaaggaguacauggaccggcagggcaagacgccccuggggcugguggaccucuucgucuucagcaccuccuucuaccugaucagcaucuuccugcaccucaucaagaucccgacccaccgccacaucaccggcaagcccugccccaagccccaccggcugaaccacauggggaucugcuccugcggccuguacaagcacccgggggugcccgugaaguggaagcgcugaggacuagucccuguucccagagcccacuuuuuuuucuuuuuuugaaauaaaauagccugucuuucagaucuaaaaaaaaaaaaaaaaaaaaaaaaaaaaaaaaaaaaaaaaaaaaaaaaaaaaaaaaaaaaaaaaaaaaaaaaaaaaaaaaaaaaaaaaaaaaaaaaaaaa

SEQ ID NO: 36984 - RNA, 1721 nt, Artificial Sequence
  mRNA product Design a-1 (A100) comprising derived and/or modified sequence from LASV(LASV253-NIG-2011;Clade II)__AIT17670__GPCmut10 (opt1)
aggagagucccgcagucggcguccagcggcucugcuuguucgugugugugucguugcaggccuuauucaagcuuaccaugggccagaucaucaccuucuuccaggaggugccccacgucaucgaggaggugaugaacaucgugcugaucgcccucagccugcuggccauccucaaggggaucuacaacgucgcgaccugcggccuguucgggcugguguccuuccuccugcugugcggccgcagcugcuccacgaccuacaaggggguguacgagcuccagacccuggagcuggacauggccagccucaacaugugcaugccgcuguccugcaccaagaacaacagccaccacuacaucauggucggcaacgagacgggccuggagcucacccugaccaacaccuccaucaucaaccacaaguucugcaaccugagcgacgcccacaagaagaaccucuacgaccacgcccugauguccaucaucagcacguuccaccuguccauccccaacuucaaccaguacgaggccaugagcugcgacuucaacgggggcaagaucuccgugcaguacaaccucagccacaccuacgcgguggacgccgccaaccacugcgggaccaucgccaacggcguccugcagaccuucaugcggauggcguggggcggguccuacaucgcccuggacagcggcaagggguccugggacugcaucaugacgagcuaccaguaccucaucauccagaacaccaccugggaggaccacugccaguucucccgccccagccccaucggcuaccuggggcugcucagccagcggacccgcgacaucuacaucucccggcgccugcugggcacguucaccuggacccucagcgacuccgagggcaacgagacccccgggggcuacugccugacgcgguggaugcugaucgaggccgagcucaagugcuucgggaacaccgccguggccaagugcaacgagaagcacgacgaggaguucugcgacaugcugcgccuguucgacuucugcaagcaggcgauccggcgccucaaggccgaggcccagaugagcauccagcugaucaacaaggccgugaacgcccugaucaacgaccagcucaucaugaagaaccaccuccgggacaucaugggcauccccuacugcaacuacuccaaguacugguaccugaaccacaccgucaccgggcgcacgagccugccccggugcuggcugguguccaacggcagcuaccugaacgagacccacuucuccgacgacaucgagcagcaggcggacaacaugaucaccgagcuccugcagaaggaguacaucgaccgccagggcaagaccccgcuggggcugguggaccucuucgucuucagcacguccuucuaccugaucagcaucuuccugcaccucgugaagaucccgacccaccggcacaucaucggcaagcccugccccaagccccaccgccugaaccacauggggaucugcuccugcggccuguacaagcacccgggggugcccgucaaguggaagcggugaggacuagucccuguucccagagcccacuuuuuuuucuuuuuuugaaauaaaauagccugucuuucagaucuaaaaaaaaaaaaaaaaaaaaaaaaaaaaaaaaaaaaaaaaaaaaaaaaaaaaaaaaaaaaaaaaaaaaaaaaaaaaaaaaaaaaaaaaaaaaaaaaaaaa

SEQ ID NO: 36985 - RNA, 1721 nt, Artificial Sequence
  mRNA product Design a-1 (A100) comprising derived and/or modified sequence from LASV(LASV254-NIG-2011;Clade II)__AIT17674__GPCmut10 (opt1)
aggagagucccgcagucggcguccagcggcucugcuuguucgugugugugucguugcaggccuuauucaagcuuaccaugggccagaucaucaccuucuuccaggaggugccccacgucaucgaggaggugaugaacaucgugcugaucgcccucagccugcuggccauccucaaggggaucuacaacgucgcgaccugcggccuguucgggcugguguccuuccuccugcugugcggccgcagcugcuccacgaccuacaaggggguguacgagcuccagacccuggagcuggacaugaccaaccucaacaugugcaugccgcugagcugcacgaagaacaacucccaccacuacaucauggucggcaacgagaccggccuggagcucacccugaccaacacgagcaucaucaaccacaaguucugcaaccuguccgacgcccacaagaagaaccucuacaaccacgcccugaugagcaucaucuccaccuuccaccugagcauccccaacuucaaccaguacgaggccauguccugcgacuucaacgggggcaagaucagcgugcaguacaaccucucccacagcuacgccguggacgcggccaaccacugcgggaccaucgccaacggcguccugcagaccuucaugcggauggccuggggcggguccuacaucgcgcuggacagcggcaaggggaacugggacugcaucaugacguccuaccaguaccucaucauccagaacaccaccugggaggaccacugccaguucagccgccccucccccaucggcuaccuggggcugcucagccagcggacccgcgacaucuacaucagccggcgccugcugggcacguucaccuggacccucuccgacagcgagggcaacgagacccccgggggcuacugccugacgcgguggaugcugaucgaggccgagcucaagugcuucgggaacaccgccguggccaagugcaacgagaagcacgacgaggaguucugcgacaugcugcgccuguucgacuucugcaagcaggccauccggcgccucaagaccgaggcgcaggccaacauccagcugaucaacaaggccgugaacgcccugaucaacgaccagcucaucaugaagaaccaccuccgggacaucaugggcaucccguacugcaacuacuccaaguacugguaccugaaccacaccgucacggggaagaccagccugccccgcugcuggcugguguccaacggcagcuaccugaacgagacccacuucuccgacgacaucgagcagcaggccgacaacaugaucaccgagcuccugcagaaggaguacauggaccggcagggcaagacgccccuggggcugguggaccucuucgucuucagcaccuccuucuaccugaucagcaucuuccugcaccucgugaagaucccgacccaccgccacgugaucggcaagcccugccccaagccccaccggcugaaccacauggggaucugcuccugcggccuguacaagcacccggggguccccgugaaguggaagcgcugaggacuagucccuguucccagagcccacuuuuuuuucuuuuuuugaaauaaaauagccugucuuucagaucuaaaaaaaaaaaaaaaaaaaaaaaaaaaaaaaaaaaaaaaaaaaaaaaaaaaaaaaaaaaaaaaaaaaaaaaaaaaaaaaaaaaaaaaaaaaaaaaaaaaa

SEQ ID NO: 36986 - RNA, 1721 nt, Artificial Sequence
  mRNA product Design a-1 (A100) comprising derived and/or modified sequence from LASV(Nig08-A19;Clade III)__ADU56618__GPCmut10 (opt1)
aggagagucccgcagucggcguccagcggcucugcuuguucgugugugugucguugcaggccuuauucaagcuuaccaugggccagaucgugaccuucuuccaggaggucccccacgugaucgaggaggugaugaacaucguccugaucgcccucagcauccuggccauccugaaggggcucuacaacaucgcgaccugcggccugaucgggcuggugacguuccuccugcuguccggccgcagcugcuccaugaccuacaaggggguguacgagcuccagacccuggagcugaacaugaacacccucaacaugugcaugccgcugagcugcacgaagaacaacucccaccacuacaucauggucggcaacgagaccggccuggagcucacccugaccaacacgagccugcuccaccacaaguucugcaaccuguccgacgcccacaagaagaaccuguacgaccacacccucaugagcaucaucuccaccuuccaccugagcauccccaacuucaaccaguacgaggccauguccugcgacuucaacgggggcaagaucaccgugcaguacaaccugagccacuccuacgccaucgacgccgcgaaccacugcgggacgguggccaacggcguccuccagaccuucaugcggauggccuggggcgggagcuacaucgcccuggacuccggccgcgggaagugggacugcaucaugaccagcuaccaguaccugaucauccagaacaccacgugggaggaccacugccaguucucccggcccagccccaucggcuaccucgggcugcugucccagcgcacccgggacaucuacaucagccgccggcuccugggcaccuucaccuggacgcugagcgacuccgagggcaacgagacccccgggggcuacugccucacccgcuggaugcugaucgaggcggagcugaagugcuucgggaacaccgccguggccaagugcaacgagaagcacgacgaggaguucugcgacaugcuccggcuguucgacuucugcaagcaggccauccgccggcugaaggccgaggcgcagaugagcauccagcucaucaacaaggccgugaacgcccugaucaacgaccagcugaucaugaagaaccaccuccgcgacaucaugggcauccccuacugcaacuacuccaaguacugguaccugaaccacacgagcaccgggcggaccucccugccccgcugcuggcucgucagcaacggcuccuaccugaacgagacccacuucagcgacgacaucgagcagcaggccgacaacaugaucacggagaugcugcagaaggaguaccuggaccggcagggcaagaccccgcucgggcugguggaccuguucguguucuccaccagcuucuaccucaucuccaucuuccugcaccuggucaagaucccgacccaccgccacaucgugggcaagcccugccccaagccccaccggcucaaccacauggggaucugcagcugcggccuguacaagcagccgggggugcccguccgcuggaagcggugaggacuagucccuguucccagagcccacuuuuuuuucuuuuuuugaaauaaaauagccugucuuucagaucuaaaaaaaaaaaaaaaaaaaaaaaaaaaaaaaaaaaaaaaaaaaaaaaaaaaaaaaaaaaaaaaaaaaaaaaaaaaaaaaaaaaaaaaaaaaaaaaaaaaa

SEQ ID NO: 36987 - RNA, 1724 nt, Artificial Sequence
  mRNA product Design a-1 (A100) comprising derived and/or modified sequence from LASV(G1180-SLE-2010;Clade IV)__AIT17168__GPCmut10 (opt1)
aggagagucccgcagucggcguccagcggcucugcuuguucgugugugugucguugcaggccuuauucaagcuuaccaugggccagaucgugaccuucuuccaggaggucccccacgugaucgaggaggugaugaacaucguccugaucgcccucagcauccuggccgugcugaaggggcucuacaacuucgcgaccugcggccugguggggcugcucacguuccugcugcucugcggccgcuccugcaccgccagccgguacaagggggucuacgagcugcagacccuggagcucaacauggagacccugaacaugugcaugccgcuguccugcacgaagaacaacagccaccacuacaucauggugggcaacgagaccggccucgagcugacccugaccaacacguccaucaucaaccacaaguucugcaaccucagcgacgcccacaagaagaaccuguacgaccacgcccugauguccaucaucagcaccuuccaccucuccauccccaacuucaaccaguacgaggccaugagcugcgacuucaacgggggcaagaucuccgugcaguacaaccugagccacuccuacgcgggggacgccgccaaccacugcggcaccgucgccaacggggugcugcagaccuucaugcgcauggcguggggcggcagcuacaucgcccucgacuccgggcacggcagcugggacugcaucaugacguccuaccaguaccugaucauccagaacaccaccugggaggaccacugccaguucagccggcccucccccaucggguaccugggccuccugagccagcgcacccgggacaucuacaucagccgccggcugcucggcacguucaccuggacccuguccgacagcgaggggaaggacaccccgggcggguacugccugacgcgcuggaugcucaucgaggccgagcugaagugcuucggcaacaccgccguggccaagugcaacgagaagcacgacgaggaguucugcgacaugcugcggcuguucgacuucugcaagcaggcgauccagcgccugaaggccgaggcccagauguccauccagcugaucaacaaggccgucaacgcccucaucaacgaccagcugaucaugaagaaccaccuccgggacaucauggggauccccuacugcaacuacagcaaguacugguaccucaaccacaccaccacgggcaagaccucccugcccaagugcuggcuggugagcaacggcuccuaccucaacgagacccacuucagcgacgacaucgagcagcaggcggacaacaugaucaccgagaugcugcagaaggaguacauggagcgccaggggaagacgccccugggccugguggaccucuucgucuucuccaccagcuucuaccugaucuccaucuuccugcaccucgugaagaucccgacccaccggcacaucgugggcaagagcugccccaagccccaccgccugaaccacauggggaucugcuccugcgggcuguacaagcagcccggcgucccggugaaguggaagcggugaggacuagucccuguucccagagcccacuuuuuuuucuuuuuuugaaauaaaauagccugucuuucagaucuaaaaaaaaaaaaaaaaaaaaaaaaaaaaaaaaaaaaaaaaaaaaaaaaaaaaaaaaaaaaaaaaaaaaaaaaaaaaaaaaaaaaaaaaaaaaaaaaaaaa

SEQ ID NO: 36988 - RNA, 1724 nt, Artificial Sequence
  mRNA product Design a-1 (A100) comprising derived and/or modified sequence from LASV(G1442-SLE-2011;Clade IV)__AIT17180__GPCmut10 (opt1)
aggagagucccgcagucggcguccagcggcucugcuuguucgugugugugucguugcaggccuuauucaagcuuaccaugggccagaucgugaccuucuuccaggaggucccccacgugaucgaggaggugaugaacaucguccugaucgcccucagcauccuggccgugcugaaggggcucuacaacguggcgaccugcggccugaucgggcuggucaccuuccuccugcugugcggccgcuccugcaccaccacccucuacaaggggguguacgagcugcagacgcuggagcucaacauggagacccugaacaugugcaugccgcugagcugcaccaagaacaacucccaccacuacauccgggugggcaacgagaccggccucgagcugacgcugaccaacaccagcaucaucaaccacaaguucugcaaccucuccgacgcccacaagaagaaccuguacgaccacgcccugaugagcaucaucuccaccuuccaccucagcauccccaacuucaaccaguacgaggccauguccugcgacuucaacgggggcaagaucagcguccaguacaaccugucccacagcuacgccggggacgcggccaaccacugcggcacgguggccaacggggugcugcagaccuucaugcgcauggccuggggcggcuccuacaucgcgcucgacagcgggcggggcaacugggacugcaucaugaccuccuaccaguaccugaucauccagaacaccacgugggacgaccacugccaguucagccgccccucccccaucggguaccugggccuccugagccagcggacccgcgacgucuacaucucccggcgccugcucggcaccuucaccuggacgcugagcgacagcgaggggaaggacaccccgggcggguacugccugacccgguggaugcucaucgaggccgagcugaagugcuucggcaacaccgccguggccaagugcaacgagaagcacgacgaggaguucugcgacaugcugcgccucuucgacuucugcaagcaggccauccagcggcugaaggcggaggcccagauguccauccagcugaucaacaaggccgugaacgcccucaucaacgaccagcugaucaugaagaaccaccuccgcgacaucauggggauccccuacugcaacuacagcaaguacugguaccugaacaacacggccaccggcaagaccucccugcccaagugcuggcugaucagcaacggcuccuaccucaacgagacccacuucagcgacgacaucgagcaggaggcggacaacaugaucacggagaugcugcagaaggaguacauggagcggcaggggaagacgccccugggccuggucgaccucuucguguucuccaccagcuucuaccugaucuccaucuuccugcaccucgugaagaucccgacccaccgccacaucgucggcaagagcugccccaagccccaccggcugaaccacauggggaucugcuccugcgggcuguacaagcagcccggcgugccggugcgcuggaagcggugaggacuagucccuguucccagagcccacuuuuuuuucuuuuuuugaaauaaaauagccugucuuucagaucuaaaaaaaaaaaaaaaaaaaaaaaaaaaaaaaaaaaaaaaaaaaaaaaaaaaaaaaaaaaaaaaaaaaaaaaaaaaaaaaaaaaaaaaaaaaaaaaaaaaa

SEQ ID NO: 36989 - RNA, 1724 nt, Artificial Sequence
  mRNA product Design a-1 (A100) comprising derived and/or modified sequence from LASV(G3010-SLE-2013;Clade IV)__AIT17344__GPCmut10 (opt1)
aggagagucccgcagucggcguccagcggcucugcuuguucgugugugugucguugcaggccuuauucaagcuuaccaugggccagaucgugaccuucuuccaggaggucccccacgugaucgaggaggugaugaacaucguccugaucgcccucagcauccuggccgugcugaaggggcucuacaacuucgcgaccugcggccugguggggcuggucacguuccuccugcugugcggccgcuccugcaccaccagccucuacaaggggguguacgagcugcagacccuggagcucaacauggagacgcugaacaugugcaugccgcuguccugcaccaagaacaacagccaccacuacaucauggugggcaacgagaccggccucgagcugacccugacgaacaccuccaucaucaaccacaaguucugcaaccucagcgacgcccacaagaagaaccuguacaaccacgcccugauguccaucaucagcaccuuccaccucuccauccccaacuucaaccaguacgaggccaugagcugcgacuucaacgggggcaagaucuccguccaguacaaccugagccacuccuacgccggggacgcggccagccacugcggcaccguggccaacggggugcugcagacguucaugcggauggccuggggcggcuccuacaucgcgcucgacagcggguacggcaagugggacugcaucaugaccuccuaccaguaccugaucauccagaacaccaccugggaggaccacugccaguucagccgccccucccccaucggguaccugggccuccugagccagcggacgcgcgacaucuacaucagccggcgccugcucggcaccuucaccuggacccuguccgacagcgaggggaaggacacgccgggcggguacugccugacccgguggaugcucaucgaggccgagcugaagugcuucggcaacaccgccgucgccaagugcaacgagaagcacgacgaggaguucugcgacaugcugcgccucuucgacuucugcaagcaggccauccagcggcugaagaccgaggcgcagauguccauccagcugaucaacaaggccgugaacgcccucaucaacgaccagcugaucaugaagaaccaccuccgcgacaucauggggauccccuacugcaacuacagcaaguacugguaccugaaccacacgaccaccggcaagaccucccugcccaagugcuggcuggugagcaacggcuccuaccucaacgagacgcacuucagcgacgacaucgagcagcaggccgacaacaugaucaccgagaugcugcagaaggaguacauggagcggcaggggaagacgccccugggccuggucgaccucuucguguucuccaccagcuucuaccugaucuccaucuuccugcaccucgugaagaucccgacccaccgccacaucgucggcaagagcugccccaagccccaccggcugaaccacauggggaucugcuccugcgggcuguacaagcagcccggcgugccggugcgcuggaagcggugaggacuagucccuguucccagagcccacuuuuuuuucuuuuuuugaaauaaaauagccugucuuucagaucuaaaaaaaaaaaaaaaaaaaaaaaaaaaaaaaaaaaaaaaaaaaaaaaaaaaaaaaaaaaaaaaaaaaaaaaaaaaaaaaaaaaaaaaaaaaaaaaaaaaa

SEQ ID NO: 36990 - RNA, 1724 nt, Artificial Sequence
  mRNA product Design a-1 (A100) comprising derived and/or modified sequence from LASV(G502-SLE-2009;Clade IV)__AIT17126__GPCmut10 (opt1)
aggagagucccgcagucggcguccagcggcucugcuuguucgugugugugucguugcaggccuuauucaagcuuaccaugggccagaucgugaccuucuuccaggaggucccccacgugaucgaggaggugaugaacaucguccugaucgcccucagcauccuggccgugcugaaggggcucuacaacuucgcgaccugcggccugguggggcugcucacguuccugcugcucugcggccgcuccugcaccaccgggcuguacaagggcgucuacgagcugcagacccucgagcugaacauggagacgcugaacaugugcaugccgcucagcugcaccaagaacaacucccaccacuacaucauggugggcaacgagaccgggcuggagcugacccucacgaacaccagcaucaucaaccacaaguucugcaaccuguccgacgcccacaagaagaaccuguacgaccacgcccucaugagcaucaucuccaccuuccaccugagcauccccaacuucaaccaguacgaggccauguccugcgacuucaacggcgggaagaucagcgugcaguacaaccugucccacagcuacgccggcgacgcggccgaccacugcgggaccgucgccaacggcgugcuccagacguucaugcggauggccuggggcggguccuacaucgcgcuggacagcggccgcgggcggugggacugcaucaugaccuccuaccaguaccugaucauccagaacaccaccugggaggaccacugccaguucagccgccccucccccaucggcuaccucggccugcugagccagcggacgcgcgacaucuacaucucccggcgccuccuggggaccuucaccuggacccugagcgacagcgagggcaaggacacgcccgggggcuacugccucacccgguggaugcugaucgaggccgagcugaagugcuucgggaacaccgccguggccaagugcaacgagaagcacgacgaggaguucugcgacaugcuccgccuguucgacuucugcaagcaggccauccagcggcugaaggcggaggcccagauguccauccagcucaucaacaaggccgucaacgcccugaucaacgaccagcuggugaugaagaaccaccuccgcgacaucaugggcauccccuacugcaacuacagccgguacugguaccugaaccacaccacgaccggccgcaccucccugcccaagugcuggcucgugagcaacggguccuaccugaacgagacccacuucagcgacgacaucgagcagcaggccgacaacaugaucacggagaugcugcagaaggaguacauggagcggcagggcaagaccccgcuggggcucgucgaccuguucguguucuccaccagcuucuaccugaucuccaucuuccuccaccuggugaagaucccgacccaccgccacaucgucggcaagagcugccccaagccccaccggcugaaccacauggggaucugcuccugcggccucuacaagcagcccggcgugccggugaaguggaagcgcugaggacuagucccuguucccagagcccacuuuuuuuucuuuuuuugaaauaaaauagccugucuuucagaucuaaaaaaaaaaaaaaaaaaaaaaaaaaaaaaaaaaaaaaaaaaaaaaaaaaaaaaaaaaaaaaaaaaaaaaaaaaaaaaaaaaaaaaaaaaaaaaaaaaaa

SEQ ID NO: 36991 - RNA, 1724 nt, Artificial Sequence
  mRNA product Design a-1 (A100) comprising derived and/or modified sequence from LASV(G733-SLE-2010;Clade IV)__AIT17154__GPCmut10 (opt1)
aggagagucccgcagucggcguccagcggcucugcuuguucgugugugugucguugcaggccuuauucaagcuuaccaugggccagaucgugaccuucuuccaggaggucccccacgugaucgaggaggugaugaacaucguccugaucgcccucagcauccuggccgugcugaaggggcucuacaacuucgcgaccugcggcaucguggggcuggucuccuuccugcuccugugcggccgcagcugcacgaccucccuguacaaggggguguacgagcuccagacccuggagcugaacauggagacccucaacaugugcaugccgcugagcugcacgaagaacaacucccaccacuacaucauggugggcaacgagaccggccuggagcucacccugaccaacacgagcaucaucaaccacaaguucugcaaccuguccgacgcccacaagaagaaccucuacgaccacgcccugaugagcaucaucuccaccuuccaccugagcauccccaacuucaaccaguacgaggccauguccugcgacuucaacgggggcaagaucagcguccaguacaaccucucccacagcuacgccggggacgcggccaaccacugcggcaccaucgccaacggggugcugcagaccuucaugcggauggccuggggcggcuccuacaucgcgcuggacagcgggcgcgaccggugggacugcaucaugacguccuaccaguaccucaucauccagaacaccaccugggaggaccacugccaguucagccgccccucccccaucggcuaccuggggcugcucagccagcggacccgcgacaucuacaucagccggcgccugcugggcacguucaccuggacccucuccgacagcgagggcaaggacacccccgggggcuacugccugacgcgguggaugcugaucgaggccgagcucaagugcuucgggaacaccgccguggccaagugcaacgagaagcacgacgaggaguucugcgacaugcugcgccuguucgacuucugcaagcaggccauccagcggcucaaggcggaggcccagauguccauccagcugaucaacaaggccgucaacgcccugaucaacgaccagcucaucaugaagaaccaccuccgcgacaucaugggcaucccguacugcaacuacagcaaguacugguaccugaaccacaccaccacggggaagaccucccugcccaagugcuggcuggugagcaacggcuccuaccugaacgagacccacuucagcgacgacaucgagcagcaggccgacaacaugaucaccgagaugcuccagaaggaguacauggagcggcagggcaagacgccccuggggcugguggaccuguucgucuucuccaccagcuucuaccucaucuccaucuuccugcaccuggugaagaucccgacccaccgccacguggucggcaagagcugccccaagccccaccggcucaaccacauggggaucugcuccugcggccuguacgggcagcccggcgugccggugaaguggaagcgcugaggacuagucccuguucccagagcccacuuuuuuuucuuuuuuugaaauaaaauagccugucuuucagaucuaaaaaaaaaaaaaaaaaaaaaaaaaaaaaaaaaaaaaaaaaaaaaaaaaaaaaaaaaaaaaaaaaaaaaaaaaaaaaaaaaaaaaaaaaaaaaaaaaaaa

SEQ ID NO: 36992 - RNA, 1724 nt, Artificial Sequence
  mRNA product Design a-1 (A100) comprising derived and/or modified sequence from MOPV/LASV reassortant(IGS-1;Clade IV)__AFY05576__GPCmut10 (opt1)
aggagagucccgcagucggcguccagcggcucugcuuguucgugugugugucguugcaggccuuauucaagcuuaccaugggccagaucgugaccuucuuccaggaggucccccacgugaucgaggaggugaugaacaucguccugaucgcccucagcgugcuggccgugcugaaggggcucuacaacuucgcgaccugcggccuggucgggcuggugaccuuccuccugcugugcggccgcuccugcaccaccagccucuacaaggggguguacgagcugcagacccuggagcucaacauggagacgcugaacaugugcaugccgcuguccugcaccaagaacaacagccaccacuacaucauggucggcaacgagaccggccucgagcugacccugacgaacaccuccaucaucaaccacaaguucugcaaccucagcgacgcccacaagaagaaccuguacgaccacgcccugauguccaucaucagcaccuuccaccucuccauccccaacuucaaccaguacgaggccaugagcugcgacuucaacgggggcaagaucuccgugcaguacaaccugagccacuccuacgccggggacgcggccaaccacugcggcaccguggccaacgggguccugcagacguucaugcggauggccuggggcggcagcuacaucgcgcucgacuccgggcgcggcaacugggacugcaucaugaccagcuaccaguaccugaucauccagaacaccaccugggaggaccacugccaguucucccggcccagccccaucggguaccugggccuccugucccagcgcacgcgggacaucuacaucagccgccggcugcucggcaccuucaccuggacccugagcgacuccgagggggaggacacgccgggcggguacugccugacccgcuggaugcucaucgaggccgagcugaagugcuucggcaacaccgccguggccaagugcaacgagaagcacgacgaggaguucugcgacaugcugcggcuguucgacuucugcaagcaggccauccagcgccugaaggcggaggcccagaugagcauccagcugaucaacaaggccgugaacgcccucaucaacgaccagcugaucaugaagaaccaccuccgggacaucauggggauccccuacugcaacuacuccaaguacugguaccucaaccacaccacgaccggccgcaccagccugcccaagugcuggcuggucuccaacggcagcuaccucaacgagacccacuucuccgacgacaucgagcagcaggccgacaacaugaucacggagaugcugcagaaggaguacauggagcggcaggggaagacgccccugggccugguggaccucuucguguucagcaccuccuucuaccugaucagcaucuuccugcaccucgucaagaucccgacccaccgccacaucguggggaaguccugccccaagccccaccggcugaaccacaugggcaucugcagcugcgggcuguacaagcagcccggcgugccggucaaguggaagcgcugaggacuagucccuguucccagagcccacuuuuuuuucuuuuuuugaaauaaaauagccugucuuucagaucuaaaaaaaaaaaaaaaaaaaaaaaaaaaaaaaaaaaaaaaaaaaaaaaaaaaaaaaaaaaaaaaaaaaaaaaaaaaaaaaaaaaaaaaaaaaaaaaaaaaa

SEQ ID NO: 36993 - RNA, 1724 nt, Artificial Sequence
  mRNA product Design a-1 (A100) comprising derived and/or modified sequence from LASV(LM765-SLE-2012;Clade IV)__AIT17814__GPCmut10 (opt1)
aggagagucccgcagucggcguccagcggcucugcuuguucgugugugugucguugcaggccuuauucaagcuuaccaugggccagaucgugaccuucuuccaggaggucccccacgugaucgaggaggugaugaacaucguccugaucgcccucagcauccuggccgugcugaaggggcucuacaacuucgcgaccugcggccugguggggcuggucacguuccuccugcugugcggccgcuccugcaccaccagccucuacaaggggguguacgagcugcagacccuggagcucaacauggagacgcugaacaugugcaugccgcuguccugcaccaagaacaacagccaccacuacaucauggugggcaacgagaccggccucgagcugacccugacgaacaccuccaucaucgaccacaaguucugcaaccucagcgacgcccaccggaagaaccuguacgaccacgcccugauguccaucaucagcaccuuccaccucuccauccccaacuucaaccaguacgaggccaugagcugcgacuucaacgggggcaagaucuccguccaguacaaccugagccacuccuacgccaaggacgcggccgaccacugcgggaccguggccaacggcgugcugcagacguucaugcgcauggccuggggcgggagcuacaucgcgcucgacuccggccgggggcgcugggacugcaucaugaccagcuaccaguaccugaucauccagaacaccaccugggaggaccacugccaguucucccggcccagccccaucggcuaccuggggcuccugucccagcgcacgcgggacaucuacaucagccgccggcugcucggcaccuucaccuggacccugagcgacuccgagggcaaggacacgcccgggggcuacugccugacccgcuggaugcucaucgaggccgagcugaagugcuucgggaacaccgccgucgccaagugcaacgagaagcacgacgaggaguucugcgacaugcugcggcuguucgacuucugcaagcaggccauccagcgccugaaggcggaggcccagaugagcauccagcugaucaacaaggccgugaacgcccucaucaacgaccagcugaucaugaagaaccaccuccgggacaucaugggcauccccuacugcaacuacuccaaguacugguaccucaaccacaccacgaccgggaagaccagccugcccaagugcuggcugguguccaacggcagcuaccucaacgagacccacuucuccgacgacaucgagcagcaggccgacaacaugaucacggagaugcugcagaaggaguacauggagcgccagggcaagaccccgcuggggcuggucgaccucuucguguucagcaccuccuucuaccugaucagcaucuuccugcaccucgugaagaucccgacccaccggcacaucgucggcaagcccugccccaagccccaccgccugaaccacauggggaucugcuccugcggccuguacaagcagccgggggugcccgugaaguggaagcggugaggacuagucccuguucccagagcccacuuuuuuuucuuuuuuugaaauaaaauagccugucuuucagaucuaaaaaaaaaaaaaaaaaaaaaaaaaaaaaaaaaaaaaaaaaaaaaaaaaaaaaaaaaaaaaaaaaaaaaaaaaaaaaaaaaaaaaaaaaaaaaaaaaaaa

SEQ ID NO: 36994 - RNA, 1724 nt, Artificial Sequence
  mRNA product Design a-1 (A100) comprising derived and/or modified sequence from LASV(LM776-SLE-2012;Clade IV)__AIT17824__GPCmut10 (opt1)
aggagagucccgcagucggcguccagcggcucugcuuguucgugugugugucguugcaggccuuauucaagcuuaccaugggccagaucgugaccuucuuccaggaggucccccacgugaucgaggaggugaugaacaucguccugaucgcccucagcauccuggccgugcugaaggggcucuacaacuucgcgaccugcggccugguggggcuggucaccuuccuccugcugugcggccgcuccugcaccaccagcguguacaaggggguguacgagcuccagacccuggagcugaacauggagacgcucaacaugugcaugccgcuguccugcaccaagaacaacagccaccacuacaucauggucggcaacgagaccggccuggagcucacccugacgaacaccuccaucaucaaccacaaguucugcaaccugagcgacgcccacaagaagaaccucuacgaccacgcccugauguccaucaucagcaccuuccaccuguccauccccaacuucaaccaguacgaggccaugagcugcgacuucaacgggggcaagaucuccgugcaguacaaccucagccacuccuacgccggggacgcggccaaccacugcggcaccguggccaacgggguccugcagacguucaugcggauggccuggggcggcagcuacaucgcgcuggacuccgggcacggcaagugggacugcaucaugaccagcuaccaguaccucaucauccagaacaccaccugggaggaccacugccaguucucccgccccagccccaucggguaccugggccugcucucccagcggacgcgcgacaucuacaucagccggcgccugcugggcaccuucaccuggacccucagcgacuccgaggggaaggacacgccgggcggguacugccugacccgguggaugcugaucgaggccgagcucaagugcuucggcaacaccgccguggccaagugcaacgagaagcacgacgaggaguucugcgacaugcugcgccuguucgacuucugcaagcaggccauccagcggcucaaggcggaggcccagaugagcauccagcugaucaacaaggccgugaacgcccugaucaacgaccagcucaucaugaagaaccaccuccgcgacaucauggggauccccuacugcaacuacuccaaguacugguaccugaaccacaccacgaccggcaagaccagccugcccaagugcuggcuggucuccaacggcagcuaccugaacgagacccacuucuccgacgacaucgagcagcaggccgacaacaugaucacggagaugcuccagaaggaguacauggagcggcaggggaagacgccccugggccugguggaccuguucguguucagcaccuccuucuaccucaucagcaucuuccugcaccuggucaagaucccgacccaccgccacaucguggggaaguccugccccaagccccaccggcucaaccacaugggcaucugcagcugcgggcuguacaagcagcccggcgugccgguccgcuggaagcggugaggacuagucccuguucccagagcccacuuuuuuuucuuuuuuugaaauaaaauagccugucuuucagaucuaaaaaaaaaaaaaaaaaaaaaaaaaaaaaaaaaaaaaaaaaaaaaaaaaaaaaaaaaaaaaaaaaaaaaaaaaaaaaaaaaaaaaaaaaaaaaaaaaaaa

SEQ ID NO: 36995 - RNA, 1724 nt, Artificial Sequence
  mRNA product Design a-1 (A100) comprising derived and/or modified sequence from LASV(Mad39;Clade IV)__ANH09722__GPCmut10 (opt1)
aggagagucccgcagucggcguccagcggcucugcuuguucgugugugugucguugcaggccuuauucaagcuuaccaugggccagaucgugaccuucuuccaggaggucccccacgugaucgaggaggugaugaacaucguccugaucgcccucagcauccuggccgugcugaaggggcucuacaacguggcgaccugcggccugaucgggcuggucacguuccuccugcugugcggccgcuccugcaccaccacccucuacaaggggguguacgagcugcaggcccuggagcucaacauggagacgcugaacaugugcaugccgcugagcugcaccaagaacaacucccaccacuacauccgggugggcaacgagaccggccucgagcugacccugacgaacaccagccucaucaaccacaaguucugcaaccuguccgacgcccacaagaagaaccuguacgaccacgcccucaugagcaucaucuccaccuuccaccugagcauccccaacuucaaccaguacgaggccauguccugcgacuucaacgacgggaagaucagcguccaguacaaccugucccacaccuacgcgggcgacacggccaaccacugcgggaccguggccaacggcgugcuccagaccuucaugcgcauggccuggggcgggagcuacaucgcgcuggacuccggccgcgggggcugggacugcaucaugaccagcuaccaguaccugaucauccagaacacgaccugggaggaccacugccaguucucccggcccagccccaucggguaccucggccugcugucccagcggacccgcgacaucuacaucagccggcgccuccugggcaccuucacguggacccuguccgacagcgaggggaaggacaccccgggcggguacugccucacccgguggaugcugaucgaggccgagcugaagugcuucggcaacacggccgucgccaagugcaacgagaagcacgacgaggaguucugcgacaugcuccgccuguucgacuucugcaagcaggccauccagcggcugaaggcggaggcccagaugagcauccagcucaucaacaaggccgugaacgcccugaucaacgaccagcugaucaugaagaaccaccuccgcgacaucauggggauccccuacugcaacuacuccaaguacugguaccugaaccacaccgugaccggcaagaccagccugcccaagugcuggcucgucuccaacggcagcuaccugaacgagacgcacuucuccgacgacaucgagcagcaggccgacaacaugaucaccgagaugcugcagaaggaguacauggagcggcaggggaagacgccccugggccucguggaccuguucguguucagcaccuccuucuaccugaucagcaucuuccuccaccuggucaagaucccgacccaccgccacgugguggggaagcccugccccaagccccaccggcugaaccacaugggcaucugcuccugcggguucuacaagcagccgggcguccccgugcgcuggaagcggugaggacuagucccuguucccagagcccacuuuuuuuucuuuuuuugaaauaaaauagccugucuuucagaucuaaaaaaaaaaaaaaaaaaaaaaaaaaaaaaaaaaaaaaaaaaaaaaaaaaaaaaaaaaaaaaaaaaaaaaaaaaaaaaaaaaaaaaaaaaaaaaaaaaaa

SEQ ID NO: 36996 - RNA, 1724 nt, Artificial Sequence
  mRNA product Design a-1 (A100) comprising derived and/or modified sequence from LASV(Z0947-SLE-2011;Clade IV)__AIT17840__GPCmut10 (opt1)
aggagagucccgcagucggcguccagcggcucugcuuguucgugugugugucguugcaggccuuauucaagcuuaccaugggccagaucgugaccuucuuccaggaggucccccacgugaucgaggaggugaugaacaucguccugaucgcccucagcauccuggccgugcugaaggggcucuacaacuucgcgaccugcggccugguggggcuggucacguuccuccugcugugcggccgcuccugcaccaucagccucuacaaggggguguacgagcugcagacccuggagcucaacauggagacccugaacaugugcaugccgcuguccugcacgaagaacaacagccaccacuacaucauggugggcaacgagaccggccucgagcugacccugaccaacacguccaucaucaaccacaaguucugcaaccucagcgacgcccacaagaagaaccuguacgaccacgcccugauguccaucaucagcaccuuccaccucuccauccccaacuucaaccaguacgaggccaugagcugcgacuucaacgggggcaagaucuccguccaguacaaccugagccacuccuacgccggggacgcggccaaccacugcggcaccguggccaacggggugcugcagaccuucaugcggauggccuggggcggcagcuacaucgcgcucgacuccgggcgcgaccggugggacugcaucaugacgagcuaccaguaccugaucauccagaacaccaccugggaggaccacugccaguucucccgccccagccccaucggcuaccuggggcuccugucccagcggacccgcgacaucuacaucagccggcgccugcucggcacguucaccuggacccugagcgacuccgagggcaaggacacccccgggggcuacugccugacgcgguggaugcucaucgaggccgagcugaagugcuucgggaacaccgccgucgccaagugcaacgagaagcacgacgaggaguucugcgacaugcugcgccucuucgacuucugcaagcaggccauccagcggcugaaggcggaggcccagaugagcauccagcugaucaacaaggccgugaacgcccucaucaacgaccagcugaucaugaagaaccaccuccgcgacaucaugggcaucccguacugcaacuacuccaaguacugguaccugaaccacaccaccacggggaagaccagccugcccaagugcuggcugguguccaacggcagcuaccucaacgagacccacuucuccgacgacaucgagcagcaggccgacaacaugaucaccgagaugcugcagaaggaguacauggagcggcagggcaagacgccccuggggcuggucgaccucuucguguucagcaccuccuucuaccugaucagcaucuuccugcaccucgugaagaucccgacccaccgccacaucgucggcaagcccugccccaagccccaccggcugaaccacauggggaucugcuccugcggccuguacaagcagccgggggugcccgugaaguggaagcgcugaggacuagucccuguucccagagcccacuuuuuuuucuuuuuuugaaauaaaauagccugucuuucagaucuaaaaaaaaaaaaaaaaaaaaaaaaaaaaaaaaaaaaaaaaaaaaaaaaaaaaaaaaaaaaaaaaaaaaaaaaaaaaaaaaaaaaaaaaaaaaaaaaaaaa

SEQ ID NO: 36997 - RNA, 1724 nt, Artificial Sequence
  mRNA product Design a-1 (A100) comprising derived and/or modified sequence from LASV(Josiah;Clade IV)__NP_694870__GPCmut10 (opt4)
aggagagucccgcagucggcguccagcggcucugcuuguucgugugugugucguugcaggccuuauucaagcuuaccaugggccagaucgugaccuucuuccaggaggugccccacgugaucgaggaggugaugaacaucgugcugaucgcccugagcgugcuggccgugcugaagggccuguacaacuucgccaccugcggccuggugggccuggugaccuuccugcugcugugcggcagaagcugcaccaccagccuguacaagggcguguacgagcugcagacccuggagcugaacauggagacccugaacaugugcaugccccugagcugcaccaagaacaacagccaccacuacaucauggugggcaacgagaccggccuggagcugacccugaccaacaccagcaucaucaaccacaaguucugcaaccugagcgacgcccacaagaagaaccuguacgaccacgcccugaugagcaucaucagcaccuuccaccugagcauccccaacuucaaccaguacgaggccaugagcugcgacuucaacggcggcaagaucagcgugcaguacaaccugagccacagcuacgccggcgacgccgccaaccacugcggcaccguggccaacggcgugcugcagaccuucaugagaauggccuggggcggcagcuacaucgcccuggacagcggcagaggcaacugggacugcaucaugaccagcuaccaguaccugaucauccagaacaccaccugggaggaccacugccaguucagcagacccagccccaucggcuaccugggccugcugagccagagaaccagagacaucuacaucagcagaagacugcugggcaccuucaccuggacccugagcgacagcgagggcaaggacacccccggcggcuacugccugaccagauggaugcugaucgaggccgagcugaagugcuucggcaacaccgccguggccaagugcaacgagaagcacgacgaggaguucugcgacaugcugagacuguucgacuucugcaagcaggccauccagagacugaaggccgaggcccagaugagcauccagcugaucaacaaggccgugaacgcccugaucaacgaccagcugaucaugaagaaccaccugagagacaucaugggcauccccuacugcaacuacagcaaguacugguaccugaaccacaccaccaccggcagaaccagccugcccaagugcuggcuggugagcaacggcagcuaccugaacgagacccacuucagcgacgacaucgagcagcaggccgacaacaugaucaccgagaugcugcagaaggaguacauggagagacagggcaagaccccccugggccugguggaccuguucguguucagcaccagcuucuaccugaucagcaucuuccugcaccuggugaagauccccacccacagacacaucgugggcaagagcugccccaagccccacagacugaaccacaugggcaucugcagcugcggccuguacaagcagcccggcgugcccgugaaguggaagagaugaggacuagucccuguucccagagcccacuuuuuuuucuuuuuuugaaauaaaauagccugucuuucagaucuaaaaaaaaaaaaaaaaaaaaaaaaaaaaaaaaaaaaaaaaaaaaaaaaaaaaaaaaaaaaaaaaaaaaaaaaaaaaaaaaaaaaaaaaaaaaaaaaaaaa

SEQ ID NO: 36998 - RNA, 1721 nt, Artificial Sequence
  mRNA product Design a-1 (A100) comprising derived and/or modified sequence from LASV(LP;Clade I)__AAF86701__GPCmut10 (opt4)
aggagagucccgcagucggcguccagcggcucugcuuguucgugugugugucguugcaggccuuauucaagcuuaccaugggccagaucaucaccuucuuccaggaggugccccacgugaucgaggaggugaugaacaucgugcugaucgcccugagccugcuggccauccugaagggccuguacaacaucgccaccugcggcaucaucggccugguggccuuccuguuccugugcggcaagagcugcagccugacccugaagggcggcuacgagcugcagacccuggagcugaacauggagacccugaacaugugcaugccccugagcugcaccaagaacagcagccaccacuacaucagagugggcaacgagaccggccuggagcugacccugaccaacaccagcaucaucaaccacaaguucugcaaccugagcgacgcccacaagaagaaccuguacgaccacgcccugaugagcaucaucagcaccuuccaccugagcauccccaacuucaaccaguacgaggccaugagcugcgacuucaacggcggcaagaucagcgugcaguacaaccugagccacagcuacgccggcgacgccgccgagcacugcggcaccguggccaacggcgugcugcagaccuucaugagaauggccuggggcggcagauacaucgcccuggacagcggcaagggcaacugggacugcaucaugaccagcuaccaguaccugaucauccagaacaccaccugggaggaccacugccaguucagcagacccagccccaucggcuaccugggccugcugagccagagaaccagagacaucuacaucagcagaagacugcugggcaccuucaccuggacccugagcgacagcgagggcaacgagacccccggcggcuacugccugaccagauggaugcugaucgaggccgagcugaagugcuucggcaacaccgccguggccaagugcaacgagaagcacgacgaggaguucugcgacaugcugagacuguucgacuucugcaagcaggccaucagaagacugaaggccgaggcccagaugagcauccagcugaucaacaaggccgugaacgcccugaucaacgaccagcugaucaugaagaaccaccugagagacaucaugggcauccccuacugcaacuacagcaaguacugguaccugaaccacaccagcagcggcagaaccagccugcccaagugcuggcugaucagcaacggcagcuaccugaacgagacccaguucagcgacgacaucgagcagcaggccgacaacaugaucaccgagaugcugcagaaggaguacaucgagagacagggcaagaccccccugggccugguggacaucuucaucuucagcaccagcuucuaccugaucagcaucuuccugcaccugaucaagauccccacccacagacacaucgugggcaagcccugccccaagccccacagacugaaccacaugggcgugugcagcugcggccuguacaagcaccccggcgugcccaccaaguggaagagaugaggacuagucccuguucccagagcccacuuuuuuuucuuuuuuugaaauaaaauagccugucuuucagaucuaaaaaaaaaaaaaaaaaaaaaaaaaaaaaaaaaaaaaaaaaaaaaaaaaaaaaaaaaaaaaaaaaaaaaaaaaaaaaaaaaaaaaaaaaaaaaaaaaaaa

SEQ ID NO: 36999 - RNA, 1721 nt, Artificial Sequence
  mRNA product Design a-1 (A100) comprising derived and/or modified sequence from LASV(803213;Clade II)__AAF86703__GPCmut10 (opt4)
aggagagucccgcagucggcguccagcggcucugcuuguucgugugugugucguugcaggccuuauucaagcuuaccaugggccagaucaucaccuucuuccaggaggugccccacgugaucgaggaggugaugaacaucgugcugaucgcccugagccugcuggccauccugaagggcaucuacaacguggccaccugcggccuguucggccugaucagcuuccugcugcugugcggcagaagcugcagcgugaccuacaagggcguguacgagcugcagacccuggagcugaacauggccaaccugaacaugugcaugccccugagcugcaccaagaacaacagccaccacuacaucauggugggcaacgagaccggccuggagcugacccugaccaacaccagcaucaucaaccacaaguucugcaaccugagcgacgcccacaagaagaaccuguacgaccacgcccugaugagcaucaucagcaccuuccaccugagcauccccaacuucaaccaguacgaggccaugagcugcgacuucaacggcggcaagaucagcgugcaguacaaccugagccacagcuucgccguggacgccgccaaccacugcggcaccaucgccaacggcgugcugcagaccuucaugagaauggccuggggcggcagcuacaucgcccuggacagcggcaagggcaacugggacugcaucaugaccagcuaccaguaccugaucauccagaacaccaccugggaggaccacugccaguucagcagacccagccccaucggcuaccugggccugcugagccagagaaccagagacaucuacaucagcagaagacugcugggcaccuucaccuggacccugagcgacagcgagggcaacgaggcccccggcggcuacugccugaccagauggaugcugaucgaggccgagcugaagugcuucggcaacaccgccguggccaagugcaacgagaagcacgacgaggaguucugcgacaugcugagacuguucgacuucugcaagcaggccaucaagagacugaagaccgaggcccagaugagcauccagcugaucaacaaggccgugaacgcccugaucaacgaccagcugaucaugaagaaccaccugagagacaucaugggcauccccuacugcaacuacagcagauacugguaccugaaccacaccgugaccggcaagaccagccugcccagaugcuggcuggugagcaacggcagcuaccugaacgagacccacuucagcgacgacaucgagcagcaggccgacaacaugaucaccgagaugcugcagaaggaguacauggacagacagggcaagaccccccugggccugguggaccuguucguguucagcaccagcuucuaccugaucagcaucuuccugcaccuggugaagauccccacccacagacacaucgugggcaagcccugccccaagccccacagacugaaccacaugggcaucugcagcugcggccuguacaagcaccccggcgugcccgugaaguggaagagaugaggacuagucccuguucccagagcccacuuuuuuuucuuuuuuugaaauaaaauagccugucuuucagaucuaaaaaaaaaaaaaaaaaaaaaaaaaaaaaaaaaaaaaaaaaaaaaaaaaaaaaaaaaaaaaaaaaaaaaaaaaaaaaaaaaaaaaaaaaaaaaaaaaaaa

SEQ ID NO: 37000 - RNA, 1721 nt, Artificial Sequence
  mRNA product Design a-1 (A100) comprising derived and/or modified sequence from LASV(GA391;Clade III)__CAA36645__GPCmut10 (opt4)
aggagagucccgcagucggcguccagcggcucugcuuguucgugugugugucguugcaggccuuauucaagcuuaccaugggccagaucgugaccuucuuccaggaggugccccacgugaucgaggaggugaugaacaucgugcugaucgcccugagcauccuggccauccugaagggccuguacaacguggccaccugcggccugaucggccuggugaccuuccugcugcugagcggcagaagcugcagccugaucuacaagggcaccuacgagcugcagacccuggagcugaacauggagacccugaacaugugcaugccccugagcugcaccaagaacaacagccaccacuacaucagagugggcaacgagaccggccuggagcugacccugaccaacaccagcauccugaaccacaaguucugcaaccugagcgacgcccacaagagaaaccuguacgaccacagccugaugagcaucaucagcaccuuccaccugagcauccccaacuucaaccaguacgaggccaugagcugcgacuucaacggcggcaagaucaccgugcaguacaaccugagccacagcuucgccguggacgccgccggccacugcggcacccuggccaacggcgugcugcagaccuucaugagaauggccuggggcggcagcuacaucgcccuggacagcggcagaggcaacugggacugcaucaugaccagcuaccaguaccugaucauccagaacaccaccugggacgaccacugccaguucagcagacccagccccaucggcuaccugggccugcugagccagagaaccagagacaucuacaucagcagaagacugcugggcaccuucaccuggacccugagcgacagcgagggcaacgagacccccggcggcuacugccugaccagauggaugcugaucgaggccgagcugaagugcuucggcaacaccgccguggccaagugcaacgagaagcacgacgaggaguucugcgacaugcugagacuguucgacuucugcaagcaggccaucagaagacugaagaccgaggcccagaugagcauccagcugaucaacaaggccgugaacgcccugaucaacgaccagcugaucaugaagaaccaccugagagacaucaugggcauccccuacugcaacuacagcagauacugguaccugaaccacaccagcaccggcaagaccagccugcccagaugcuggcugaucagcaacggcagcuaccugaacgagaccaaguucagcgacgacaucgagcagcaggccgacaacaugaucaccgagaugcugcagaaggaguacaucgacagacagggcaagaccccccugggccugguggaccuguucguguucagcaccagcuucuaccugaucagcaucuuccugcaccuggugaagauccccacccacagacacaucgugggcaagcccugccccaagccccacagacugaaccacaugggcaucugcagcugcggccuguacaagcagcccggcgugcccgugagauggaagagaugaggacuagucccuguucccagagcccacuuuuuuuucuuuuuuugaaauaaaauagccugucuuucagaucuaaaaaaaaaaaaaaaaaaaaaaaaaaaaaaaaaaaaaaaaaaaaaaaaaaaaaaaaaaaaaaaaaaaaaaaaaaaaaaaaaaaaaaaaaaaaaaaaaaaa

SEQ ID NO: 37001 - RNA, 1724 nt, Artificial Sequence
  mRNA product Design a-1 (A100) comprising derived and/or modified sequence from LASV(AV;Clade V)__CCA30314__GPCmut10 (opt4)
aggagagucccgcagucggcguccagcggcucugcuuguucgugugugugucguugcaggccuuauucaagcuuaccaugggccagaucgugaccuucuuccaggaggugccccacgugaucgaggaggugaugaacaucgugcugaucgcccugagcauccuggccgugcugaagggccuguacaacaucgccaccugcggccugaucggccugaucaccuuccugcugcugugcggcagaagcugcagcagcaaccuguacaagggcguguacgagcugcagagccuggaccugaacauggagacccugaacaugugcaugccccugagcugcaccaagaacaacagccaccacuacaucagagugggcaacgacaccggccuggagcugacccugaccaacaccagcauccugaaccacaaguucugcaaccugagcgacgcccacaagaaggaccuguacgaccacgcccugaugagcaucaucagcaccuuccaccugagcauccccaacuucaaccaguacgaggccaugagcugcgacuucaacggcggcaagaucagcgugcaguacaaccugagccacagcuacgccaucgacgccgccaaccacugcggcaccguggccaacggcauccugcagaccuucaugagaauggccuggggcggcagcuacaucgcccuggacagcggcagaggcaacugggacugcaucaugaccagcuaccaguaccugaucauccagaacaccaccugggagaaccacugccaguucagcagacccagccccaucggcuaccugggccugcugagccagagaaccagagacaucuacaucagcagaagacugcugggcaccuucaccuggacccugagcgacagcgagggcaacgccacccccggcggcuacugccugaccagauggaugcugaucgaggccgagcugaagugcuucggcaacaccgccguggccaagugcaacgagaagcacgacgaggaguucugcgacaugcugagacuguucgacuucugcaagcaggccaucagcagacugaagagcgaggcccagaugagcauccagcugaucaacaaggccgugaacgcccugaucaacgaccagcugaucaugaagaaccaccugagagacaucaugggcauccccuacugcaacuacagcaaguacugguaccugaaccacaccaucaccggcaagaccagccugcccaagugcuggcuggugagcaacggcagcuaccugaacgagacccacuucagcgacgacaucgagcagcaggccgacaacaugaucaccgagaugcugcagaaggaguacauggagagacagggcaagaccccccugggccugguggaccuguucguguucagcaccagcuucuaccugaucagcaucuuccugagacuggugaagauccccacccacagacacaucgugggcaagcccugccccaagccccacagacugaaccacaugggcaucugcagcugcggccuguacaagcagcccggcgugcccgugagauggaagagaugaggacuagucccuguucccagagcccacuuuuuuuucuuuuuuugaaauaaaauagccugucuuucagaucuaaaaaaaaaaaaaaaaaaaaaaaaaaaaaaaaaaaaaaaaaaaaaaaaaaaaaaaaaaaaaaaaaaaaaaaaaaaaaaaaaaaaaaaaaaaaaaaaaaaa

SEQ ID NO: 37002 - RNA, 1721 nt, Artificial Sequence
  mRNA product Design a-1 (A100) comprising derived and/or modified sequence from LASV(Togo/2016/7082;Clade VI)__AMR44577__GPCmut10 (opt4)
aggagagucccgcagucggcguccagcggcucugcuuguucgugugugugucguugcaggccuuauucaagcuuaccaugggccagaucaucaccuucuuccaggaggugccccacgugaucgaggaggugaugaacaucgugcugaucgcccugagccugcuggccauccugaagggcguguacaacguggccaccugcggcaucaucggccuggugaccuuccuguuccugugcggcagaagcugcagccugaucuacaagggcagcuacgagcugcagacccuggagcugaacauggagacccugaacaugugcaugccccugagcugcaccaagaacagcagccaccacuacaucagagugggcaacgagaccggccuggagcugacccugaccaacaccagcaucaucaaccacaaguucugcaaccugagcgacgcccacaagagaaaccuguacgaccacgcccugaugagcauccugagcaccuuccaccugagcauccccaacuucaaccaguacgaggccaugagcugcgacuucaacggcggcaagaucagcgugcaguacaaccugagccacgccuacgccguggacgccgccgagcacugcggcaccguggccaacggcgugcugcagaccuucaugagaauggccuggggcggcagcuacaucgcccuggacagcggcagaggcaacugggacugcaucaugaccagcuaccaguaccugaucauccagaacaccaccugggaggaccacugccaguucagcagacccagccccaucggcuaccugggccugcugagccagagaaccagagacaucuacaucagcagaagacugcugggcaccuucaccuggacccugagcgacagcgagggcaacgagacccccggcggcuacugccugaccagauggaugcugaucgaggccgagcugaagugcuucggcaacaccgccguggccaagugcaacgagaagcacgacgaggaguucugcgacaugcugagacuguucgacuucugcaagcaggccauccagagacugaagagcgaggcccagaugagcauccagcugaucaacaaggccgugaacgcccugaucaacgaccagcugaucaugaagaaccaccugagagacaugaugggcauccccuacugcaacuacagcaaguacugguaccugaaccacaccagcagcggcagaaccagccugcccaagugcuggcuggugagcaacggcagcuaccugaacgagacccacuucagcgacgacaucgagcagcaggccgacaacaugaucaccgagaugcugcagaaggaguacaucgacagacagggcaagaccccccugggccugguggaccuguucguguucagcaccagcuucuaccugaucagcaucuuccugcaccugaucaagauccccacccacagacacaucgugggcaagcccugccccaagccccacagacugaaccacaugggcaucugcagcugcggccuguacaagcagcccggcgugcccaccagauggaagagaugaggacuagucccuguucccagagcccacuuuuuuuucuuuuuuugaaauaaaauagccugucuuucagaucuaaaaaaaaaaaaaaaaaaaaaaaaaaaaaaaaaaaaaaaaaaaaaaaaaaaaaaaaaaaaaaaaaaaaaaaaaaaaaaaaaaaaaaaaaaaaaaaaaaaa

SEQ ID NO: 37003 - RNA, 1721 nt, Artificial Sequence
  mRNA product Design a-1 (A100) comprising derived and/or modified sequence from LASV(KAK-428;Clade n.d. (VII))__ANH09740__GPCmut10 (opt4)
aggagagucccgcagucggcguccagcggcucugcuuguucgugugugugucguugcaggccuuauucaagcuuaccaugggccagaucgugaccuucuuccaggaggugccccacgugaucgaggaggugaugaacaucgugcugaucgcccugagccugcuggccauccugaagggccuguacaacuucgccaccugcggcgugaucggccugaucaccuuccugcugcugugcggcagaagcugcagcgccaccuacaagggccaguacgagcugcagacccuggagcugaacauggagagccugaacaugugcaugccccugagcugcaccaagaacaacagccaccacuacaucagagccggcaacaacaccggccuggagcugacccugaccaacaccagcaucaucagccacaaguucugcaaccugagcgacgcccacaagaagaaccuguacgaccacacccugaugagcaucaucaccaccuuccaccugagcauccccaacuucaaccaguacgaggccaugagcugcgacuucaacggcggcaagaucagcauccaguacaaccugagccacagcuacgccggcgacgccgcccagcacugcggcaccguggccaacggcgugcugcagaccuucaugagaauggccuggggcggcagcuaccuggcccuggacagcggcagaagaggcugggacugcaucaucagcagcuaccaguaccugaucauccagaacaccaccugggacgaccacugccaguucagcagacccagccccaucggcuaccugggcuucgugagccagaagaccagagacaucuacaucagcagaagacugcugggcaccuucaccuggacccugagcgacagcgagggccacgacaugcccggcggcuacugccugaccagauggaugcugaucgaggccgaccugaagugcuucggcaacaccgccguggccaagugcaacgagaagcacgacgaggaguucugcgacauguggagacuguucgacuucugcaagcaggccauccagagacugaaggccgaggcccagaugaacauccagcugaucaacaaggccgugaacgcccugaucaacgaccagcugaugaugaagaaccaccugagagacaucaugggcauccccuacugcaacuacagcaaguucugguaccugaacaacaccaccaccggcagaaccagccugcccagaugcuggcugaucagcaacggcagcuaccugaacgagacccacuucagcgacgacaucgagcagcaggccgacaacaugaucaccgagaugcugcagaaggaguacauggacagacagggcaagaccccccugggccugguggaccuguucguguucagcaccagcuucuaccugaucaccaucuuccugcaccuggugaagauccccacccacagacacaucgugggcaagcccugccccaagccccacagacugaaccacaugggcaucugcagcugcggccuguacaagcagcccggcgugcccgugagauggaagagaugaggacuagucccuguucccagagcccacuuuuuuuucuuuuuuugaaauaaaauagccugucuuucagaucuaaaaaaaaaaaaaaaaaaaaaaaaaaaaaaaaaaaaaaaaaaaaaaaaaaaaaaaaaaaaaaaaaaaaaaaaaaaaaaaaaaaaaaaaaaaaaaaaaaaa

SEQ ID NO: 37004 - RNA, 1721 nt, Artificial Sequence; identical to SEQ ID NO: 36998
  mRNA product Design a-1 (A100) comprising derived and/or modified sequence from LASV(Pinneo-NIG-1969;Clade I)__AIT17836__GPCmut10 (opt4)

SEQ ID NO: 37005 - RNA, 1721 nt, Artificial Sequence
  mRNA product Design a-1 (A100) comprising derived and/or modified sequence from LASV(ISTH0009-NIG-2011;Clade II)__AIT17404__GPCmut10 (opt4)
aggagagucccgcagucggcguccagcggcucugcuuguucgugugugugucguugcaggccuuauucaagcuuaccaugggccagaucaucaccuucuuccaggaggugccccacgugaucgaggaggugaugaacaucgugcugaucgcccugagccugcuggccauccugaagggcaucuacaacguggccaccugcggccuguucggccuggugagcuuccugcugcugugcggcagaagcugcagcaccaccuacaagggcguguacgagcugcagacccuggagcuggacauggccagccugaacaugugcaugccccugagcugcaccaagaacaacagccaccacuacaucauggugggcaacgagaccggccuggagcugacccugaccaacaccagcaucaucaaccacaaguucugcaaccugagcgacgcccacaagaagaaccuguacgaccacgcccugaugagcaucaucagcaccuuccaccugagcauccccaacuucaaccaguacgaggccaugagcugcgacuucaacggcggcaagaucagcgugcaguacaaccugagccacgccuacgccguggacgccgccaaccacugcggcaccaucgccaacggcgugcugcagaccuucaugagaauggccuggggcggcagcuacaucgcccuggacagcggcaagggcagcugggacugcaucaugaccagcuaccaguaccugaucauccagaacaccaccugggaggaccacugccaguucagcagacccagccccaucggcuaccugggccugcugagccagagaaccagagacaucuacaucagcagaagacugcugggcaccuucaccuggacccugagcgacagcgagggcaacgagacccccggcggcuacugccugaccagauggaugcugaucgaggccgagcugaagugcuucggcaacaccgccguggccaagugcaacgagaagcacgacgaggaguucugcgacaugcugagacuguucgacuucugcaagcaggccaucagaagacugaagaccgaggcccagaugagcauccagcugaucaacaaggccgugaacgcccugaucaacgaccagcugaucaugaagaaccaccugagagacaucaugggcauccccuacugcaacuacagcaaguacugguaccugaaccacaccgugaccggcaagaccagccugcccagaugcuggcuggugagcaacggcagcuaccugaacgagacccacuucagcgacgacaucgagcagcaggccgacaacaugaucaccgagcugcugcagaaggaguacauggacagacagggcaagaccccccugggccugguggaccuguucguguucagcaccagcuucuaccugaucagcaucuuccugcaccugaucaagauccccacccacagacacaucaccggcaagcccugccccaagccccacagacugaaccacaugggcaucugcagcugcggccuguacaagcaccccggcgugcccgugaaguggaagagaugaggacuagucccuguucccagagcccacuuuuuuuucuuuuuuugaaauaaaauagccugucuuucagaucuaaaaaaaaaaaaaaaaaaaaaaaaaaaaaaaaaaaaaaaaaaaaaaaaaaaaaaaaaaaaaaaaaaaaaaaaaaaaaaaaaaaaaaaaaaaaaaaaaaaa

SEQ ID NO: 37006 - RNA, 1721 nt, Artificial Sequence
  mRNA product Design a-1 (A100) comprising derived and/or modified sequence from LASV(ISTH2010-NIG-2012;Clade II)__AIT17482__GPCmut10 (opt4)
aggagagucccgcagucggcguccagcggcucugcuuguucgugugugugucguugcaggccuuauucaagcuuaccaugggccagaucaucaccuucuuccaggaggugccccacgugaucgaggaggugaugaacaucgugcugaucgcccugagccugcuggccauccugaagggcaucuacaacguggccaccugcggccuguucggccuggugagcuuccugcugcugugcggcagaagcugcagcaccaccuacaagggcguguacgagcugcagacccuggagcuggacauggccagccugaacaugugcaugccccugagcugcaccaagaacaacagccaccacuacaucauggugggcaacgagaccggccuggagcugacccugaccaacaccagcaucaucaaccacaaguucugcaaccugagcgacgcccacaagaagaaccuguacgaccacgcccugaugagcaucaucagcaccuuccaccugagcauccccaacuucaaccaguacgaggccaugagcugcgacuucaacggcggcaagaucagcgugcaguacaaccugagccacgccuacgccguggacgccgccaaccacugcggcaccaucgccaacggcgugcugcagaccuucaugagaauggccuggggcggcagcuacaucgcccuggacagcggcaagggcagcugggacugcaucaugaccagcuaccaguaccugaucauccagaacaucaccugggaggaccacugccaguucagcagacccagccccaucggcuaccugggccugcugagccagagaaccagagacaucuacaucagcagaagacugcugggcaccuucaccuggacccugagcgacagcgagggcaacgagacccccggcggcuacugccugaccagauggaugcugaucgaggccgagcugaagugcuucggcaacaccgccguggccaagugcaacgagaagcacgacgaggaguucugcgacaugcugagacuguucgacuucugcaagcaggccaucagaagacugaagaccgaggcccagaugagcauccagcugaucaacaaggccgugaacgcccugaucaacgaccagcugaucaugaagaaccaccugagagacaucaugggcauccccuacugcaacuacagcaaguacugguaccugaaccacaccgugaccggcaagaccagccugcccagaugcuggcuggugagcaacggcagcuaccugaacgagacccacuucagcgacgacaucgagcagcaggccgacaacaugaucaccgagcugcugcagaaggaguacaucgacagacagggcaagaccccccugggccugguggaccuguucguguucagcaccagcuucuaccugaucagcaucuuccugcaccuggugaagauccccacccacagacacguggugggcaagcccugccccaagccccacagacugaaccacaugggcaucugcagcugcggccuguacaagcaccccggcgugcccgugaaguggaagagaugaggacuagucccuguucccagagcccacuuuuuuuucuuuuuuugaaauaaaauagccugucuuucagaucuaaaaaaaaaaaaaaaaaaaaaaaaaaaaaaaaaaaaaaaaaaaaaaaaaaaaaaaaaaaaaaaaaaaaaaaaaaaaaaaaaaaaaaaaaaaaaaaaaaaa

SEQ ID NO: 37007 - RNA, 1721 nt, Artificial Sequence
  mRNA product Design a-1 (A100) comprising derived and/or modified sequence from LASV(Lassa virus/H.sapiens-wt/NGA/2015/ISTH_0543;Clade II)__AVO03639__GPCmut10 (opt4)
aggagagucccgcagucggcguccagcggcucugcuuguucgugugugugucguugcaggccuuauucaagcuuaccaugggccagaucaucaccuucuuccaggaggugccccacgugaucgaggaggugaugaacaucgugcugaucgcccugagccugcuggccauccugaagggcaucuacaacguggccaccugcggccuguucggccuggugagcuuccugcugcugugcggcagaagcugcagcaccaccuacaagggcguguacgagcugcagacccuggagcuggacauggccaaccugaacaugugcaugccccugagcugcaccaagaacaacagccaccacuacaucauggugggcaacgagaccggccuggagcugacccugaccaacaccagcaucaucaaccacaaguucugcaaccugagcgacgcccacaagaagaaccuguacgaccacgcccugaugagcaucaucagcaccuuccaccugagcauccccaacuucaaccaguacgaggccaugagcugcgacuucaacggcggcaagaucagcgugcaguacaaccugagccacaccuacgccguggacgccgccaaccacugcggcaccaucgccaacggcgugcugcagaccuucaugagaauggccuggggcggcagcuacaucgcccuggacagcggcaagggcagcugggacugcaucaugaccagcuaccaguaccuggugauccagaacaccaccugggaggaccacugccaguucagcagacccagccccaucggcuaccugggccugcugagccagagaaccagagacaucuacaucagcagaagacugcugggcaccuucaccuggacccugagcgacagcgagggcaacgagacccccggcggcuacugccugaccagauggaugcugaucgaggccgagcugaagugcuucggcaacaccgccguggccaagugcaacgagaagcacgacgaggaguucugcgacaugcugagacuguucgacuucugcaagcaggccaucagaagacugaagaccgaggcccagaugagcauccagcugaucaacaaggccgugaacgcccugaucaacgaccagcugaucaugaagaaccaccugagagacaucaugggcauccccuacugcaacuacagcaaguacugguaccugaaccacaccgugaccggcaagaccagccugcccagaugcuggcuggugagcaacggcagcuaccugaacgagacccacuucagcgacgacaucgagcagcaggccgacaacaugaucaccgagcugcugcagaaggaguacaucgacagacagggcaagaccccccugggccugguggaccuguucguguucagcaccagcuucuaccugaucagcaucuuccugcaccuggugaagauccccacccacagacacaucaccggcaagcccugccccaagccccacagacugaaccacaugggcaucugcagcugcggccuguacaagcaccccggcgugcccgugaaguggaagagaugaggacuagucccuguucccagagcccacuuuuuuuucuuuuuuugaaauaaaauagccugucuuucagaucuaaaaaaaaaaaaaaaaaaaaaaaaaaaaaaaaaaaaaaaaaaaaaaaaaaaaaaaaaaaaaaaaaaaaaaaaaaaaaaaaaaaaaaaaaaaaaaaaaaaa

SEQ ID NO: 37008 - RNA, 1721 nt, Artificial Sequence
  mRNA product Design a-1 (A100) comprising derived and/or modified sequence from LASV(Lassa virus/H.sapiens-wt/NGA/2016/ISTH_0009;Clade II)__AVO03571__GPCmut10 (opt4)
aggagagucccgcagucggcguccagcggcucugcuuguucgugugugugucguugcaggccuuauucaagcuuaccaugggccagaucaucaccuucuuccaggaggugccccacgugaucgaggaggugaugaacaucgugcugaucgcccugagccugcuggccauccugaagggcaucuacaacguggccaccugcggccugcugggccuggugagcuuccugcugcugugcggcagaagcugcagcaccaccuacaagggcguguacgagcugcagacccuggagcuggacauggccagccugaacaugugcaugccccugagcugcaccaagaacaacagccaccacuacaucauggugggcaacgagaccggccuggagcugacccugaccaacaccagcaucaucaaccacaaguucugcaaccugagcgacgcccacaagaagaaccuguacgaccacgcccugaugagcaucaucagcaccuuccaccugagcauccccaacuucaaccaguacgaggccaugagcugcgacuucaacggcggcagaaucagcgugcaguacaaccugagccacagcuacgccguggacgccgccaaccacugcggcaccaucgccaacggcgugcugcagaccuucaugagaauggccuggggcggcagcuacaucgcccuggacagcggcaagggcagcugggacugcaucaugaccagcuaccaguaccugaucauccagaacaccaccugggaggaccacugccaguucagcagacccagccccaucggcuaccugggccugcugagccagagaaccagagacaucuacaucagcagaagacugcugggcaccuucaccuggacccugagcgacagcgagggcaacgagacccccggcggcuacugccugaccagauggaugcugaucgaggccgagcugaagugcuucggcaacaccgccguggccaagugcaacgagaagcacgacgaggaguucugcgacaugcugagacuguucgacuucugcaagcaggccaucagaagacugaagaccgaggcccagaugagcauccagcugaucaacaaggccgugaacgcccugaucaacgaccagcugaucaugaagaaccaccugagagacaucaugggcauccccuacugcaacuacagcaaguacugguaccugaaccacaccgugaccggcaagaccagccugcccagaugcuggcuggugagcaacggcagcuaccugaacgagacccacuucagcgacgacaucgagcagcaggccgacaacaugaucaccgagcugcugcagaaggaguacaucgacagacagggcaagaccccccugggccugguggaccuguucguguucagcaccagcuucuaccugaucagcaucuuccugcaccuggugaagauccccacccacagacacaucaccggcaagcccugccccaagccccacagacugaaccacaugggcaucugcagcugcggccuguacaaccaccccggcgugcccgugaaguggaagagaugaggacuagucccuguucccagagcccacuuuuuuuucuuuuuuugaaauaaaauagccugucuuucagaucuaaaaaaaaaaaaaaaaaaaaaaaaaaaaaaaaaaaaaaaaaaaaaaaaaaaaaaaaaaaaaaaaaaaaaaaaaaaaaaaaaaaaaaaaaaaaaaaaaaaa

SEQ ID NO: 37009 - RNA, 1721 nt, Artificial Sequence
  mRNA product Design a-1 (A100) comprising derived and/or modified sequence from LASV(Lassa virus/H.sapiens-wt/NGA/2016/ISTH_0017;Clade II)__AVO03567__GPCmut10 (opt4)
aggagagucccgcagucggcguccagcggcucugcuuguucgugugugugucguugcaggccuuauucaagcuuaccaugggccagaucaucaccuucuuccaggaggugccccacgugaucgaggaggugaugaacaucgugcugaucgcccugagccugcuggccauccugaagggcaucuacaacguggccaccugcggccuguucggccuggugagcuuccugcugcugugcggcagaagcugcagcaccaccuacaagggcguguacgagcugcagacccuggagcuggacauggccagccugaacaugugcaugccccugagcugcaccaagaacaacagccaccacuacaucauggugggcaacgagaccggccuggagcugacccugaccaacaccagcaucaucaaccacaaguucugcaaccugagcgacgcccacaagaagaaccuguacgaccacgcccugaugagcaucaucagcaccuuccaccugagcauccccaacuucaaccaguacgaggccaugagcugcgacuucaacggcggcaagaucagcgugcaguacaaccugagccacaccuacgccaucgacgccgccaaccacugcggcaccaucgccaacggcgugcugcagaccuucaugagaauggccuggggcggcagcuacaucgcccuggacagcggcaagggcagcugggacugcaucaugaccagcuaccaguaccugaucauccagaacaccaccugggaggaccacugccaguucagcagacccagccccaucggcuaccugggccugcugagccagagaaccagagacaucuacaucagcagaagacugcugggcaccuucaccuggacccugagcgacagcgagggcaacgagacccccggcggcuacugccugaccagauggaugcugaucgaggccgagcugaagugcuucggcaacaccgccguggccaagugcaacgagaagcacgacgaggaguucugcgacaugcugagacuguucgacuucugcaagcaggccaucagaagacugaagaccgaggcccagaugagcauccagcugaucaacaaggccgugaacgcccugaucaacgaccagcugaucaugaagaaccaccugagagacaucaugggcauccccuacugcaacuacagcaaguacugguaccugaaccacaccgugaccggcaagaccagccugcccagaugcuggcuggugagcaacggcagcuaccugaacgagacccacuucagcgacgacaucgagcagcaggccgacaacaugaucaccgagcugcugcagaaggaguacauggacagacagggcaagaccccccugggccugguggaccuguucguguucagcaccagcuucuaccugaucagcaucuuccugcaccuggugagaauccccacccacagacacgugaucggcaagcccugccccaagccccacagacugaaccacaugggcaucugcagcugcggccuguacaagcaccccggcgugcccgugaaguggaagagaugaggacuagucccuguucccagagcccacuuuuuuuucuuuuuuugaaauaaaauagccugucuuucagaucuaaaaaaaaaaaaaaaaaaaaaaaaaaaaaaaaaaaaaaaaaaaaaaaaaaaaaaaaaaaaaaaaaaaaaaaaaaaaaaaaaaaaaaaaaaaaaaaaaaaa

SEQ ID NO: 37010 - RNA, 1721 nt, Artificial Sequence
  mRNA product Design a-1 (A100) comprising derived and/or modified sequence from LASV(Lassa virus/H.sapiens-wt/NGA/2018/ISTH_0959;Clade II)__AVV65099__GPCmut10 (opt4)
aggagagucccgcagucggcguccagcggcucugcuuguucgugugugugucguugcaggccuuauucaagcuuaccaugggccagaucaucaccuucuuccaggaggugccccacgugaucgaggaggugaugaacaucgugcugaucgcccugagccugcuggccauccugaagggcaucuacaacguggugaccugcggccuguucggccuggugagcuuccugcugcugugcggcagaagcugcagcaccaccuacaagggcguguacgagcugcagacccuggagcuggacauggccagccugaacaugugcaugccccugagcugcaccaagaacaacagccaccacuacaucauggugggcaacgagaccggccuggagcugacccugaccaacaccagcaucaucaaccacaaguucugcaaccugagcgacgcccacaagaagaaccuguacgaccacgcccugaugagcaucaucagcaccuuccaccugagcauccccaacuucaaccaguacgaggccaugagcugcgacuucaacggcggcaagaucagcgugcaguacaaccugagccacgccuacgccaucgacgccgccaaccacugcggcaccaucgccaacggcgugcugcagaccuucaugagaauggccuggggcggcagcuacaucgcccuggacagcggcaagggcagcugggacugcaucaugaccagcuaccaguaccugaucauccagaacaccaccugggaggaccacugccaguucagcagacccagccccaucggcuaccugggccugcugagccagagaaccagagacaucuacaucagcagaagacugcugggcaccuucaccuggacccugagcgacagcgagggcaacgagacccccggcggcuacugccugaccagauggaugcugaucgaggccgagcugaagugcuucggcaacaccgccguggccaagugcaacgagaagcacgacgaggaguucugcgacaugcugagacuguucgacuucugcaagcaggccaucagaagacugaagaccgaggcccagaugagcauccagcugaucaacaaggccgugaacgcccugaucaacgaccagcugaucaugaagaaccaccugagagacaucaugggcauccccuacugcaacuacagcaaguacugguaccugaaccacaccgugaccggcaagaccagccugcccagaugcuggcuggugagcaacggcagcuaccugaacgagacccacuucagcgacgacaucgagcagcaggccgacaacaugaucaccgagcugcugcagaaggaguacaucgacagacagggcaagaccccccugggccugguggaccuguucguguucagcaccagcuucuaccugaucagcaucuuccugcaccuggugaagauccccacccacagacacgugaucggcaagcccugccccaagccccacagacugaaccacaugggcaucugcagcugcggccuguacaagcaccccggcgugcccgugaaguggaagagaugaggacuagucccuguucccagagcccacuuuuuuuucuuuuuuugaaauaaaauagccugucuuucagaucuaaaaaaaaaaaaaaaaaaaaaaaaaaaaaaaaaaaaaaaaaaaaaaaaaaaaaaaaaaaaaaaaaaaaaaaaaaaaaaaaaaaaaaaaaaaaaaaaaaaa

SEQ ID NO: 37011 - RNA, 1721 nt, Artificial Sequence
  mRNA product Design a-1 (A100) comprising derived and/or modified sequence from LASV(LASV003-NIG-2008;Clade II)__AIT17580__GPCmut10 (opt4)
aggagagucccgcagucggcguccagcggcucugcuuguucgugugugugucguugcaggccuuauucaagcuuaccaugggccagaucaucaccuucuuccaggaggugccccacgugaucgaggaggugaugaacaucgugcugaucgcccugagccugcuggccauccugaagggcaucuacaacguggccaccugcggccuguucggccuggugagcuuccugcugcugugcggcagaagcugcagcaccaccuacaagggcguguacgagcugcagacccuggagcuggacauggccagccugaacaugugcaugccccugagcugcaccaagaacaacagccaccacuacaucauggugggcaacgagaccggccuggagcugacccugaccaacaccagcaucaucaaccacaaguucugcaaccugagcgacgcccacaagaagaaccuguacgaccacgcccugaugagcaucaucagcaccuuccaccugagcauccccaacuucaaccaguacgaggccaugagcugcgacuucaacggcggcaagaucagcgugcaguacaaccugagccacaccuacgccguggacgccgccaaccacugcggcaccaucgccaacggcgugcugcagaccuucaugagaauggccuggggcggcagcuacaucgcccuggacagcggcaagggcagcugggacugcaucaugaccagcuaccaguaccugaucauccagaacaccaccugggaggaccacugccaguucagcagacccagccccaucggcuaccugggccugcugagccagagaaccagagacaucuacaucagcagaagacugcugggcaccuucaccuggacccugagcgacagcgagagcaacgagacccccggcggcuacugccugaccagauggaugcugaucgaggccgagcugaagugcuucggcaacaccgccguggccaagugcaacgagaagcacgacgaggaguucugcgacaugcugagacuguucgacuucugcaagcaggccaucagaagacugaaggccgaggcccagaugagcauccagcugaucaacaaggccgugaacgcccugaucaacgaccagcugaucaugaagaaccaccugagagacaucaugggcauccccuacugcaacuacagcaaguacugguaccugaaccacaccgugaccggcagaaccagccugcccagaugcuggcuggugagcaacggcagcuaccugaacgagacccacuucagcgacgacaucgagcagcaggccgacaacaugaucaccgagcugcugcagaaggaguacauggacagacagggcaagaccccccugggccugguggaccuguucguguucagcaccagcuucuaccugaucagcaucuuccugcaccuggugaagauccccacccacagacacgugaucggcaagcccugccccaagccccacagacugaaccacaugggcaucugcagcugcggccuguacaagcaccccggcgugcccgugaaguggaagagaugaggacuagucccuguucccagagcccacuuuuuuuucuuuuuuugaaauaaaauagccugucuuucagaucuaaaaaaaaaaaaaaaaaaaaaaaaaaaaaaaaaaaaaaaaaaaaaaaaaaaaaaaaaaaaaaaaaaaaaaaaaaaaaaaaaaaaaaaaaaaaaaaaaaaa

SEQ ID NO: 37012 - RNA, 1721 nt, Artificial Sequence
  mRNA product Design a-1 (A100) comprising derived and/or modified sequence from LASV(LASV035-NIG-2009;Clade II)__AIT17588__GPCmut10 (opt4)
aggagagucccgcagucggcguccagcggcucugcuuguucgugugugugucguugcaggccuuauucaagcuuaccaugggccagaucaucaccuucuuccaggaggugccccacgugaucgaggaggugaugaacaucgugcugaucgcccugagccugcuggccauccugaagggcaucuacaacguggccaccugcggccuguucggccuggugagcuuccugcugcugugcggcagaagcugcagcaccaccuacaagggcguguacgagcugcagacccuggagcuggacauggccagccugaacaugugcaugccccugagcugcaccaagaacaacagccaccacuacaucauggugggcaacgagaccggccuggagcugacccugaccaacaccagcaucaucaaccacaaguucugcaaccugagcgacgcccacaagaagaaccuguacgaccacgcccugaugagcaucaucagcaccuuccaccugagcauccccaacuucaaccaguacgaggccaugagcugcgacuucaacggcggcaagaucagcgugcaguacaaccugagccacgccuacgccguggacgccgccaaccacugcggcaccaucgccaacggcgugcugcagaccuucaugagaauggccuggggcggcagcuacaucgcccuggacagcggcaagggcagcugggacugcaucaugaccagcuaccaguaccugaucauccagaacaccaccugggaggaccacugccaguucagcagacccagccccaucggcuaccugggccugcugagccagagaaccagagacaucuacaucagcagaagacugcugggcaccuucaccuggacccugagcgacagcgagggcaacgagacccccggcggcuacugccugaccagauggaugcugaucgaggccgagcugaagugcuucggcaacaccgccguggccaagugcaacgagaagcacgacgaggaguucugcgacaugcugagacuguucgacuucugcaagcaggccaucagaagacugaaggccgaggcccagaugagcauccagcugaucaacaaggccgugaacgcccugaucaacgaccagcugaucaugaagaaccaccugagagacaucaugggcauccccuacugcaacuacagcaaguacugguaccugaaccacaccgugaccggcaagaccagccugcccagaugcuggcuggugagcaacggcagcuaccugaacgagacccacuucagcgacgacaucgagcagcaggccgacaacaugaucaccgagcugcugcagaaggaguacaucgacagacagggcaagaccccccugggccugguggaccuguucguguucagcaccagcuucuaccugaucagcaucuuccugcaccuggugaagauccccacccacagacacgugaucggcaagcccugccccaagccccacagacugaaccacaugggcaucugcagcugcggccuguacaagcaccccggcgugcccgugaaguggaagagaugaggacuagucccuguucccagagcccacuuuuuuuucuuuuuuugaaauaaaauagccugucuuucagaucuaaaaaaaaaaaaaaaaaaaaaaaaaaaaaaaaaaaaaaaaaaaaaaaaaaaaaaaaaaaaaaaaaaaaaaaaaaaaaaaaaaaaaaaaaaaaaaaaaaaa

SEQ ID NO: 37013 - RNA, 1721 nt, Artificial Sequence
  mRNA product Design a-1 (A100) comprising derived and/or modified sequence from LASV(LASV1000-NIG-2009;Clade II)__AIT17782__GPCmut10 (opt4)
aggagagucccgcagucggcguccagcggcucugcuuguucgugugugugucguugcaggccuuauucaagcuuaccaugggccagaucaucaccuucuuccaggaggugccccacgugaucgaggaggugaugaacaucgugcugaucgcccugagccugcuggccauccugaagggcaucuacaacguggccaccugcggccuguucggccuggugagcuuccugcugcugugcggcagaagcugcagcaccaccuacaagggcguguacgagcugcagacccuggagcuggacauggccagccugaacaugugcaugccccugagcugcaccaagaacaacagccaccacuacaucauggugggcaacgagaccggccuggagcugacccugaccaacaccagcaucaucaaccacaaguucugcaaccugagcgacgcccacaagaagaaccuguacgaccacgcccugaugagcaucaucagcaccuuccaccugagcauccccaacuucaaccaguacgaggccaugagcugcgacuucaacggcggcaagaucagcgugcaguacaaccugagccacaccuacgccguggacgccgccaaccacugcggcaccaucgccaacggcgugcugcagaccuucaugagaauggccuggggcggcagcuacaucgcccuggacagcggcaagggcagcugggacugcaucaugaccagcuaccaguaccugaucauccagaacaccaccugggaggaccacugccaguucagcagacccagccccaucggcuaccugggccugcugagccagagaaccagagacaucuacaucagcagaagacugcugggcaccuucaccuggacccugagcgacagcgagggcaacgagacccccggcggcuacugccugaccagauggaugcugaucgaggccgagcugaagugcuucggcaacaccgccguggccaagugcaacgagaagcacgacgaggaguucugcgacaugcugagacuguucgacuucugcaagcaggccaucaagagacugaagaccgaggcccagaugagcauccagcugaucaacaaggccgugaacgcccugaucaacgaccagcugaucaugaagaaccaccugagagacaucaugggcauccccuacugcaacuacagcaaguacugguaccugaaccacaccgugaccggcaagaccagccugcccagaugcuggcuggugagcaacggcagcuaccugaacgagacccacuucagcgacgacaucgagcagcaggccgacaacaugaucaccgagcugcugcagaaggaguacaucgacagacagggcaagaccccccugggccugguggaccuguucguguucagcaccagcuucuaccugaucagcaucuuccugcaccuggugaagauccccacccacagacacguggugggcaagcccugccccaagccccacagacugaaccacaugggcaucugcagcugcggccuguacaagcaccccggcgugcccgugaaguggaagagaugaggacuagucccuguucccagagcccacuuuuuuuucuuuuuuugaaauaaaauagccugucuuucagaucuaaaaaaaaaaaaaaaaaaaaaaaaaaaaaaaaaaaaaaaaaaaaaaaaaaaaaaaaaaaaaaaaaaaaaaaaaaaaaaaaaaaaaaaaaaaaaaaaaaaa

SEQ ID NO: 37014 - RNA, 1721 nt, Artificial Sequence
  mRNA product Design a-1 (A100) comprising derived and/or modified sequence from LASV(LASV221-NIG-2010;Clade II)__AIT17624__GPCmut10 (opt4)
aggagagucccgcagucggcguccagcggcucugcuuguucgugugugugucguugcaggccuuauucaagcuuaccaugggccagaucaucaccuucuuccaggaggugccccacgugaucgaggaggugaugaacaucgugcugaucgcccugagccugcuggccauccugaagggcaucuacaacguggccaccugcggccuguucggccuggugagcuuccugcugcugugcggcagaagcugcagcaccaccuacaagggcguguacgagcugcagacccuggagcuggacauggccagccugaacaugugcaugccccugagcugcaccaagaacaacagccaccacuacaucauggugggcaacgagaccggccuggagcugacccugaccaacaccagcaucaucaaccacaaguucugcaaccugagcgacgcccacaagaagaaccuguacgaccacgcccugaugagcaucaucagcaccuuccaccugagcauccccaacuucaaccaguacgaggccaugagcugcgacuucaacggcggcaagaucagcgugcaguacaaccugagccacaccuacgccaucgacgccgccaaccacugcggcaccaucgccaacggcgugcugcagaccuucaugagaauggccuggggcggcagcuacaucgcccuggacagcggcaagggcagcugggacugcaucaugaccagcuaccaguaccugaucauccagaacaccaccugggaggaccacugccaguucagcagacccagccccaucggcuaccugggccugcugagccagagaaccagagacaucuacaucagcagaagacugcugggcaccuucaccuggacccugagcgacagcgagggcaacgagacccccggcggcuacugccugaccagauggaugcugaucgaggccgagcugaagugcuucggcaacaccgccguggccaagugcaacgagaagcacgacgaggaguucugcgacaugcugagacuguucgacuucugcaagcaggccaucagaagacugaagaccgaggcccagaugagcauccagcugaucaacaaggccgugaacgcccugaucaacgaccagcugaucaugaagaaccaccugagagacaucaugggcauccccuacugcaacuacagcaaguacugguaccugaaccacaccgugaccggcaagaccagccugcccagaugcuggcuggugagcaacggcagcuaccugaacgagacccacuucagcgacgacaucgagcagcaggccgacaacaugaucaccgagaugcugcagaaggaguacauggacagacagggcaagaccccccugggccugguggaccuguucguguucagcaccagcuucuaccugaucagcaucuuccugcaccuggugaagauccccacccacagacacgugaucggcaagcccugccccaagccccacagacugaaccacaugggcaucugcagcugcggccuguacaagcaccccggcgugcccgugaaguggaagagaugaggacuagucccuguucccagagcccacuuuuuuuucuuuuuuugaaauaaaauagccugucuuucagaucuaaaaaaaaaaaaaaaaaaaaaaaaaaaaaaaaaaaaaaaaaaaaaaaaaaaaaaaaaaaaaaaaaaaaaaaaaaaaaaaaaaaaaaaaaaaaaaaaaaaa

SEQ ID NO: 37015 - RNA, 1721 nt, Artificial Sequence
  mRNA product Design a-1 (A100) comprising derived and/or modified sequence from LASV(LASV237-NIG-2010;Clade II)__AIT17638__GPCmut10 (opt4)
aggagagucccgcagucggcguccagcggcucugcuuguucgugugugugucguugcaggccuuauucaagcuuaccaugggccagaucaucaccuucuuccaggaggugccccacgugaucgaggaggugaugaacaucgugcugaucgcccugagccugcuggccauccugaagggcaucuacaacguggccaccugcggccuguucggccuggugagcuuccugcugcugugcggcagaagcugcagcaccaccuacaagggcguguacgagcugcagacccuggagcuggacauggccagccugaacaugugcaugccccugagcugcaccaagaacaacagccaccacuacaucauggugggcaacgagaccggccuggagcugacccugaccaacaccagcaucaucaaccacaaguucugcaaccugagcgacgcccacaagaaggaccuguacgaccacgcccugaugagcaucaucagcaccuuccaccugagcauccccaacuucaaccaguacgaggccaugagcugcgacuucaacggcggcaagaucagcgugcaguacaaccugagccacaccuacgccguggacgccgccaaccacugcggcaccaucgccaacggcgugcugcagaccuucaugagaauggccuggggcggcagcuacaucgcccuggacagcggcaagggcagcugggacugcaucaugaccagcuaccaguaccugaucauccagaacaccaccugggaggaccacugccaguucagcagacccagccccaucggcuaccugggccugcugagccagagaaccagagacaucuacaucagcagaagacugcugggcaccuucaccuggacccugagcgacagcgagggcaacgagacccccggcggcuacugccugaccagauggaugcugaucgaggccgagcugaagugcuucggcaacaccgccguggccaagugcaacgagaagcacgacgaggaguucugcgacaugcugagacuguucgacuucugcaagcaggccaucagaagacugaagaccgaggcccagaugagcauccagcugaucaacaaggccgugaacgcccugaucaacgaccagcugaucaugaagaaccaccugagagacaucaugggcauccccuacugcaacuacagcaaguacugguaccugaaccacaccgugaccggcaagaccagccugcccagaugcuggcuggugagcaacggcagcuaccugaacgagacccacuucagcgacgacaucgagcagcaggccgacaacaugaucaccgagcugcugcagaaggaguacauggacagacagggcaagaccccccugggccugguggaccuguucguguucagcaccagcuucuaccugaucagcaucuuccugcaccugaucaagauccccacccacagacacaucaccggcaagcccugccccaagccccacagacugaaccacaugggcaucugcagcugcggccuguacaagcaccccggcgugcccgugaaguggaagagaugaggacuagucccuguucccagagcccacuuuuuuuucuuuuuuugaaauaaaauagccugucuuucagaucuaaaaaaaaaaaaaaaaaaaaaaaaaaaaaaaaaaaaaaaaaaaaaaaaaaaaaaaaaaaaaaaaaaaaaaaaaaaaaaaaaaaaaaaaaaaaaaaaaaaa

SEQ ID NO: 37016 - RNA, 1721 nt, Artificial Sequence
  mRNA product Design a-1 (A100) comprising derived and/or modified sequence from LASV(LASV253-NIG-2011;Clade II)__AIT17670__GPCmut10 (opt4)
aggagagucccgcagucggcguccagcggcucugcuuguucgugugugugucguugcaggccuuauucaagcuuaccaugggccagaucaucaccuucuuccaggaggugccccacgugaucgaggaggugaugaacaucgugcugaucgcccugagccugcuggccauccugaagggcaucuacaacguggccaccugcggccuguucggccuggugagcuuccugcugcugugcggcagaagcugcagcaccaccuacaagggcguguacgagcugcagacccuggagcuggacauggccagccugaacaugugcaugccccugagcugcaccaagaacaacagccaccacuacaucauggugggcaacgagaccggccuggagcugacccugaccaacaccagcaucaucaaccacaaguucugcaaccugagcgacgcccacaagaagaaccuguacgaccacgcccugaugagcaucaucagcaccuuccaccugagcauccccaacuucaaccaguacgaggccaugagcugcgacuucaacggcggcaagaucagcgugcaguacaaccugagccacaccuacgccguggacgccgccaaccacugcggcaccaucgccaacggcgugcugcagaccuucaugagaauggccuggggcggcagcuacaucgcccuggacagcggcaagggcagcugggacugcaucaugaccagcuaccaguaccugaucauccagaacaccaccugggaggaccacugccaguucagcagacccagccccaucggcuaccugggccugcugagccagagaaccagagacaucuacaucagcagaagacugcugggcaccuucaccuggacccugagcgacagcgagggcaacgagacccccggcggcuacugccugaccagauggaugcugaucgaggccgagcugaagugcuucggcaacaccgccguggccaagugcaacgagaagcacgacgaggaguucugcgacaugcugagacuguucgacuucugcaagcaggccaucagaagacugaaggccgaggcccagaugagcauccagcugaucaacaaggccgugaacgcccugaucaacgaccagcugaucaugaagaaccaccugagagacaucaugggcauccccuacugcaacuacagcaaguacugguaccugaaccacaccgugaccggcagaaccagccugcccagaugcuggcuggugagcaacggcagcuaccugaacgagacccacuucagcgacgacaucgagcagcaggccgacaacaugaucaccgagcugcugcagaaggaguacaucgacagacagggcaagaccccccugggccugguggaccuguucguguucagcaccagcuucuaccugaucagcaucuuccugcaccuggugaagauccccacccacagacacaucaucggcaagcccugccccaagccccacagacugaaccacaugggcaucugcagcugcggccuguacaagcaccccggcgugcccgugaaguggaagagaugaggacuagucccuguucccagagcccacuuuuuuuucuuuuuuugaaauaaaauagccugucuuucagaucuaaaaaaaaaaaaaaaaaaaaaaaaaaaaaaaaaaaaaaaaaaaaaaaaaaaaaaaaaaaaaaaaaaaaaaaaaaaaaaaaaaaaaaaaaaaaaaaaaaaa

SEQ ID NO: 37017 - RNA, 1721 nt, Artificial Sequence
  mRNA product Design a-1 (A100) comprising derived and/or modified sequence from LASV(LASV254-NIG-2011;Clade II)__AIT17674__GPCmut10 (opt4)
aggagagucccgcagucggcguccagcggcucugcuuguucgugugugugucguugcaggccuuauucaagcuuaccaugggccagaucaucaccuucuuccaggaggugccccacgugaucgaggaggugaugaacaucgugcugaucgcccugagccugcuggccauccugaagggcaucuacaacguggccaccugcggccuguucggccuggugagcuuccugcugcugugcggcagaagcugcagcaccaccuacaagggcguguacgagcugcagacccuggagcuggacaugaccaaccugaacaugugcaugccccugagcugcaccaagaacaacagccaccacuacaucauggugggcaacgagaccggccuggagcugacccugaccaacaccagcaucaucaaccacaaguucugcaaccugagcgacgcccacaagaagaaccuguacaaccacgcccugaugagcaucaucagcaccuuccaccugagcauccccaacuucaaccaguacgaggccaugagcugcgacuucaacggcggcaagaucagcgugcaguacaaccugagccacagcuacgccguggacgccgccaaccacugcggcaccaucgccaacggcgugcugcagaccuucaugagaauggccuggggcggcagcuacaucgcccuggacagcggcaagggcaacugggacugcaucaugaccagcuaccaguaccugaucauccagaacaccaccugggaggaccacugccaguucagcagacccagccccaucggcuaccugggccugcugagccagagaaccagagacaucuacaucagcagaagacugcugggcaccuucaccuggacccugagcgacagcgagggcaacgagacccccggcggcuacugccugaccagauggaugcugaucgaggccgagcugaagugcuucggcaacaccgccguggccaagugcaacgagaagcacgacgaggaguucugcgacaugcugagacuguucgacuucugcaagcaggccaucagaagacugaagaccgaggcccaggccaacauccagcugaucaacaaggccgugaacgcccugaucaacgaccagcugaucaugaagaaccaccugagagacaucaugggcauccccuacugcaacuacagcaaguacugguaccugaaccacaccgugaccggcaagaccagccugcccagaugcuggcuggugagcaacggcagcuaccugaacgagacccacuucagcgacgacaucgagcagcaggccgacaacaugaucaccgagcugcugcagaaggaguacauggacagacagggcaagaccccccugggccugguggaccuguucguguucagcaccagcuucuaccugaucagcaucuuccugcaccuggugaagauccccacccacagacacgugaucggcaagcccugccccaagccccacagacugaaccacaugggcaucugcagcugcggccuguacaagcaccccggcgugcccgugaaguggaagagaugaggacuagucccuguucccagagcccacuuuuuuuucuuuuuuugaaauaaaauagccugucuuucagaucuaaaaaaaaaaaaaaaaaaaaaaaaaaaaaaaaaaaaaaaaaaaaaaaaaaaaaaaaaaaaaaaaaaaaaaaaaaaaaaaaaaaaaaaaaaaaaaaaaaaa

SEQ ID NO: 37018 - RNA, 1721 nt, Artificial Sequence
  mRNA product Design a-1 (A100) comprising derived and/or modified sequence from LASV(Nig08-A19;Clade III)__ADU56618__GPCmut10 (opt4)
aggagagucccgcagucggcguccagcggcucugcuuguucgugugugugucguugcaggccuuauucaagcuuaccaugggccagaucgugaccuucuuccaggaggugccccacgugaucgaggaggugaugaacaucgugcugaucgcccugagcauccuggccauccugaagggccuguacaacaucgccaccugcggccugaucggccuggugaccuuccugcugcugagcggcagaagcugcagcaugaccuacaagggcguguacgagcugcagacccuggagcugaacaugaacacccugaacaugugcaugccccugagcugcaccaagaacaacagccaccacuacaucauggugggcaacgagaccggccuggagcugacccugaccaacaccagccugcugcaccacaaguucugcaaccugagcgacgcccacaagaagaaccuguacgaccacacccugaugagcaucaucagcaccuuccaccugagcauccccaacuucaaccaguacgaggccaugagcugcgacuucaacggcggcaagaucaccgugcaguacaaccugagccacagcuacgccaucgacgccgccaaccacugcggcaccguggccaacggcgugcugcagaccuucaugagaauggccuggggcggcagcuacaucgcccuggacagcggcagaggcaagugggacugcaucaugaccagcuaccaguaccugaucauccagaacaccaccugggaggaccacugccaguucagcagacccagccccaucggcuaccugggccugcugagccagagaaccagagacaucuacaucagcagaagacugcugggcaccuucaccuggacccugagcgacagcgagggcaacgagacccccggcggcuacugccugaccagauggaugcugaucgaggccgagcugaagugcuucggcaacaccgccguggccaagugcaacgagaagcacgacgaggaguucugcgacaugcugagacuguucgacuucugcaagcaggccaucagaagacugaaggccgaggcccagaugagcauccagcugaucaacaaggccgugaacgcccugaucaacgaccagcugaucaugaagaaccaccugagagacaucaugggcauccccuacugcaacuacagcaaguacugguaccugaaccacaccagcaccggcagaaccagccugcccagaugcuggcuggugagcaacggcagcuaccugaacgagacccacuucagcgacgacaucgagcagcaggccgacaacaugaucaccgagaugcugcagaaggaguaccuggacagacagggcaagaccccccugggccugguggaccuguucguguucagcaccagcuucuaccugaucagcaucuuccugcaccuggugaagauccccacccacagacacaucgugggcaagcccugccccaagccccacagacugaaccacaugggcaucugcagcugcggccuguacaagcagcccggcgugcccgugagauggaagagaugaggacuagucccuguucccagagcccacuuuuuuuucuuuuuuugaaauaaaauagccugucuuucagaucuaaaaaaaaaaaaaaaaaaaaaaaaaaaaaaaaaaaaaaaaaaaaaaaaaaaaaaaaaaaaaaaaaaaaaaaaaaaaaaaaaaaaaaaaaaaaaaaaaaaa

SEQ ID NO: 37019 - RNA, 1724 nt, Artificial Sequence
  mRNA product Design a-1 (A100) comprising derived and/or modified sequence from LASV(G1180-SLE-2010;Clade IV)__AIT17168__GPCmut10 (opt4)
aggagagucccgcagucggcguccagcggcucugcuuguucgugugugugucguugcaggccuuauucaagcuuaccaugggccagaucgugaccuucuuccaggaggugccccacgugaucgaggaggugaugaacaucgugcugaucgcccugagcauccuggccgugcugaagggccuguacaacuucgccaccugcggccuggugggccugcugaccuuccugcugcugugcggcagaagcugcaccgccagcagauacaagggcguguacgagcugcagacccuggagcugaacauggagacccugaacaugugcaugccccugagcugcaccaagaacaacagccaccacuacaucauggugggcaacgagaccggccuggagcugacccugaccaacaccagcaucaucaaccacaaguucugcaaccugagcgacgcccacaagaagaaccuguacgaccacgcccugaugagcaucaucagcaccuuccaccugagcauccccaacuucaaccaguacgaggccaugagcugcgacuucaacggcggcaagaucagcgugcaguacaaccugagccacagcuacgccggcgacgccgccaaccacugcggcaccguggccaacggcgugcugcagaccuucaugagaauggccuggggcggcagcuacaucgcccuggacagcggccacggcagcugggacugcaucaugaccagcuaccaguaccugaucauccagaacaccaccugggaggaccacugccaguucagcagacccagccccaucggcuaccugggccugcugagccagagaaccagagacaucuacaucagcagaagacugcugggcaccuucaccuggacccugagcgacagcgagggcaaggacacccccggcggcuacugccugaccagauggaugcugaucgaggccgagcugaagugcuucggcaacaccgccguggccaagugcaacgagaagcacgacgaggaguucugcgacaugcugagacuguucgacuucugcaagcaggccauccagagacugaaggccgaggcccagaugagcauccagcugaucaacaaggccgugaacgcccugaucaacgaccagcugaucaugaagaaccaccugagagacaucaugggcauccccuacugcaacuacagcaaguacugguaccugaaccacaccaccaccggcaagaccagccugcccaagugcuggcuggugagcaacggcagcuaccugaacgagacccacuucagcgacgacaucgagcagcaggccgacaacaugaucaccgagaugcugcagaaggaguacauggagagacagggcaagaccccccugggccugguggaccuguucguguucagcaccagcuucuaccugaucagcaucuuccugcaccuggugaagauccccacccacagacacaucgugggcaagagcugccccaagccccacagacugaaccacaugggcaucugcagcugcggccuguacaagcagcccggcgugcccgugaaguggaagagaugaggacuagucccuguucccagagcccacuuuuuuuucuuuuuuugaaauaaaauagccugucuuucagaucuaaaaaaaaaaaaaaaaaaaaaaaaaaaaaaaaaaaaaaaaaaaaaaaaaaaaaaaaaaaaaaaaaaaaaaaaaaaaaaaaaaaaaaaaaaaaaaaaaaaa

SEQ ID NO: 37020 - RNA, 1724 nt, Artificial Sequence
  mRNA product Design a-1 (A100) comprising derived and/or modified sequence from LASV(G1442-SLE-2011;Clade IV)__AIT17180__GPCmut10 (opt4)
aggagagucccgcagucggcguccagcggcucugcuuguucgugugugugucguugcaggccuuauucaagcuuaccaugggccagaucgugaccuucuuccaggaggugccccacgugaucgaggaggugaugaacaucgugcugaucgcccugagcauccuggccgugcugaagggccuguacaacguggccaccugcggccugaucggccuggugaccuuccugcugcugugcggcagaagcugcaccaccacccuguacaagggcguguacgagcugcagacccuggagcugaacauggagacccugaacaugugcaugccccugagcugcaccaagaacaacagccaccacuacaucagagugggcaacgagaccggccuggagcugacccugaccaacaccagcaucaucaaccacaaguucugcaaccugagcgacgcccacaagaagaaccuguacgaccacgcccugaugagcaucaucagcaccuuccaccugagcauccccaacuucaaccaguacgaggccaugagcugcgacuucaacggcggcaagaucagcgugcaguacaaccugagccacagcuacgccggcgacgccgccaaccacugcggcaccguggccaacggcgugcugcagaccuucaugagaauggccuggggcggcagcuacaucgcccuggacagcggcagaggcaacugggacugcaucaugaccagcuaccaguaccugaucauccagaacaccaccugggacgaccacugccaguucagcagacccagccccaucggcuaccugggccugcugagccagagaaccagagacguguacaucagcagaagacugcugggcaccuucaccuggacccugagcgacagcgagggcaaggacacccccggcggcuacugccugaccagauggaugcugaucgaggccgagcugaagugcuucggcaacaccgccguggccaagugcaacgagaagcacgacgaggaguucugcgacaugcugagacuguucgacuucugcaagcaggccauccagagacugaaggccgaggcccagaugagcauccagcugaucaacaaggccgugaacgcccugaucaacgaccagcugaucaugaagaaccaccugagagacaucaugggcauccccuacugcaacuacagcaaguacugguaccugaacaacaccgccaccggcaagaccagccugcccaagugcuggcugaucagcaacggcagcuaccugaacgagacccacuucagcgacgacaucgagcaggaggccgacaacaugaucaccgagaugcugcagaaggaguacauggagagacagggcaagaccccccugggccugguggaccuguucguguucagcaccagcuucuaccugaucagcaucuuccugcaccuggugaagauccccacccacagacacaucgugggcaagagcugccccaagccccacagacugaaccacaugggcaucugcagcugcggccuguacaagcagcccggcgugcccgugagauggaagagaugaggacuagucccuguucccagagcccacuuuuuuuucuuuuuuugaaauaaaauagccugucuuucagaucuaaaaaaaaaaaaaaaaaaaaaaaaaaaaaaaaaaaaaaaaaaaaaaaaaaaaaaaaaaaaaaaaaaaaaaaaaaaaaaaaaaaaaaaaaaaaaaaaaaaa

SEQ ID NO: 37021 - RNA, 1724 nt, Artificial Sequence
  mRNA product Design a-1 (A100) comprising derived and/or modified sequence from LASV(G3010-SLE-2013;Clade IV)__AIT17344__GPCmut10 (opt4)
aggagagucccgcagucggcguccagcggcucugcuuguucgugugugugucguugcaggccuuauucaagcuuaccaugggccagaucgugaccuucuuccaggaggugccccacgugaucgaggaggugaugaacaucgugcugaucgcccugagcauccuggccgugcugaagggccuguacaacuucgccaccugcggccuggugggccuggugaccuuccugcugcugugcggcagaagcugcaccaccagccuguacaagggcguguacgagcugcagacccuggagcugaacauggagacccugaacaugugcaugccccugagcugcaccaagaacaacagccaccacuacaucauggugggcaacgagaccggccuggagcugacccugaccaacaccagcaucaucaaccacaaguucugcaaccugagcgacgcccacaagaagaaccuguacaaccacgcccugaugagcaucaucagcaccuuccaccugagcauccccaacuucaaccaguacgaggccaugagcugcgacuucaacggcggcaagaucagcgugcaguacaaccugagccacagcuacgccggcgacgccgccagccacugcggcaccguggccaacggcgugcugcagaccuucaugagaauggccuggggcggcagcuacaucgcccuggacagcggcuacggcaagugggacugcaucaugaccagcuaccaguaccugaucauccagaacaccaccugggaggaccacugccaguucagcagacccagccccaucggcuaccugggccugcugagccagagaaccagagacaucuacaucagcagaagacugcugggcaccuucaccuggacccugagcgacagcgagggcaaggacacccccggcggcuacugccugaccagauggaugcugaucgaggccgagcugaagugcuucggcaacaccgccguggccaagugcaacgagaagcacgacgaggaguucugcgacaugcugagacuguucgacuucugcaagcaggccauccagagacugaagaccgaggcccagaugagcauccagcugaucaacaaggccgugaacgcccugaucaacgaccagcugaucaugaagaaccaccugagagacaucaugggcauccccuacugcaacuacagcaaguacugguaccugaaccacaccaccaccggcaagaccagccugcccaagugcuggcuggugagcaacggcagcuaccugaacgagacccacuucagcgacgacaucgagcagcaggccgacaacaugaucaccgagaugcugcagaaggaguacauggagagacagggcaagaccccccugggccugguggaccuguucguguucagcaccagcuucuaccugaucagcaucuuccugcaccuggugaagauccccacccacagacacaucgugggcaagagcugccccaagccccacagacugaaccacaugggcaucugcagcugcggccuguacaagcagcccggcgugcccgugagauggaagagaugaggacuagucccuguucccagagcccacuuuuuuuucuuuuuuugaaauaaaauagccugucuuucagaucuaaaaaaaaaaaaaaaaaaaaaaaaaaaaaaaaaaaaaaaaaaaaaaaaaaaaaaaaaaaaaaaaaaaaaaaaaaaaaaaaaaaaaaaaaaaaaaaaaaaa

SEQ ID NO: 37022 - RNA, 1724 nt, Artificial Sequence
  mRNA product Design a-1 (A100) comprising derived and/or modified sequence from LASV(G502-SLE-2009;Clade IV)__AIT17126__GPCmut10 (opt4)
aggagagucccgcagucggcguccagcggcucugcuuguucgugugugugucguugcaggccuuauucaagcuuaccaugggccagaucgugaccuucuuccaggaggugccccacgugaucgaggaggugaugaacaucgugcugaucgcccugagcauccuggccgugcugaagggccuguacaacuucgccaccugcggccuggugggccugcugaccuuccugcugcugugcggcagaagcugcaccaccggccuguacaagggcguguacgagcugcagacccuggagcugaacauggagacccugaacaugugcaugccccugagcugcaccaagaacaacagccaccacuacaucauggugggcaacgagaccggccuggagcugacccugaccaacaccagcaucaucaaccacaaguucugcaaccugagcgacgcccacaagaagaaccuguacgaccacgcccugaugagcaucaucagcaccuuccaccugagcauccccaacuucaaccaguacgaggccaugagcugcgacuucaacggcggcaagaucagcgugcaguacaaccugagccacagcuacgccggcgacgccgccgaccacugcggcaccguggccaacggcgugcugcagaccuucaugagaauggccuggggcggcagcuacaucgcccuggacagcggcagaggcagaugggacugcaucaugaccagcuaccaguaccugaucauccagaacaccaccugggaggaccacugccaguucagcagacccagccccaucggcuaccugggccugcugagccagagaaccagagacaucuacaucagcagaagacugcugggcaccuucaccuggacccugagcgacagcgagggcaaggacacccccggcggcuacugccugaccagauggaugcugaucgaggccgagcugaagugcuucggcaacaccgccguggccaagugcaacgagaagcacgacgaggaguucugcgacaugcugagacuguucgacuucugcaagcaggccauccagagacugaaggccgaggcccagaugagcauccagcugaucaacaaggccgugaacgcccugaucaacgaccagcuggugaugaagaaccaccugagagacaucaugggcauccccuacugcaacuacagcagauacugguaccugaaccacaccaccaccggcagaaccagccugcccaagugcuggcuggugagcaacggcagcuaccugaacgagacccacuucagcgacgacaucgagcagcaggccgacaacaugaucaccgagaugcugcagaaggaguacauggagagacagggcaagaccccccugggccugguggaccuguucguguucagcaccagcuucuaccugaucagcaucuuccugcaccuggugaagauccccacccacagacacaucgugggcaagagcugccccaagccccacagacugaaccacaugggcaucugcagcugcggccuguacaagcagcccggcgugcccgugaaguggaagagaugaggacuagucccuguucccagagcccacuuuuuuuucuuuuuuugaaauaaaauagccugucuuucagaucuaaaaaaaaaaaaaaaaaaaaaaaaaaaaaaaaaaaaaaaaaaaaaaaaaaaaaaaaaaaaaaaaaaaaaaaaaaaaaaaaaaaaaaaaaaaaaaaaaaaa

SEQ ID NO: 37023 - RNA, 1724 nt, Artificial Sequence
  mRNA product Design a-1 (A100) comprising derived and/or modified sequence from LASV(G733-SLE-2010;Clade IV)__AIT17154__GPCmut10 (opt4)
aggagagucccgcagucggcguccagcggcucugcuuguucgugugugugucguugcaggccuuauucaagcuuaccaugggccagaucgugaccuucuuccaggaggugccccacgugaucgaggaggugaugaacaucgugcugaucgcccugagcauccuggccgugcugaagggccuguacaacuucgccaccugcggcaucgugggccuggugagcuuccugcugcugugcggcagaagcugcaccaccagccuguacaagggcguguacgagcugcagacccuggagcugaacauggagacccugaacaugugcaugccccugagcugcaccaagaacaacagccaccacuacaucauggugggcaacgagaccggccuggagcugacccugaccaacaccagcaucaucaaccacaaguucugcaaccugagcgacgcccacaagaagaaccuguacgaccacgcccugaugagcaucaucagcaccuuccaccugagcauccccaacuucaaccaguacgaggccaugagcugcgacuucaacggcggcaagaucagcgugcaguacaaccugagccacagcuacgccggcgacgccgccaaccacugcggcaccaucgccaacggcgugcugcagaccuucaugagaauggccuggggcggcagcuacaucgcccuggacagcggcagagacagaugggacugcaucaugaccagcuaccaguaccugaucauccagaacaccaccugggaggaccacugccaguucagcagacccagccccaucggcuaccugggccugcugagccagagaaccagagacaucuacaucagcagaagacugcugggcaccuucaccuggacccugagcgacagcgagggcaaggacacccccggcggcuacugccugaccagauggaugcugaucgaggccgagcugaagugcuucggcaacaccgccguggccaagugcaacgagaagcacgacgaggaguucugcgacaugcugagacuguucgacuucugcaagcaggccauccagagacugaaggccgaggcccagaugagcauccagcugaucaacaaggccgugaacgcccugaucaacgaccagcugaucaugaagaaccaccugagagacaucaugggcauccccuacugcaacuacagcaaguacugguaccugaaccacaccaccaccggcaagaccagccugcccaagugcuggcuggugagcaacggcagcuaccugaacgagacccacuucagcgacgacaucgagcagcaggccgacaacaugaucaccgagaugcugcagaaggaguacauggagagacagggcaagaccccccugggccugguggaccuguucguguucagcaccagcuucuaccugaucagcaucuuccugcaccuggugaagauccccacccacagacacguggugggcaagagcugccccaagccccacagacugaaccacaugggcaucugcagcugcggccuguacggccagcccggcgugcccgugaaguggaagagaugaggacuagucccuguucccagagcccacuuuuuuuucuuuuuuugaaauaaaauagccugucuuucagaucuaaaaaaaaaaaaaaaaaaaaaaaaaaaaaaaaaaaaaaaaaaaaaaaaaaaaaaaaaaaaaaaaaaaaaaaaaaaaaaaaaaaaaaaaaaaaaaaaaaaa

SEQ ID NO: 37024 - RNA, 1724 nt, Artificial Sequence
  mRNA product Design a-1 (A100) comprising derived and/or modified sequence from MOPV/LASV reassortant(IGS-1;Clade IV)__AFY05576__GPCmut10 (opt4)
aggagagucccgcagucggcguccagcggcucugcuuguucgugugugugucguugcaggccuuauucaagcuuaccaugggccagaucgugaccuucuuccaggaggugccccacgugaucgaggaggugaugaacaucgugcugaucgcccugagcgugcuggccgugcugaagggccuguacaacuucgccaccugcggccuggugggccuggugaccuuccugcugcugugcggcagaagcugcaccaccagccuguacaagggcguguacgagcugcagacccuggagcugaacauggagacccugaacaugugcaugccccugagcugcaccaagaacaacagccaccacuacaucauggugggcaacgagaccggccuggagcugacccugaccaacaccagcaucaucaaccacaaguucugcaaccugagcgacgcccacaagaagaaccuguacgaccacgcccugaugagcaucaucagcaccuuccaccugagcauccccaacuucaaccaguacgaggccaugagcugcgacuucaacggcggcaagaucagcgugcaguacaaccugagccacagcuacgccggcgacgccgccaaccacugcggcaccguggccaacggcgugcugcagaccuucaugagaauggccuggggcggcagcuacaucgcccuggacagcggcagaggcaacugggacugcaucaugaccagcuaccaguaccugaucauccagaacaccaccugggaggaccacugccaguucagcagacccagccccaucggcuaccugggccugcugagccagagaaccagagacaucuacaucagcagaagacugcugggcaccuucaccuggacccugagcgacagcgagggcgaggacacccccggcggcuacugccugaccagauggaugcugaucgaggccgagcugaagugcuucggcaacaccgccguggccaagugcaacgagaagcacgacgaggaguucugcgacaugcugagacuguucgacuucugcaagcaggccauccagagacugaaggccgaggcccagaugagcauccagcugaucaacaaggccgugaacgcccugaucaacgaccagcugaucaugaagaaccaccugagagacaucaugggcauccccuacugcaacuacagcaaguacugguaccugaaccacaccaccaccggcagaaccagccugcccaagugcuggcuggugagcaacggcagcuaccugaacgagacccacuucagcgacgacaucgagcagcaggccgacaacaugaucaccgagaugcugcagaaggaguacauggagagacagggcaagaccccccugggccugguggaccuguucguguucagcaccagcuucuaccugaucagcaucuuccugcaccuggugaagauccccacccacagacacaucgugggcaagagcugccccaagccccacagacugaaccacaugggcaucugcagcugcggccuguacaagcagcccggcgugcccgugaaguggaagagaugaggacuagucccuguucccagagcccacuuuuuuuucuuuuuuugaaauaaaauagccugucuuucagaucuaaaaaaaaaaaaaaaaaaaaaaaaaaaaaaaaaaaaaaaaaaaaaaaaaaaaaaaaaaaaaaaaaaaaaaaaaaaaaaaaaaaaaaaaaaaaaaaaaaaa

SEQ ID NO: 37025 - RNA, 1724 nt, Artificial Sequence
  mRNA product Design a-1 (A100) comprising derived and/or modified sequence from LASV(LM765-SLE-2012;Clade IV)__AIT17814__GPCmut10 (opt4)
aggagagucccgcagucggcguccagcggcucugcuuguucgugugugugucguugcaggccuuauucaagcuuaccaugggccagaucgugaccuucuuccaggaggugccccacgugaucgaggaggugaugaacaucgugcugaucgcccugagcauccuggccgugcugaagggccuguacaacuucgccaccugcggccuggugggccuggugaccuuccugcugcugugcggcagaagcugcaccaccagccuguacaagggcguguacgagcugcagacccuggagcugaacauggagacccugaacaugugcaugccccugagcugcaccaagaacaacagccaccacuacaucauggugggcaacgagaccggccuggagcugacccugaccaacaccagcaucaucgaccacaaguucugcaaccugagcgacgcccacagaaagaaccuguacgaccacgcccugaugagcaucaucagcaccuuccaccugagcauccccaacuucaaccaguacgaggccaugagcugcgacuucaacggcggcaagaucagcgugcaguacaaccugagccacagcuacgccaaggacgccgccgaccacugcggcaccguggccaacggcgugcugcagaccuucaugagaauggccuggggcggcagcuacaucgcccuggacagcggcagaggcagaugggacugcaucaugaccagcuaccaguaccugaucauccagaacaccaccugggaggaccacugccaguucagcagacccagccccaucggcuaccugggccugcugagccagagaaccagagacaucuacaucagcagaagacugcugggcaccuucaccuggacccugagcgacagcgagggcaaggacacccccggcggcuacugccugaccagauggaugcugaucgaggccgagcugaagugcuucggcaacaccgccguggccaagugcaacgagaagcacgacgaggaguucugcgacaugcugagacuguucgacuucugcaagcaggccauccagagacugaaggccgaggcccagaugagcauccagcugaucaacaaggccgugaacgcccugaucaacgaccagcugaucaugaagaaccaccugagagacaucaugggcauccccuacugcaacuacagcaaguacugguaccugaaccacaccaccaccggcaagaccagccugcccaagugcuggcuggugagcaacggcagcuaccugaacgagacccacuucagcgacgacaucgagcagcaggccgacaacaugaucaccgagaugcugcagaaggaguacauggagagacagggcaagaccccccugggccugguggaccuguucguguucagcaccagcuucuaccugaucagcaucuuccugcaccuggugaagauccccacccacagacacaucgugggcaagcccugccccaagccccacagacugaaccacaugggcaucugcagcugcggccuguacaagcagcccggcgugcccgugaaguggaagagaugaggacuagucccuguucccagagcccacuuuuuuuucuuuuuuugaaauaaaauagccugucuuucagaucuaaaaaaaaaaaaaaaaaaaaaaaaaaaaaaaaaaaaaaaaaaaaaaaaaaaaaaaaaaaaaaaaaaaaaaaaaaaaaaaaaaaaaaaaaaaaaaaaaaaa

SEQ ID NO: 37026 - RNA, 1724 nt, Artificial Sequence
  mRNA product Design a-1 (A100) comprising derived and/or modified sequence from LASV(LM776-SLE-2012;Clade IV)__AIT17824__GPCmut10 (opt4)
aggagagucccgcagucggcguccagcggcucugcuuguucgugugugugucguugcaggccuuauucaagcuuaccaugggccagaucgugaccuucuuccaggaggugccccacgugaucgaggaggugaugaacaucgugcugaucgcccugagcauccuggccgugcugaagggccuguacaacuucgccaccugcggccuggugggccuggugaccuuccugcugcugugcggcagaagcugcaccaccagcguguacaagggcguguacgagcugcagacccuggagcugaacauggagacccugaacaugugcaugccccugagcugcaccaagaacaacagccaccacuacaucauggugggcaacgagaccggccuggagcugacccugaccaacaccagcaucaucaaccacaaguucugcaaccugagcgacgcccacaagaagaaccuguacgaccacgcccugaugagcaucaucagcaccuuccaccugagcauccccaacuucaaccaguacgaggccaugagcugcgacuucaacggcggcaagaucagcgugcaguacaaccugagccacagcuacgccggcgacgccgccaaccacugcggcaccguggccaacggcgugcugcagaccuucaugagaauggccuggggcggcagcuacaucgcccuggacagcggccacggcaagugggacugcaucaugaccagcuaccaguaccugaucauccagaacaccaccugggaggaccacugccaguucagcagacccagccccaucggcuaccugggccugcugagccagagaaccagagacaucuacaucagcagaagacugcugggcaccuucaccuggacccugagcgacagcgagggcaaggacacccccggcggcuacugccugaccagauggaugcugaucgaggccgagcugaagugcuucggcaacaccgccguggccaagugcaacgagaagcacgacgaggaguucugcgacaugcugagacuguucgacuucugcaagcaggccauccagagacugaaggccgaggcccagaugagcauccagcugaucaacaaggccgugaacgcccugaucaacgaccagcugaucaugaagaaccaccugagagacaucaugggcauccccuacugcaacuacagcaaguacugguaccugaaccacaccaccaccggcaagaccagccugcccaagugcuggcuggugagcaacggcagcuaccugaacgagacccacuucagcgacgacaucgagcagcaggccgacaacaugaucaccgagaugcugcagaaggaguacauggagagacagggcaagaccccccugggccugguggaccuguucguguucagcaccagcuucuaccugaucagcaucuuccugcaccuggugaagauccccacccacagacacaucgugggcaagagcugccccaagccccacagacugaaccacaugggcaucugcagcugcggccuguacaagcagcccggcgugcccgugagauggaagagaugaggacuagucccuguucccagagcccacuuuuuuuucuuuuuuugaaauaaaauagccugucuuucagaucuaaaaaaaaaaaaaaaaaaaaaaaaaaaaaaaaaaaaaaaaaaaaaaaaaaaaaaaaaaaaaaaaaaaaaaaaaaaaaaaaaaaaaaaaaaaaaaaaaaaa

SEQ ID NO: 37027 - RNA, 1724 nt, Artificial Sequence
  mRNA product Design a-1 (A100) comprising derived and/or modified sequence from LASV(Mad39;Clade IV)__ANH09722__GPCmut10 (opt4)
aggagagucccgcagucggcguccagcggcucugcuuguucgugugugugucguugcaggccuuauucaagcuuaccaugggccagaucgugaccuucuuccaggaggugccccacgugaucgaggaggugaugaacaucgugcugaucgcccugagcauccuggccgugcugaagggccuguacaacguggccaccugcggccugaucggccuggugaccuuccugcugcugugcggcagaagcugcaccaccacccuguacaagggcguguacgagcugcaggcccuggagcugaacauggagacccugaacaugugcaugccccugagcugcaccaagaacaacagccaccacuacaucagagugggcaacgagaccggccuggagcugacccugaccaacaccagccugaucaaccacaaguucugcaaccugagcgacgcccacaagaagaaccuguacgaccacgcccugaugagcaucaucagcaccuuccaccugagcauccccaacuucaaccaguacgaggccaugagcugcgacuucaacgacggcaagaucagcgugcaguacaaccugagccacaccuacgccggcgacaccgccaaccacugcggcaccguggccaacggcgugcugcagaccuucaugagaauggccuggggcggcagcuacaucgcccuggacagcggcagaggcggcugggacugcaucaugaccagcuaccaguaccugaucauccagaacaccaccugggaggaccacugccaguucagcagacccagccccaucggcuaccugggccugcugagccagagaaccagagacaucuacaucagcagaagacugcugggcaccuucaccuggacccugagcgacagcgagggcaaggacacccccggcggcuacugccugaccagauggaugcugaucgaggccgagcugaagugcuucggcaacaccgccguggccaagugcaacgagaagcacgacgaggaguucugcgacaugcugagacuguucgacuucugcaagcaggccauccagagacugaaggccgaggcccagaugagcauccagcugaucaacaaggccgugaacgcccugaucaacgaccagcugaucaugaagaaccaccugagagacaucaugggcauccccuacugcaacuacagcaaguacugguaccugaaccacaccgugaccggcaagaccagccugcccaagugcuggcuggugagcaacggcagcuaccugaacgagacccacuucagcgacgacaucgagcagcaggccgacaacaugaucaccgagaugcugcagaaggaguacauggagagacagggcaagaccccccugggccugguggaccuguucguguucagcaccagcuucuaccugaucagcaucuuccugcaccuggugaagauccccacccacagacacguggugggcaagcccugccccaagccccacagacugaaccacaugggcaucugcagcugcggcuucuacaagcagcccggcgugcccgugagauggaagagaugaggacuagucccuguucccagagcccacuuuuuuuucuuuuuuugaaauaaaauagccugucuuucagaucuaaaaaaaaaaaaaaaaaaaaaaaaaaaaaaaaaaaaaaaaaaaaaaaaaaaaaaaaaaaaaaaaaaaaaaaaaaaaaaaaaaaaaaaaaaaaaaaaaaaa

SEQ ID NO: 37028 - RNA, 1724 nt, Artificial Sequence
  mRNA product Design a-1 (A100) comprising derived and/or modified sequence from LASV(Z0947-SLE-2011;Clade IV)__AIT17840__GPCmut10 (opt4)
aggagagucccgcagucggcguccagcggcucugcuuguucgugugugugucguugcaggccuuauucaagcuuaccaugggccagaucgugaccuucuuccaggaggugccccacgugaucgaggaggugaugaacaucgugcugaucgcccugagcauccuggccgugcugaagggccuguacaacuucgccaccugcggccuggugggccuggugaccuuccugcugcugugcggcagaagcugcaccaucagccuguacaagggcguguacgagcugcagacccuggagcugaacauggagacccugaacaugugcaugccccugagcugcaccaagaacaacagccaccacuacaucauggugggcaacgagaccggccuggagcugacccugaccaacaccagcaucaucaaccacaaguucugcaaccugagcgacgcccacaagaagaaccuguacgaccacgcccugaugagcaucaucagcaccuuccaccugagcauccccaacuucaaccaguacgaggccaugagcugcgacuucaacggcggcaagaucagcgugcaguacaaccugagccacagcuacgccggcgacgccgccaaccacugcggcaccguggccaacggcgugcugcagaccuucaugagaauggccuggggcggcagcuacaucgcccuggacagcggcagagacagaugggacugcaucaugaccagcuaccaguaccugaucauccagaacaccaccugggaggaccacugccaguucagcagacccagccccaucggcuaccugggccugcugagccagagaaccagagacaucuacaucagcagaagacugcugggcaccuucaccuggacccugagcgacagcgagggcaaggacacccccggcggcuacugccugaccagauggaugcugaucgaggccgagcugaagugcuucggcaacaccgccguggccaagugcaacgagaagcacgacgaggaguucugcgacaugcugagacuguucgacuucugcaagcaggccauccagagacugaaggccgaggcccagaugagcauccagcugaucaacaaggccgugaacgcccugaucaacgaccagcugaucaugaagaaccaccugagagacaucaugggcauccccuacugcaacuacagcaaguacugguaccugaaccacaccaccaccggcaagaccagccugcccaagugcuggcuggugagcaacggcagcuaccugaacgagacccacuucagcgacgacaucgagcagcaggccgacaacaugaucaccgagaugcugcagaaggaguacauggagagacagggcaagaccccccugggccugguggaccuguucguguucagcaccagcuucuaccugaucagcaucuuccugcaccuggugaagauccccacccacagacacaucgugggcaagcccugccccaagccccacagacugaaccacaugggcaucugcagcugcggccuguacaagcagcccggcgugcccgugaaguggaagagaugaggacuagucccuguucccagagcccacuuuuuuuucuuuuuuugaaauaaaauagccugucuuucagaucuaaaaaaaaaaaaaaaaaaaaaaaaaaaaaaaaaaaaaaaaaaaaaaaaaaaaaaaaaaaaaaaaaaaaaaaaaaaaaaaaaaaaaaaaaaaaaaaaaaaa

SEQ ID NO: 37029 - RNA, 1724 nt, Artificial Sequence
  mRNA product Design a-1 (A100) comprising derived and/or modified sequence from LASV(Josiah;Clade IV)__NP_694870__GPCmut10 (opt5)
aggagagucccgcagucggcguccagcggcucugcuuguucgugugugugucguugcaggccuuauucaagcuuaccaugggccagaucgugaccuucuuucaagaggucccccacguuauugaagaggugaugaacaucgugcugauugcccucagcguccuggcugugcuuaaggggcuguacaauuucgccacaugcggacucguuggccuggugacguuucuucugcucugugggagauccugcaccacaucucuguauaaaggagucuacgaacugcagacccucgagcugaacauggaaacacuuaauauguguaugccucugagcugcaccaagaacaauucccaucacuauaucauggugggcaacgagacagggcucgagcugacccuuacgaauaccucuauuaucaaccauaaauucuguaaucugagcgacgcgcacaagaaaaaccucuacgaucaugcucugauguccaucauuucuacauuucaccugagcaucccgaauuucaaccaguaugaagccauguccugcgacuuuaauggaggcaagauuagcguucaguacaaccucucucacuccuaugccggcgaugcugccaaucauugugggaccguggcuaacggaguccugcaaacauucaugcggauggccuggggcgggagcuacaucgcgcuugacucuggacgcggcaacugggauugcauuaugaccuccuaccaguaucugaucauucagaauacgacaugggaggaccacugucaguuuagcagacccucuccuaucggguaccucggacugcuuucccaacggacccgcgauaucuauauuagcagacggcugcucggcacauucaccuggacccuguccgacucugaaggcaaggauacacccgggggauacugccugacgcgcuggaugcucaucgaggccgagcugaaauguuuuggcaacaccgcuguggccaagugcaaugaaaaacaugacgaggaguucugcgauaugcuuagacuguuugacuucuguaagcaggcuauucagcggcucaaagccgaagcgcagaugagcauccaacugauuaacaaggccgugaaugcucuuaucaacgaucagcugaucaugaagaaucaccuccgcgacauuauggggaucccuuauugcaacuacuccaaauauugguaccugaaucacacaaccacaggaagaaccagccugcccaaguguuggcucgucucuaacggcuccuaccugaaugaaacgcauuucagcgacgauauugagcagcaagccgacaacaugaucacagagaugcuucagaaagaauauauggagcggcaggggaagaccccucugggacucguugaucuguuuguguucucuaccagcuuuuaccugauuuccaucuuccuucaccucgugaaaaucccgacacaucgccacauugucggcaagucuugccccaaaccucauagacugaaucacaugggcaucuguagcugcgggcuguauaagcagcccggagugccuguuaaguggaaacggugaggacuagucccuguucccagagcccacuuuuuuuucuuuuuuugaaauaaaauagccugucuuucagaucuaaaaaaaaaaaaaaaaaaaaaaaaaaaaaaaaaaaaaaaaaaaaaaaaaaaaaaaaaaaaaaaaaaaaaaaaaaaaaaaaaaaaaaaaaaaaaaaaaaaa

SEQ ID NO: 37030 - RNA, 1721 nt, Artificial Sequence
  mRNA product Design a-1 (A100) comprising derived and/or modified sequence from LASV(LP;Clade I)__AAF86701__GPCmut10 (opt5)
aggagagucccgcagucggcguccagcggcucugcuuguucgugugugugucguugcaggccuuauucaagcuuaccaugggccagaucauuaccuucuuucaagaggugccccacgucaucgaagagguuaugaacauugugcugaucgcccucagccugcuugcuauucugaaggggcucuacaauaucgccacaugcggaaucauuggccugguggcguuccuuuuucugugugggaaauccugcucucucacgcugaagggaggcuaugaacugcagacccucgagcugaacauggaaacacuuaauauguguaugccucugagcugcaccaaaaacuccucucaucacuacaucagagucgggaaugagacaggacucgagcugacccuuacaaacaccagcauuaucaaucauaaguucuguaaccuguccgacgcucacaaaaagaaucucuaugaucaugcccugaugucuauuaucagcacguuucaccuguccauuccgaacuucaaucaguacgaagccaugagcugcgacuuuaacggcggcaagaucucugugcaguauaaucucucccacagcuacgcuggggaugccgcugagcauuguggaaccguugccaacggcgugcugcaaacauucaugcggauggcguggggagggcgcuauaucgcccuugacucuggcaaagggaauugggauugcauuaugaccuccuaccaguaccugaucauucagaacacaaccugggaagaccacugucaguuuagcagacccucuccuaucggauaucucggccugcuuucccaacggacgcgcgauauuuacaucagcagacggcugcucggcacauucaccuggacacuguccgacucugaggggaacgagacccccggaggcuauugccugacccgcuggaugcucaucgaagcugagcugaaguguuuugggaauacagccgucgcuaaaugcaacgaaaagcaugaugaggaguucugcgacaugcuuagacuguuugauuucuguaaacaggccauucggcgccucaaggcggaagcccagaugagcauccagcugauuaauaaggcugugaacgcccuuaucaaugaccaacugauuaugaaaaaccaccucagagauaucaugggaaucccuuacugcaauuauuccaaguacugguaucugaaccacacgagcucuggccggaccucccugcccaaauguuggcucauuagcaaugggucuuaccugaacgagacacaguucagcgacgacaucgaacagcaagcugauaauaugauuaccgagaugcuucagaaggaauacaucgagcgccagggaaaaacaccucugggccucguugacauuuuuaucuucuccaccucuuuuuaucugauuagcaucuuccugcaucuuaucaagauuccgacgcacagacauaucgugggcaaacccugcccuaagccccaccggcucaaccauaugggggucuguuccugcggacuguacaagcacccuggcgugcccacaaaauggaagcgcugaggacuagucccuguucccagagcccacuuuuuuuucuuuuuuugaaauaaaauagccugucuuucagaucuaaaaaaaaaaaaaaaaaaaaaaaaaaaaaaaaaaaaaaaaaaaaaaaaaaaaaaaaaaaaaaaaaaaaaaaaaaaaaaaaaaaaaaaaaaaaaaaaaaaa

SEQ ID NO: 37031 - RNA, 1721 nt, Artificial Sequence
  mRNA product Design a-1 (A100) comprising derived and/or modified sequence from LASV(803213;Clade II)__AAF86703__GPCmut10 (opt5)
aggagagucccgcagucggcguccagcggcucugcuuguucgugugugugucguugcaggccuuauucaagcuuaccaugggccagaucauuaccuucuuucaagaggugccccacgucaucgaagagguuaugaacauugugcugaucgcccucagccugcuugcuauucugaaggggaucuacaauguggccacaugcggacucuucggccugaucuccuuucuucugcucugugggagaucuugcagcgucacguauaaaggaguguacgaacugcagacccuggagcucaacauggcgaaucugaacauguguaugccucuuuccugcacaaagaauaacucucaucacuauauuaugguuggcaaugaaaccgggcuggagcucacacugaccaacacaagcaucauuaaucauaaauucuguaaccuuuccgacgcucacaagaaaaaucuguacgaucaugcccucaugucuaucauuagcaccuuucaccuguccaucccgaacuucaaucaguaugaggccaugagcugcgacuuuaacggaggcaagauuucugugcaguacaaucugucccacagcuucgcugucgaugccgcuaaccauuguggcacgaucgccaacggggugcuccaaaccuuuaugcggauggcguggggaggcucuuauaucgcccuggacuccgggaagggaaauugggauugcauuaugacaagcuaccaguaccuuaucauucagaacaccacaugggaagaccacugucaguucucucgccccuccccuaucggcuaucuggggcuccugagccaaagaacccgggauauuuacaucucccgcagacuucugggaacguuuacauggacccucucugacagcgagggcaaugaagcucccggcggguauugccugacacgguggaugcugaucgaggccgagcucaaauguuucggaaacaccgcuguugccaagugcaaugaaaaacaugaugaggaauuuugcgacaugcugcgccuuuucgauuucuguaagcaggcgauuaaaagacugaagaccgaggcccagauguccauccagcucauuaacaaggcugugaaugcccugaucaacgaccaacuuauuaugaaaaaucaucugcgggauaucaugggcaucccuuacugcaacuauagccgcuacugguaucucaaucacacagucacggggaagaccucucugcccagauguuggcugguguccaacggaagcuaccucaaugaaacacacuuuucugacgacauugagcagcaggcugauaacaugaucaccgagaugcugcaaaaagaauacauggaccggcagggcaagacaccucuugggcugguggaucucuucgucuuuagcaccuccuucuaucugauuucuaucuuucugcaccuuguuaaaauuccgacgcaucgccacaucgugggaaagcccugcccuaaaccccauagacucaaucacaugggcauuuguagcugcggccuguacaagcacccuggggugcccgucaaguggaaacggugaggacuagucccuguucccagagcccacuuuuuuuucuuuuuuugaaauaaaauagccugucuuucagaucuaaaaaaaaaaaaaaaaaaaaaaaaaaaaaaaaaaaaaaaaaaaaaaaaaaaaaaaaaaaaaaaaaaaaaaaaaaaaaaaaaaaaaaaaaaaaaaaaaaaa

SEQ ID NO: 37032 - RNA, 1721 nt, Artificial Sequence
  mRNA product Design a-1 (A100) comprising derived and/or modified sequence from LASV(GA391;Clade III)__CAA36645__GPCmut10 (opt5)
aggagagucccgcagucggcguccagcggcucugcuuguucgugugugugucguugcaggccuuauucaagcuuaccaugggccagaucgugaccuucuuucaagaggucccccacguuauugaagaggugaugaacaucgugcugauugcccucagcauccuggcuauucuuaaggggcuguacaaugucgccacaugcggacucaucggccuggugacguuccuucugcucuccgggagaucuuguagccugaucuauaaaggaaccuacgaacugcagacacucgagcugaacauggaaacccuuaauaugugcaugccucuguccuguacaaagaacaauucucaucacuauauucggguuggcaacgagaccgggcucgagcugacacuuaccaauacgagcauccugaaccauaaauuuugcaaucucuccgacgcgcacaagcgcaaccuguacgaucauucucugaugagcauuaucuccaccuuccaccucagcauuccgaauuuuaaccaguaugaagcuaugucuugugacuucaauggaggcaaaaucacagugcaguacaaccugucccacagcuuugccgucgaugccgcuggccauugcgggacccuugccaauggagugcugcaaacauucaugagaauggcuuggggcgggucuuauauugcccucgacuccggacggggcaacugggauuguaucaugaccagcuaccaguaccugaucauucagaacacgacaugggacgaucacugccaguuuucucgccccuccccuaucggguaucuuggacugcucagccaaagaacccgggacauuuacaucucccgcagacugcugggcacauucaccuggacccucucugauagcgagggcaaugaaacacccgggggauauugucugacgcgguggaugcuuauugaggcggagcugaagugcuuuggcaacaccgccguugcuaaguguaaugaaaaacaugacgaggaguucugcgauaugcuccgccuguuugacuucugcaagcaggccaucagacggcuuaaaacagaagcucagauguccauccagcugauuaacaaggccgugaaugcgcucaucaacgaucaacugauuaugaaaaaucaucugcgcgacaucauggggauuccuuacuguaacuauagcagauacugguaucucaaucacaccucuacaggaaagaccucccugccccggugcuggcuuaucagcaacggcucuuaccugaaugaaacgaaguucagcgacgauaucgagcagcaggccgacaacaugauuacagagaugcuccaaaaagaauacaucgaucgccaggggaagaccccucugggacuggucgaccuuuuuguguucuccaccucuuuuuaucucauuagcaucuuccugcaccuggugaaaauuccgacacacagacauaucgucggcaagcccuguccuaaaccccaccggcucaaucauaugggcauuugcuccugugggcuguacaagcagccuggaguucccgugagauggaaacgcugaggacuagucccuguucccagagcccacuuuuuuuucuuuuuuugaaauaaaauagccugucuuucagaucuaaaaaaaaaaaaaaaaaaaaaaaaaaaaaaaaaaaaaaaaaaaaaaaaaaaaaaaaaaaaaaaaaaaaaaaaaaaaaaaaaaaaaaaaaaaaaaaaaaaa

SEQ ID NO: 37033 - RNA, 1724 nt, Artificial Sequence
  mRNA product Design a-1 (A100) comprising derived and/or modified sequence from LASV(AV;Clade V)__CCA30314__GPCmut10 (opt5)
aggagagucccgcagucggcguccagcggcucugcuuguucgugugugugucguugcaggccuuauucaagcuuaccaugggccagaucgugaccuucuuucaagaggucccccacguuauugaagaggugaugaacaucgugcugauugcccucagcauccuggcuguccuuaaggggcuguacaauauugccacaugcggacucaucggccugaucacguuccuucugcucugugggagauccugcucuagcaaccuguauaaaggaguguacgaacugcagucccucgaccugaauauggagacccuuaacauguguaugccucugucuugcacaaagaauaacagccaucacuauauucggguuggcaaugauaccgggcucgaacugacacuuaccaacacauccauccugaaucauaaauuuuguaaccucucugacgcgcacaagaaagaucuguacgaccaugcucugaugagcauuaucuccaccuuccaccucagcauuccgaauuuuaaccaguaugaggccaugucuugcgauuucaauggaggcaagaucuccgugcaguacaaccugagccacucuuaugccauugacgcugccaaucauuguggcacggucgcuaacgggauccuucaaaccuuuaugcgcauggccuggggaggcuccuacaucgcgcuggauagcgggagaggaaacugggacugcauuaugacaucuuaccaguaucucaucauucagaauaccacaugggagaaccacugucaguucucccggcccagcccuaucggcuaccuggggcuucugucccaacgcaccagagauauuuauaucucucggcgccuccugggaacguuuacauggacccugagcgacuccgaaggcaaugccacacccggcggguacugccucaccagauggaugcugaucgaggcugaacuuaaguguuucggaaacaccgccguggcuaaaugcaaugagaagcaugaugaggaauuuugcgacaugcugcgccucuucgauuuuuguaaacaggccauuagccggcugaagucugaggcgcagauguccauccagcuuauuaacaaagccguuaaugcucugaucaacgaccaacucauuaugaagaaucaccugagagacaucaugggcaucccuuauugcaacuacagcaaguauugguaccugaaucacacaauuacggggaaaaccucucuccccaaguguuggcuggugagcaacggauccuaccuuaaugaaacacauuucucugaugacaucgagcagcaggccgauaacaugauuaccgaaaugcugcaaaaagaguauauggagcggcagggcaagacaccucucgggcuggucgaccuguucguguuuagcaccuccuucuaccuuaucagcauuuuucuccgccuggugaaaaucccgacgcacagacauauugucggaaagcccugcccuaaaccccaccggcugaaucauaugggcaucuguucuugcggccucuauaagcagccugggguucccgugcgcuggaagagaugaggacuagucccuguucccagagcccacuuuuuuuucuuuuuuugaaauaaaauagccugucuuucagaucuaaaaaaaaaaaaaaaaaaaaaaaaaaaaaaaaaaaaaaaaaaaaaaaaaaaaaaaaaaaaaaaaaaaaaaaaaaaaaaaaaaaaaaaaaaaaaaaaaaaa

SEQ ID NO: 37034 - RNA, 1721 nt, Artificial Sequence
  mRNA product Design a-1 (A100) comprising derived and/or modified sequence from LASV(Togo/2016/7082;Clade VI)__AMR44577__GPCmut10 (opt5)
aggagagucccgcagucggcguccagcggcucugcuuguucgugugugugucguugcaggccuuauucaagcuuaccaugggccagaucauuaccuucuuucaagaggugccccacgucaucgaagagguuaugaacauugugcugaucgcccucagccugcuugcuauucugaaggggguguacaaugucgccacaugcggaaucaucggccucgugacguuccuguuucuuugugggagauccugcucucugauuuauaaaggaagcuacgaacuccagacccuggagcugaacauggaaacacucaauauguguaugccucuguccugcaccaagaacucuagccaucacuauauccggguuggcaaugagacagggcuugagcugacccucacaaacaccuccauuaucaaucauaaauucuguaaccugucugacgcgcacaagcgcaaucuuuacgaucaugcucugaugagcauucucuccacguuucaccugagcaucccgaacuucaaucaguaugaagccaugucuugcgacuuuaacggaggcaaaauuuccgugcaguacaaucugagccacgccuaugcugucgaugccgcugagcauuguggcaccguggccaacgggguucuccaaacauucaugagaauggcguggggaggcucuuacaucgcccuggacuccgggcggggaaauugggauugcaucaugaccagcuaccaguaucuuauuauccagaacacaaccugggaagaccacugucaguuuucucgccccuccccuauuggcuaccuggggcuccugagccaaagaacgcgggauaucuauauuucccgcagacuucugggaacauucaccuggacacucucugacagcgagggcaacgagacccccggcggguacugccugacccgguggaugcugaucgaagcugagcucaaguguuuuggaaauacagccguggcuaagugcaacgaaaaacaugaugaggaguucugcgacaugcugcgccuuuuugauuucuguaagcaggccauccagagacugaaauccgaagcgcagaugagcauucaacucaucaauaaggccgucaacgcucugauuaaugaccagcuuaucaugaaaaaccaucugcgggauaugaugggcauuccuuauugcaauuacucuaaguauugguaccucaaccacacguccagcgggcgcaccucucugcccaaguguuggcuggugagcaauggauccuaccucaacgagacacacuucucugacgacaucgaacagcaagccgauaauaugaucaccgagaugcugcagaaagaauauauugacagacagggcaagacaccucuugggcugguggaucucuuugucuucagcaccuccuuuuaccugaucagcauuuuccugcaccuuaucaaaauuccgacgcaucggcacaucguuggaaagcccugcccuaaaccccaucgccucaaccacaugggcauuuguucuugcggccuguauaagcagccuggggugcccacaagauggaaacggugaggacuagucccuguucccagagcccacuuuuuuuucuuuuuuugaaauaaaauagccugucuuucagaucuaaaaaaaaaaaaaaaaaaaaaaaaaaaaaaaaaaaaaaaaaaaaaaaaaaaaaaaaaaaaaaaaaaaaaaaaaaaaaaaaaaaaaaaaaaaaaaaaaaaa

SEQ ID NO: 37035 - RNA, 1721 nt, Artificial Sequence
  mRNA product Design a-1 (A100) comprising derived and/or modified sequence from LASV(KAK-428;Clade n.d. (VII))__ANH09740__GPCmut10 (opt5)
aggagagucccgcagucggcguccagcggcucugcuuguucgugugugugucguugcaggccuuauucaagcuuaccaugggccagaucgugaccuucuuucaagaggucccccacguuauugaagaggugaugaacaucgugcugauugcccucagccugcuugcuauccugaaggggcucuacaauuucgccacaugcggagucauuggccugaucacguuucuucugcucugugggagauccugcucugcgaccuauaaaggacaguacgaacugcagacacuggagcucaacauggaaagccugaauauguguaugccucuuuccugcaccaagaacaauucucaucacuauauccgggcuggcaacaauacagggcuggagcucacccugacaaacaccagcauuaucucccauaaauucuguaaucuuucugacgcccacaagaaaaaccuguacgaucauacgcucaugagcauuaucaccacauuucaccuguccauuccgaauuucaaccaguaugaggccaugagcugcgacuuuaauggaggcaagaucucuauucaauacaaccugucccacagcuaugcuggcgaugccgcucagcauugugggaccguggccaauggaguucuccagacauucaugcgcauggcguggggcgggucuuaccuggcccuugacuccggaagacggggcugggauugcaucaucagcucuuaccaguaucugauuauccaaaacaccacgugggacgaucacugucaguuuucccgccccagcccuauuggguaccucggauucgugucccagaagacaagagacaucuauauuucucggcgccugcuuggcaccuuuacauggacccugagcgauuccgaaggccaugacaugcccgggggauacugccucaccagauggaugcugaucgaggcugaucugaaauguuucggcaacacagccgucgcuaagugcaaugaaaaacacgacgaggaguuuugcgauauguggcgccucuucgacuucuguaagcaggccauccaacggcugaaagcggaagcccagaugaacauucagcuuaucaauaaggcugugaacgcccugauuaaugaccaacucaugaugaagaaccaccugagagauaucauggggauuccuuauugcaauuacagcaaauuuugguaucuuaacaauacgaccacaggacggaccucucugccccgcuguuggcucaucuccaacggcagcuaccugaaugagacacauuucucugacgauaucgaacagcaggcugacaacaugauuaccgagaugcugcagaaggaauacauggauagacaagggaaaacgccucucggacugguugaccuuuuuguguucagcacauccuuuuaucugaucaccauuuuccuccaccuggucaagaucccgacccaucggcacauugugggcaaacccugcccuaagccccaucgccugaaucacaugggcaucuguucuugcgggcuuuacaaacagccuggagugcccgucagauggaagcggugaggacuagucccuguucccagagcccacuuuuuuuucuuuuuuugaaauaaaauagccugucuuucagaucuaaaaaaaaaaaaaaaaaaaaaaaaaaaaaaaaaaaaaaaaaaaaaaaaaaaaaaaaaaaaaaaaaaaaaaaaaaaaaaaaaaaaaaaaaaaaaaaaaaaa

SEQ ID NO: 37036 - RNA, 1721 nt, Artificial Sequence; identical to SEQ ID NO: 37030
  mRNA product Design a-1 (A100) comprising derived and/or modified sequence from LASV(Pinneo-NIG-1969;Clade I)__AIT17836__GPCmut10 (opt5)

SEQ ID NO: 37037 - RNA, 1721 nt, Artificial Sequence
  mRNA product Design a-1 (A100) comprising derived and/or modified sequence from LASV(ISTH0009-NIG-2011;Clade II)__AIT17404__GPCmut10 (opt5)
aggagagucccgcagucggcguccagcggcucugcuuguucgugugugugucguugcaggccuuauucaagcuuaccaugggccagaucauuaccuucuuucaagaggugccccacgucaucgaagagguuaugaacauugugcugaucgcccucagccugcuugcuauucugaaggggaucuacaauguggccacaugcggacucuucggccuggucuccuuucuucugcucugugggagaucuugcagcacgaccuauaaaggaguguacgaacugcagacacuggagcucgacauggcgucccugaacauguguaugccucuuucuugcaccaagaauaacagccaucacuauaucaugguuggcaaugaaacagggcuggagcucacccugacaaacaccuccauuaucaaucauaaauucuguaaccuuucugaugcucacaagaaaaaucuguacgaccaugcccucaugagcauuaucuccacguuucaccugagcauuccgaacuucaaucaguaugaggccaugucuugcgauuuuaacggaggcaagaucuccgugcaguacaaucugagccacgcuuaugccgucgacgcugccaaccauuguggcaccauugcgaauggggugcuccaaacauucaugcggauggccuggggaggcucuuacaucgcucuggauuccgggaagggaagcugggacugcaucaugaccucuuaccaguaucuuauuauccagaacacaaccugggaagaucacugucaguuuucccgccccagcccuauuggcuaccuggggcuccugucccaaagaacgcgggacaucuauauuucucgcagacuucugggaacauucaccuggacacucagcgauuccgagggcaacgaaacccccggcggguacugccugacccgguggaugcugaucgaggccgagcucaaauguuuuggaaauacagcuguugccaagugcaacgaaaaacaugacgaggaguucugcgauaugcugcgccuuuuugacuucuguaagcaggcgaucagacggcugaaaacggaagcccagaugagcauucagcucaucaauaaggcugugaacgcccugauuaaugaucaacuuaucaugaagaaccaucugcgcgacauuaugggcaucccuuauugcaauuacucuaaauauugguaccucaaccacaccgucacagggaagaccucccugcccagauguuggcuggugagcaauggaucuuaccucaacgaaacacacuucagcgacgauaucgagcagcaggcugacaauaugauuaccgagcugcuucaaaaagaauauauggaucggcagggcaagacgccucuggggcucguggaccuguuugucuucuccacaucuuuuuaccugaucagcauuuuccuucaccucaucaaaauuccgacccaucgccacaucaccggaaagcccugcccuaaaccccauagacugaaccacaugggcauuuguuccugcggccuguauaagcacccugggguucccgugaaguggaaacggugaggacuagucccuguucccagagcccacuuuuuuuucuuuuuuugaaauaaaauagccugucuuucagaucuaaaaaaaaaaaaaaaaaaaaaaaaaaaaaaaaaaaaaaaaaaaaaaaaaaaaaaaaaaaaaaaaaaaaaaaaaaaaaaaaaaaaaaaaaaaaaaaaaaaa

SEQ ID NO: 37038 - RNA, 1721 nt, Artificial Sequence
  mRNA product Design a-1 (A100) comprising derived and/or modified sequence from LASV(ISTH2010-NIG-2012;Clade II)__AIT17482__GPCmut10 (opt5)
aggagagucccgcagucggcguccagcggcucugcuuguucgugugugugucguugcaggccuuauucaagcuuaccaugggccagaucauuaccuucuuucaagaggugccccacgucaucgaagagguuaugaacauugugcugaucgcccucagccugcuugcuauucugaaggggaucuacaauguggccacaugcggacucuucggccuggucuccuuucuucugcucugugggagaucuugcagcacgaccuauaaaggaguguacgaacugcagacacuggagcucgacauggcgucccugaacauguguaugccucuuucuugcaccaagaauaacagccaucacuauaucaugguuggcaaugaaacagggcuggagcucacccugacaaacaccuccauuaucaaucauaaauucuguaaccuuucugaugcucacaagaaaaaucuguacgaccaugcccucaugagcauuaucuccacguuucaccugagcauuccgaacuucaaucaguaugaggccaugucuugcgauuuuaacggaggcaagaucuccgugcaguacaaucugagccacgcuuaugccgucgacgcugccaaccauuguggcaccauugcgaauggggugcuccaaacauucaugcggauggccuggggaggcucuuacaucgcucuggauuccgggaagggaagcugggacugcaucaugaccucuuaccaguaucuuauuauccagaacauuacaugggaagaucacugucaguuuucccgccccagcccuaucggcuaccuggggcuccugucccaaagaacccgggacauuuauaucucucgcagacuucugggaacguucacauggacccucagcgauuccgagggcaacgaaacacccggcggguacugccugacccgguggaugcugaucgaggccgagcucaaauguuuuggaaauaccgcuguugccaagugcaacgaaaaacaugacgaggaguucugcgauaugcugcgccuuuuugacuucuguaagcaggcgauuagacggcugaaaacagaagcccagaugagcauccagcucauuaauaaggcugugaacgcccugaucaaugaucaacuuauuaugaagaaccaucugcgcgacaucaugggcaucccuuauugcaauuacucuaaauauugguaccucaaccacacggucaccgggaagacaucccugcccagauguuggcuggugagcaauggaucuuaccucaacgaaacccacuucagcgacgauauugagcagcaggcugacaauaugaucacagagcugcuucaaaaagaauauauugaucggcagggcaagaccccucuggggcucguggaccuguuugucuucuccacgucuuuuuaccugaucagcauuuuccuucaccucguuaaaaucccgacacaucgccacguggugggaaagcccugcccuaaaccccauagacugaaccacaugggcauuuguuccugcggccuguauaagcacccugggguccccgugaaguggaaacggugaggacuagucccuguucccagagcccacuuuuuuuucuuuuuuugaaauaaaauagccugucuuucagaucuaaaaaaaaaaaaaaaaaaaaaaaaaaaaaaaaaaaaaaaaaaaaaaaaaaaaaaaaaaaaaaaaaaaaaaaaaaaaaaaaaaaaaaaaaaaaaaaaaaaa

SEQ ID NO: 37039 - RNA, 1721 nt, Artificial Sequence
  mRNA product Design a-1 (A100) comprising derived and/or modified sequence from LASV(Lassa virus/H.sapiens-wt/NGA/2015/ISTH_0543;Clade II)__AVO03639__GPCmut10 (opt5)
aggagagucccgcagucggcguccagcggcucugcuuguucgugugugugucguugcaggccuuauucaagcuuaccaugggccagaucauuaccuucuuucaagaggugccccacgucaucgaagagguuaugaacauugugcugaucgcccucagccugcuugcuauucugaaggggaucuacaauguggccacaugcggacucuucggccuggucuccuuucuucugcucugugggagaucuugcagcacgaccuauaaaggaguguacgaacugcagacacuggagcucgacauggcgaaccugaauauguguaugccucuuuccugcaccaagaacaauucucaucacuauaucaugguuggcaacgaaacagggcuggagcucacccugacaaauaccagcauuaucaaccauaaauucuguaaucuuuccgaugcucacaagaaaaaccuguacgaccaugcccucaugucuauuaucagcacguuucaccuguccauuccgaauuucaaccaguaugaggccaugagcugcgauuuuaauggaggcaagaucucugugcaguacaaccugucccacaccuaugcugucgacgccgcuaaucauuguggcacaauugccaacggggugcuccaaaccuucaugcggauggcguggggaggcagcuacaucgcccuggauucugggaagggauccugggacugcaucaugacaagcuaccaguaucuuguuauucagaacaccacgugggaagaucacugucaguuuucucgccccuccccuaucggcuaccuggggcuccugagccaaagaacacgggacauuuauaucucccgcagacuucugggaaccuucacauggacccucucugauagcgagggcaaugaaacccccggcggguacugccugacacgguggaugcugauugaggcugagcucaaauguuuuggaaacacggccguggcuaagugcaaugaaaaacaugacgaggaguucugcgauaugcugcgccuuuuugacuucuguaagcaggccaucagacggcugaaaaccgaagcgcagauguccauccagcucauuaacaaggccgucaaugcucugaucaacgaucaacuuauuaugaagaaucaucugcgcgacaucaugggcauuccuuauugcaacuacagcaaauauugguaccucaaucacacagugaccgggaagacaucucugcccagauguuggcugguguccaacggaagcuaccucaaugaaacccacuucucugacgauaucgagcagcaggccgacaacaugaucacggagcugcuucaaaaagaauauauugaucggcagggcaagacaccucuggggcucgucgaccuguuuguuuucagcaccuccuuuuaccugaucucuauuuuccuucaccucgugaaaaucccgacccaucgccacauuacaggaaagcccugcccuaaaccccauagacugaaucacaugggcaucuguagcugcggccuguauaagcacccuggggugcccgucaaguggaaacggugaggacuagucccuguucccagagcccacuuuuuuuucuuuuuuugaaauaaaauagccugucuuucagaucuaaaaaaaaaaaaaaaaaaaaaaaaaaaaaaaaaaaaaaaaaaaaaaaaaaaaaaaaaaaaaaaaaaaaaaaaaaaaaaaaaaaaaaaaaaaaaaaaaaaa

SEQ ID NO: 37040 - RNA, 1721 nt, Artificial Sequence
  mRNA product Design a-1 (A100) comprising derived and/or modified sequence from LASV(Lassa virus/H.sapiens-wt/NGA/2016/ISTH_0009;Clade II)__AVO03571__GPCmut10 (opt5)
aggagagucccgcagucggcguccagcggcucugcuuguucgugugugugucguugcaggccuuauucaagcuuaccaugggccagaucauuaccuucuuucaagaggugccccacgucaucgaagagguuaugaacauugugcugaucgcccucagccugcuugcuauucugaaggggaucuacaauguggccacaugcggacuccugggccuugucuccuuccugcuccugugugggagaucuugcagcacgaccuauaaaggaguguacgaacugcagacacucgagcuggacauggcgucccuuaacauguguaugccucugucuugcaccaagaauaacagccaucacuauaucaugguuggcaaugaaacagggcucgagcugacccuuacaaacaccuccauuaucaaucauaaauuuuguaaccugucugaugcucacaagaaaaaucucuacgaccaugcccugaugagcauuaucuccacguuccaccugagcauuccgaacuuuaaucaguaugaggccaugucuugcgauuucaacggaggccggaucuccgugcaguacaaucucagccacucuuaugcugucgacgccgcuaaccauuguggcaccauugccaauggggugcugcaaacauuuaugcgcauggcguggggaggcuccuacaucgcccuugauagcgggaagggaucuugggacugcaucaugaccuccuaccaguaucugauuauccagaacacaaccugggaagaucacugucaguucagcagacccuccccuauuggcuaccucgggcugcuuucucaacggacgcgcgacaucuauauuagcagacggcugcucggaacauuuaccuggacacuguccgauagcgagggcaacgaaacccccggcggguacugccugacccgcuggaugcucaucgaggcugagcugaaguguuucggaaauacagccguugcuaaaugcaacgaaaagcaugacgaggaauuuugcgauaugcuuagacuguucgacuuuuguaaacaggccauccggcgccucaagacggaggcgcagaugucuauucagcugaucaauaaagccgugaacgcucuuauuaaugaucaacugaucaugaagaaccaccucagagacauuaugggcaucccuuauugcaauuacuccaaguauugguaccugaaccacaccgucacagggaaaaccagccugccccgguguuggcucgugucuaauggaagcuaccugaacgaaacacauuucuccgacgauaucgagcagcaggccgacaauaugauuaccgagcuucugcaaaaggaauauaucgaucgccagggcaaaacgccucucgggcugguggaccuguucgucuuuucuaccagcuucuaccuuauuuccaucuuucuccaccugguuaagauuccgacacauagacacaucaccggaaaacccugcccuaagccccaucggcugaaccacaugggcauuuguagcugcggccucuauaaucacccuggggugcccgugaaauggaagcgcugaggacuagucccuguucccagagcccacuuuuuuuucuuuuuuugaaauaaaauagccugucuuucagaucuaaaaaaaaaaaaaaaaaaaaaaaaaaaaaaaaaaaaaaaaaaaaaaaaaaaaaaaaaaaaaaaaaaaaaaaaaaaaaaaaaaaaaaaaaaaaaaaaaaaa

SEQ ID NO: 37041 - RNA, 1721 nt, Artificial Sequence
  mRNA product Design a-1 (A100) comprising derived and/or modified sequence from LASV(Lassa virus/H.sapiens-wt/NGA/2016/ISTH_0017;Clade II)__AVO03567__GPCmut10 (opt5)
aggagagucccgcagucggcguccagcggcucugcuuguucgugugugugucguugcaggccuuauucaagcuuaccaugggccagaucauuaccuucuuucaagaggugccccacgucaucgaagagguuaugaacauugugcugaucgcccucagccugcuugcuauucugaaggggaucuacaauguggccacaugcggacucuucggccuggucuccuuucuucugcucugugggagaucuugcagcacgaccuauaaaggaguguacgaacugcagacacuggagcucgacauggcgucccugaacauguguaugccucuuucuugcaccaagaauaacagccaucacuauaucaugguuggcaaugaaacagggcuggagcucacccugacaaacaccuccauuaucaaucauaaauucuguaaccuuucugaugcucacaagaaaaaucuguacgaccaugcccucaugagcauuaucuccacguuucaccugagcauuccgaacuucaaucaguaugaggccaugucuugcgauuuuaacggaggcaagaucuccgugcaguacaaucugagccacaccuaugcuauugacgccgcuaaccauuguggcacaaucgccaaugggguccuccaaaccuucaugcggauggcguggggaggcucuuacaucgcccuggauuccgggaagggaagcugggacugcauuaugacaucuuaccaguaucuuaucauucagaacaccacgugggaagaucacugucaguuuucccgccccagcccuaucggcuaccuggggcuccugucccaaagaacacgggacauuuauaucucucgcagacuucugggaaccuucacauggacccucagcgauuccgagggcaacgaaacccccggcggguacugccugacacgguggaugcugaucgaggcugagcucaaauguuuuggaaauacggccguggcuaagugcaacgaaaaacaugacgaggaguucugcgauaugcugcgccuuuuugacuucuguaagcaggccauuagacggcugaaaaccgaagcgcagaugagcauccagcucauuaauaaggccguuaacgcucugaucaaugaucaacuuauuaugaagaaccaucugcgcgacaucaugggcaucccuuauugcaauuacucuaaauauugguaccucaaccacacagugaccgggaagacaucccugcccagauguuggcuggucagcaauggaucuuaccucaacgaaacccacuucagcgacgauauugagcagcaggccgacaauaugaucacggagcugcuucaaaaagaauauauggaucggcagggcaagacaccucuggggcucguggaccuguuuguguucuccaccucuuuuuaccugauuagcaucuuccuucaccucguccgcauuccgacccauagacacguuaucggaaaacccugcccuaagccccaucggcugaaccacaugggcauuuguuccugcggccuguauaaacacccuggggugcccgugaaguggaagcgcugaggacuagucccuguucccagagcccacuuuuuuuucuuuuuuugaaauaaaauagccugucuuucagaucuaaaaaaaaaaaaaaaaaaaaaaaaaaaaaaaaaaaaaaaaaaaaaaaaaaaaaaaaaaaaaaaaaaaaaaaaaaaaaaaaaaaaaaaaaaaaaaaaaaaa

SEQ ID NO: 37042 - RNA, 1721 nt, Artificial Sequence
  mRNA product Design a-1 (A100) comprising derived and/or modified sequence from LASV(Lassa virus/H.sapiens-wt/NGA/2018/ISTH_0959;Clade II)__AVV65099__GPCmut10 (opt5)
aggagagucccgcagucggcguccagcggcucugcuuguucgugugugugucguugcaggccuuauucaagcuuaccaugggccagaucauuaccuucuuucaagaggugccccacgucaucgaagagguuaugaacauugugcugaucgcccucagccugcuugcuauucugaaggggaucuacaauguggucacaugcggacucuucggccugguguccuuucuucugcucugugggagaucuugcagcacgaccuauaaaggaguuuacgaacugcagacacuggagcucgacauggccucccugaacauguguaugccucuuucuugcaccaagaauaacagccaucacuauaucauggugggcaaugaaacagggcuggagcucacccugacaaacaccuccauuaucaaucauaaauucuguaaccuuucugaugcgcacaagaaaaaucuguacgaccaugcucucaugagcauuaucuccacguuucaccugagcauuccgaacuucaaucaguaugaggccaugucuugcgauuuuaacggaggcaagaucuccguccaguacaaucugagccacgccuaugcuauugacgccgcuaaccauuguggcaccaucgccaauggggugcuccaaacauucaugcggauggcguggggaggcucuuacaucgcccuggauuccgggaagggaagcugggacugcauuaugaccucuuaccaguaucuuaucauucagaacacaaccugggaagaucacugucaguuuucccgccccagcccuaucggcuaccuggggcuccugucccaaagaacgcgggacauuuauaucucucgcagacuucugggaacauucaccuggacacucagcgauuccgagggcaacgaaacccccggcggguacugccugacccgguggaugcugaucgaggcugagcucaaauguuuuggaaauacagccguugcuaagugcaacgaaaaacaugacgaggaguucugcgauaugcugcgccuuuuugacuucuguaagcaggccauuagacggcugaaaacggaagcgcagaugagcauccagcucauuaauaaggccgugaacgcucugaucaaugaucaacuuauuaugaagaaccaucugcgcgacaucaugggcaucccuuauugcaauuacucuaaauauugguaccucaaccacaccgucacagggaagaccucccugcccagauguuggcuggugagcaauggaucuuaccucaacgaaacacacuucagcgacgauauugagcagcaggccgacaauaugaucaccgagcugcuucaaaaagaauauauugaucggcagggcaagacgccucuggggcucguggaccuguuugucuucuccacaucuuuuuaccugaucagcauuuuccuucaccucguuaaaaucccgacccaucgccacgugauuggaaagcccugcccuaaaccccauagacugaaccacaugggcaucuguuccugcggccuguauaagcacccuggggugcccgucaaguggaaacggugaggacuagucccuguucccagagcccacuuuuuuuucuuuuuuugaaauaaaauagccugucuuucagaucuaaaaaaaaaaaaaaaaaaaaaaaaaaaaaaaaaaaaaaaaaaaaaaaaaaaaaaaaaaaaaaaaaaaaaaaaaaaaaaaaaaaaaaaaaaaaaaaaaaaa

SEQ ID NO: 37043 - RNA, 1721 nt, Artificial Sequence
  mRNA product Design a-1 (A100) comprising derived and/or modified sequence from LASV(LASV003-NIG-2008;Clade II)__AIT17580__GPCmut10 (opt5)
aggagagucccgcagucggcguccagcggcucugcuuguucgugugugugucguugcaggccuuauucaagcuuaccaugggccagaucauuaccuucuuucaagaggugccccacgucaucgaagagguuaugaacauugugcugaucgcccucagccugcuugcuauucugaaggggaucuacaauguggccacaugcggacucuucggccuggucuccuuucuucugcucugugggagaucuugcagcacgaccuauaaaggaguguacgaacugcagacacuggagcucgacauggcgucccugaacauguguaugccucuuucuugcaccaagaauaacagccaucacuauaucaugguuggcaaugaaacagggcuggagcucacccugacaaacaccuccauuaucaaucauaaauucuguaaccuuucugaugcucacaagaaaaaucuguacgaccaugcccucaugagcauuaucuccacguuucaccugagcauuccgaacuucaaucaguaugaggccaugucuugcgauuuuaacggaggcaagaucuccgugcaguacaaucugagccacaccuaugcugucgacgccgcuaaccauuguggcacaauugccaauggggugcuccaaaccuucaugcggauggcguggggaggcucuuacaucgcccuggauuccgggaagggaagcugggacugcaucaugacaucuuaccaguaucuuauuauccagaacaccacgugggaagaucacugucaguuuucccgccccagcccuauuggcuaccuggggcuccugucccaaagaacacgggacaucuauauuucucgcagacuucugggaaccuucacauggacccucagcgauuccgagagcaacgaaacccccggcggcuacugccugacacgguggaugcugaucgaggcugagcucaaauguuuugggaauacggccguugcuaagugcaacgaaaaacaugacgaggaguucugcgauaugcugcgccuuuuugacuucuguaagcaggccaucagacggcugaaagcggaagcccagaugucuauucagcucaucaauaaggcugugaacgcccugauuaaugaucaacuuaucaugaagaaccaucugcgcgacauuaugggaaucccuuauugcaauuacuccaaauauugguaccucaaccacaccgucacaggcagaaccagccugccccgguguuggcuggugucuaaugggagcuaccucaacgaaacacacuucuccgacgauaucgagcagcaggcugacaauaugauuaccgagcugcuucaaaaggaauauauggaucgccagggaaaaacgccucugggccucguggaccuguuugucuucucuaccagcuuuuaccugaucuccauuuuccuucaccucguuaagaucccgacacauagacacgugauugggaaacccugcccuaagccccaucggcugaaccacaugggaaucuguagcugcggccuguauaaacacccuggcgugcccgucaaguggaagcgcugaggacuagucccuguucccagagcccacuuuuuuuucuuuuuuugaaauaaaauagccugucuuucagaucuaaaaaaaaaaaaaaaaaaaaaaaaaaaaaaaaaaaaaaaaaaaaaaaaaaaaaaaaaaaaaaaaaaaaaaaaaaaaaaaaaaaaaaaaaaaaaaaaaaaa

SEQ ID NO: 37044 - RNA, 1721 nt, Artificial Sequence
  mRNA product Design a-1 (A100) comprising derived and/or modified sequence from LASV(LASV035-NIG-2009;Clade II)__AIT17588__GPCmut10 (opt5)
aggagagucccgcagucggcguccagcggcucugcuuguucgugugugugucguugcaggccuuauucaagcuuaccaugggccagaucauuaccuucuuucaagaggugccccacgucaucgaagagguuaugaacauugugcugaucgcccucagccugcuugcuauucugaaggggaucuacaauguggccacaugcggacucuucggccuggucuccuuucuucugcucugugggagaucuugcagcacgaccuauaaaggaguguacgaacugcagacacuggagcucgacauggcgucccugaacauguguaugccucuuucuugcaccaagaauaacagccaucacuauaucaugguuggcaaugaaacagggcuggagcucacccugacaaacaccuccauuaucaaucauaaauucuguaaccuuucugaugcucacaagaaaaaucuguacgaccaugcccucaugagcauuaucuccacguuucaccugagcauuccgaacuucaaucaguaugaggccaugucuugcgauuuuaacggaggcaagaucuccgugcaguacaaucugagccacgcuuaugccgucgacgcugccaaccauuguggcaccauugcgaauggggugcuccaaacauucaugcggauggccuggggaggcucuuacaucgcucuggauuccgggaagggaagcugggacugcaucaugaccucuuaccaguaucuuauuauccagaacacaaccugggaagaucacugucaguuuucccgccccagcccuauuggcuaccuggggcuccugucccaaagaacgcgggacaucuauauuucucgcagacuucugggaacauucaccuggacacucagcgauuccgagggcaacgaaacccccggcggguacugccugacccgguggaugcugaucgaggccgagcucaaauguuuuggaaauacagcuguugccaagugcaacgaaaaacaugacgaggaguucugcgauaugcugcgccuuuuugacuucuguaagcaggcgaucagacggcugaaagccgaagcucagaugagcauucagcucaucaauaaggccgugaacgcucugauuaaugaucaacuuaucaugaagaaccaucugcgcgacauuaugggcaucccuuauugcaauuacucuaaauauugguaccucaaccacacggucaccgggaagacaucccugcccagauguuggcuggugagcaauggaucuuaccucaacgaaacccacuucagcgacgauaucgagcagcaggccgacaauaugauuacagagcugcuucaaaaagaauauaucgaucggcagggcaagaccccucuggggcucguggaccuguuugucuucuccacgucuuuuuaccugauuagcaucuuccuucaccucguuaaaauuccgacacaucgccacgugaucggaaagcccugcccuaaaccccauagacugaaccacaugggcauuuguuccugcggccuguauaagcacccuggggugcccgucaaguggaaacggugaggacuagucccuguucccagagcccacuuuuuuuucuuuuuuugaaauaaaauagccugucuuucagaucuaaaaaaaaaaaaaaaaaaaaaaaaaaaaaaaaaaaaaaaaaaaaaaaaaaaaaaaaaaaaaaaaaaaaaaaaaaaaaaaaaaaaaaaaaaaaaaaaaaaa

SEQ ID NO: 37045 - RNA, 1721 nt, Artificial Sequence
  mRNA product Design a-1 (A100) comprising derived and/or modified sequence from LASV(LASV1000-NIG-2009;Clade II)__AIT17782__GPCmut10 (opt5)
aggagagucccgcagucggcguccagcggcucugcuuguucgugugugugucguugcaggccuuauucaagcuuaccaugggccagaucauuaccuucuuucaagaggugccccacgucaucgaagagguuaugaacauugugcugaucgcccucagccugcuugcuauucugaaggggaucuacaauguggccacaugcggacucuucggccuggucuccuuucuucugcucugugggagaucuugcagcacgaccuauaaaggaguguacgaacugcagacacuggagcucgacauggcgucccugaacauguguaugccucuuucuugcaccaagaauaacagccaucacuauaucaugguuggcaaugaaacagggcuggagcucacccugacaaacaccuccauuaucaaucauaaauucuguaaccuuucugaugcucacaagaaaaaucuguacgaccaugcccucaugagcauuaucuccacguuucaccugagcauuccgaacuucaaucaguaugaggccaugucuugcgauuuuaacggaggcaagaucuccgugcaguacaaucugagccacaccuaugcugucgacgccgcuaaccauuguggcacaauugccaauggggugcuccaaaccuucaugcggauggcguggggaggcucuuacaucgcccuggauuccgggaagggaagcugggacugcaucaugacaucuuaccaguaucuuauuauccagaacaccacgugggaagaucacugucaguuuucccgccccagcccuauuggcuaccuggggcuccugucccaaagaacacgggacaucuauauuucucgcagacuucugggaaccuucacauggacccucagcgauuccgagggcaacgaaacccccggcggguacugccugacacgguggaugcugaucgaggcugagcucaaauguuuuggaaauacggccguugcuaagugcaacgaaaaacaugacgaggaguucugcgauaugcugcgccuuuuugacuucuguaagcaggccaucaaaagacugaagaccgaagcgcagaugagcauucagcucaucaauaaggccgugaacgcucugauuaaugaucaacuuaucaugaaaaaccaucugcgggacauuaugggcaucccuuauugcaauuacucuaaguauugguaccucaaccacacagucaccgggaaaacaucccugccccgcuguuggcuggugagcaauggaucuuaccucaacgaaacccacuucagcgacgauaucgagcagcaggccgacaauaugauuacggagcugcuucaaaaggaauauaucgauagacagggcaaaacaccucuggggcucguggaccuguuugucuucuccaccucuuuuuaccugauuagcaucuuccuucaccucguuaagauuccgacccaucggcacguggugggaaaacccugcccuaagccccaucgccugaaccacaugggcaucuguuccugcggccuguauaagcacccugggguccccgugaaauggaagagaugaggacuagucccuguucccagagcccacuuuuuuuucuuuuuuugaaauaaaauagccugucuuucagaucuaaaaaaaaaaaaaaaaaaaaaaaaaaaaaaaaaaaaaaaaaaaaaaaaaaaaaaaaaaaaaaaaaaaaaaaaaaaaaaaaaaaaaaaaaaaaaaaaaaaa

SEQ ID NO: 37046 - RNA, 1721 nt, Artificial Sequence
  mRNA product Design a-1 (A100) comprising derived and/or modified sequence from LASV(LASV221-NIG-2010;Clade II)__AIT17624__GPCmut10 (opt5)
aggagagucccgcagucggcguccagcggcucugcuuguucgugugugugucguugcaggccuuauucaagcuuaccaugggccagaucauuaccuucuuucaagaggugccccacgucaucgaagagguuaugaacauugugcugaucgcccucagccugcuugcuauucugaaggggaucuacaauguggccacaugcggacucuucggccuggucuccuuucuucugcucugugggagaucuugcagcacgaccuauaaaggaguguacgaacugcagacacuggagcucgacauggcgucccugaacauguguaugccucuuucuugcaccaagaauaacagccaucacuauaucaugguuggcaaugaaacagggcuggagcucacccugacaaacaccuccauuaucaaucauaaauucuguaaccuuucugaugcucacaagaaaaaucuguacgaccaugcccucaugagcauuaucuccacguuucaccugagcauuccgaacuucaaucaguaugaggccaugucuugcgauuuuaacggaggcaagaucuccgugcaguacaaucugagccacaccuaugcuauugacgccgcuaaccauuguggcacaaucgccaaugggguccuccaaaccuucaugcggauggcguggggaggcucuuacaucgcccuggauuccgggaagggaagcugggacugcauuaugacaucuuaccaguaucuuaucauucagaacaccacgugggaagaucacugucaguuuucccgccccagcccuaucggcuaccuggggcuccugucccaaagaacacgggacauuuauaucucucgcagacuucugggaaccuucacauggacccucagcgauuccgagggcaacgaaacccccggcggguacugccugacacgguggaugcugaucgaggcugagcucaaauguuuuggaaauacggccguggcuaagugcaacgaaaaacaugacgaggaguucugcgauaugcugcgccuuuuugacuucuguaagcaggccauuagacggcugaaaaccgaagcgcagaugagcauccagcucauuaauaaggccguuaacgcucugaucaaugaucaacuuauuaugaagaaccaucugcgcgacaucaugggcaucccuuauugcaauuacucuaaauauugguaccucaaccacacagugaccgggaagacaucccugcccagauguuggcuggucagcaauggaucuuaccucaacgaaacccacuucagcgacgauauugagcagcaggccgacaauaugaucacggagaugcugcaaaaagaauauauggaucggcagggcaagacaccucuugggcugguggaccucuuuguguucuccaccucuuuuuaccugauuagcaucuuccugcaccuugucaaaauuccgacccaucgccacguuaucggaaagcccugcccuaaaccccauagacucaaccacaugggcauuuguuccugcggccuguauaagcacccuggggugcccgugaaguggaaacggugaggacuagucccuguucccagagcccacuuuuuuuucuuuuuuugaaauaaaauagccugucuuucagaucuaaaaaaaaaaaaaaaaaaaaaaaaaaaaaaaaaaaaaaaaaaaaaaaaaaaaaaaaaaaaaaaaaaaaaaaaaaaaaaaaaaaaaaaaaaaaaaaaaaaa

SEQ ID NO: 37047 - RNA, 1721 nt, Artificial Sequence
  mRNA product Design a-1 (A100) comprising derived and/or modified sequence from LASV(LASV237-NIG-2010;Clade II)__AIT17638__GPCmut10 (opt5)
aggagagucccgcagucggcguccagcggcucugcuuguucgugugugugucguugcaggccuuauucaagcuuaccaugggccagaucauuaccuucuuucaagaggugccccacgucaucgaagagguuaugaacauugugcugaucgcccucagccugcuugcuauucugaaggggaucuacaauguggccacaugcggacucuucggccuggucuccuuucuucugcucugugggagaucuugcagcacgaccuauaaaggaguguacgaacugcagacacuggagcucgacauggcgucccugaacauguguaugccucuuucuugcaccaagaauaacagccaucacuauaucaugguuggcaaugaaacagggcuggagcucacccugacaaacaccuccauuaucaaucauaaauucuguaaccuuucugaugcucacaagaaagaccuguacgaucaugcccucaugagcauuaucuccacguuucaccugagcauuccgaauuucaaccaguaugaggccaugucuugcgacuuuaauggaggcaagaucuccgugcaguacaaccugagccacaccuaugcugucgaugccgcuaaucauuguggcacaauugccaacggggugcuccaaaccuucaugcggauggcguggggaggcucuuacaucgcccuggacuccgggaagggaagcugggauugcaucaugacaucuuaccaguaucuuauuauccagaauaccacgugggaagaccacugucaguuuucccgccccagcccuauuggcuaccuggggcuccugucccaaagaacacgggauaucuauauuucucgcagacuucugggaaccuucacauggacccucagcgacuccgagggcaacgaaacccccggcggguacugccugacacgguggaugcugaucgaggcugagcucaaauguuuuggaaacacggccguugcuaagugcaaugaaaaacaugaugaggaguucugcgacaugcugcgccuuuuugauuucuguaagcaggccaucagacggcugaaaaccgaagcgcagaugagcauucagcucaucaacaaggccgugaaugcucugauuaacgaccaacuuaucaugaagaaucaucugcgcgacauuaugggcaucccuuauugcaacuacucuaaauauugguaccucaaucacacagucaccgggaagacaucccugcccagauguuggcuggugagcaacggaucuuaccucaaugaaacccacuucagcgaugacaucgagcagcaggccgauaacaugauuacggagcugcuucaaaaagaauauauggaccggcagggcaagacaccucuggggcucguggaucuguuugucuucuccaccucuuuuuaccugaucagcauuuuccuucaccucaucaaaauuccgacccaucgccacaucacaggaaagcccugcccuaaaccccauagacugaaucacaugggcauuuguuccugcggccuguauaagcacccugggguucccgugaaguggaaacggugaggacuagucccuguucccagagcccacuuuuuuuucuuuuuuugaaauaaaauagccugucuuucagaucuaaaaaaaaaaaaaaaaaaaaaaaaaaaaaaaaaaaaaaaaaaaaaaaaaaaaaaaaaaaaaaaaaaaaaaaaaaaaaaaaaaaaaaaaaaaaaaaaaaaa

SEQ ID NO: 37048 - RNA, 1721 nt, Artificial Sequence
  mRNA product Design a-1 (A100) comprising derived and/or modified sequence from LASV(LASV253-NIG-2011;Clade II)__AIT17670__GPCmut10 (opt5)
aggagagucccgcagucggcguccagcggcucugcuuguucgugugugugucguugcaggccuuauucaagcuuaccaugggccagaucauuaccuucuuucaagaggugccccacgucaucgaagagguuaugaacauugugcugaucgcccucagccugcuugcuauucugaaggggaucuacaauguggccacaugcggacucuucggccuggucuccuuucuucugcucugugggagaucuugcagcacgaccuauaaaggaguguacgaacugcagacacuggagcucgacauggcgucccugaacauguguaugccucuuucuugcaccaagaauaacagccaucacuauaucaugguuggcaaugaaacagggcuggagcucacccugacaaacaccuccauuaucaaucauaaauucuguaaccuuucugaugcucacaagaaaaaucuguacgaccaugcccucaugagcauuaucuccacguuucaccugagcauuccgaacuucaaucaguaugaggccaugucuugcgauuuuaacggaggcaagaucuccgugcaguacaaucugagccacaccuaugcugucgacgccgcuaaccauuguggcacaauugccaauggggugcuccaaaccuucaugcggauggcguggggaggcucuuacaucgcccuggauuccgggaagggaagcugggacugcaucaugacaucuuaccaguaucuuauuauccagaacaccacgugggaagaucacugucaguuuucccgccccagcccuauuggcuaccuggggcuccugucccaaagaacacgggacaucuauauuucucgcagacuucugggaaccuucacauggacccucagcgauuccgagggcaacgaaacccccggcggguacugccugacacgguggaugcugaucgaggcugagcucaaauguuuuggaaauacggccguugcuaagugcaacgaaaaacaugacgaggaguucugcgauaugcugcgccuuuuugacuucuguaagcaggccaucagacggcugaaagcggaagcccagaugagcauucagcucaucaauaaggcugugaacgcccugauuaaugaucaacuuaucaugaagaaccaucugcgcgacauuaugggcaucccuuauugcaauuacucuaaauauugguaccucaaccacaccgucacagggagaaccucccugccccgguguuggcuggugagcaauggaucuuaccucaacgaaacacacuucagcgacgauaucgagcagcaggcugacaauaugauuaccgagcugcuucaaaaggaauauaucgaucgccagggcaaaacgccucuggggcucguggaccuguuugucuucuccacaucuuuuuaccugauuagcaucuuccuucaccucguuaagauuccgacccauagacacaucauuggaaaacccugcccuaagccccaucggcugaaccacaugggcaucuguuccugcggccuguauaaacacccuggggugcccgugaaguggaagcgcugaggacuagucccuguucccagagcccacuuuuuuuucuuuuuuugaaauaaaauagccugucuuucagaucuaaaaaaaaaaaaaaaaaaaaaaaaaaaaaaaaaaaaaaaaaaaaaaaaaaaaaaaaaaaaaaaaaaaaaaaaaaaaaaaaaaaaaaaaaaaaaaaaaaaa

SEQ ID NO: 37049 - RNA, 1721 nt, Artificial Sequence
  mRNA product Design a-1 (A100) comprising derived and/or modified sequence from LASV(LASV254-NIG-2011;Clade II)__AIT17674__GPCmut10 (opt5)
aggagagucccgcagucggcguccagcggcucugcuuguucgugugugugucguugcaggccuuauucaagcuuaccaugggccagaucauuaccuucuuucaagaggugccccacgucaucgaagagguuaugaacauugugcugaucgcccucagccugcuugcuauucugaaggggaucuacaauguggccacaugcggacucuucggccuggucuccuuucuucugcucugugggagaucuugcagcacgaccuauaaaggaguguacgaacugcagacacuggagcucgacaugaccaaccugaauauguguaugccucuuuccugcacaaagaacaauucucaucacuauaucaugguuggcaacgaaaccgggcuggagcucacacugaccaauacgagcauuaucaaccauaaauucuguaaucuuuccgaugcgcacaagaaaaaccuguacaaucaugcucucaugucuauuaucagcaccuuucaccuguccauuccgaacuucaaucaguaugaggccaugagcugcgacuuuaacggaggcaagaucucugugcaguacaaucugucccacagcuaugccgucgaugcugccaaccauuguggcacaauugcuaacggggugcuccaaaccuucaugcggauggccuggggaggcucuuacaucgcgcuggacuccgggaagggaaauugggauugcaucaugacaagcuaccaguaucuuauuauccagaacaccacgugggaagaccacugucaguuuucucgccccuccccuauuggcuaccuggggcuccugagccaaagaacacgggauaucuauauuucccgcagacuucugggaaccuucacauggacccucucugacagcgagggcaaugaaacccccggcggguacugccugacacgguggaugcugaucgaggccgagcucaaauguuuuggaaacacggcuguugccaagugcaaugaaaaacaugaugaggaguucugcgacaugcugcgccuuuuugauuucuguaagcaggcuaucagacggcugaaaaccgaagcccaggcgaacauucagcucaucaauaaggccgugaacgcucugauuaaugaccaacuuaucaugaagaaccaucugcgcgauauuaugggcaucccuuauugcaauuacuccaaauauugguaccucaaccacacagucaccgggaagacaagccugcccagauguuggcuggugucuaauggauccuaccucaacgaaacccacuucagcgacgacaucgagcagcaggccgauaauaugauuacggagcugcuucaaaaagaauauauggaccggcagggcaagacaccucuggggcucguggaucuguuugucuucucuaccagcuuuuaccugaucuccauuuuccuucaccucguuaaaaucccgacccaucgccacgugauuggaaagcccugcccuaaaccccauagacugaaccacaugggcaucuguucuugcggccuguauaagcacccuggggugcccgucaaguggaaacggugaggacuagucccuguucccagagcccacuuuuuuuucuuuuuuugaaauaaaauagccugucuuucagaucuaaaaaaaaaaaaaaaaaaaaaaaaaaaaaaaaaaaaaaaaaaaaaaaaaaaaaaaaaaaaaaaaaaaaaaaaaaaaaaaaaaaaaaaaaaaaaaaaaaaa

SEQ ID NO: 37050 - RNA, 1721 nt, Artificial Sequence
  mRNA product Design a-1 (A100) comprising derived and/or modified sequence from LASV(Nig08-A19;Clade III)__ADU56618__GPCmut10 (opt5)
aggagagucccgcagucggcguccagcggcucugcuuguucgugugugugucguugcaggccuuauucaagcuuaccaugggccagaucgugaccuucuuucaagaggucccccacguuauugaagaggugaugaacaucgugcugauugcccucagcauccuggcuauucuuaaggggcuguacaauaucgccacaugcggacucaucggccuggucacguuccuucugcucuccgggagaucuuguagcaugaccuauaaaggaguguacgaacugcagacacuggagcucaacaugaauacccugaacaugugcaugccucuuuccuguacaaagaauaacucucaucacuauauuaugguuggcaaugaaaccgggcuggagcucacacugaccaacacgagccuucugcaucacaaauuuugcaaucucuccgacgcgcauaagaaaaaccuguacgaucacacccugaugucuaucauuagcacauuccaccucuccaucccgaauuuuaaccaguaugaggcuaugagcugugacuucaauggaggcaagauuaccgugcaguacaaccugucucauuccuaugccaucgaugccgcuaaucacugcggcacagucgccaacggggugcuucaaaccuuuaugcggauggcuuggggaggcagcuacauugcccuggacucugggcgcggaaagugggauuguaucaugacguccuaccaguaucucaucauucagaacacaaccugggaagaccauugccaguucagcagacccucuccuaucggcuaccuggggcuucugucccaacggacacgcgauauuuauaucagcagacggcuccugggaaccuuuaccuggacacuguccgacucugagggcaaugaaacgcccggcggguacugucucacccgcuggaugcugauugaggcggagcuuaaaugcuucggaaacacagccguugcuaaguguaaugaaaaacacgaugaggaauuuugcgacaugcugagacucuucgauuuuugcaagcaggccauccggcgccugaaagcugaggcccagaugagcauccagcuuauuaacaaggcggugaaugcccugaucaacgaccaacucauuaugaagaaucaccugagagauaucaugggcauuccuuauuguaacuacuccaaauauugguaccugaaucauaccagcacagggcggaccucucucccccgcugcuggcuggucuccaacggaagcuaccuuaaugaaacgcacuucucugacgacaucgagcagcaggcugauaacaugaucacagagaugcugcaaaaggaauaucucgacagacagggcaaaaccccucuggggcugguggaucuuuucguguuuagcaccuccuucuaccucauuucuaucuuucugcaucuggucaagauuccgacacaccggcauaucguuggaaaacccuguccuaagccccaccgccucaaucacaugggcauuugcagcuguggccuguauaaacagccuggggugcccgugagauggaagcggugaggacuagucccuguucccagagcccacuuuuuuuucuuuuuuugaaauaaaauagccugucuuucagaucuaaaaaaaaaaaaaaaaaaaaaaaaaaaaaaaaaaaaaaaaaaaaaaaaaaaaaaaaaaaaaaaaaaaaaaaaaaaaaaaaaaaaaaaaaaaaaaaaaaaa

SEQ ID NO: 37051 - RNA, 1724 nt, Artificial Sequence
  mRNA product Design a-1 (A100) comprising derived and/or modified sequence from LASV(G1180-SLE-2010;Clade IV)__AIT17168__GPCmut10 (opt5)
aggagagucccgcagucggcguccagcggcucugcuuguucgugugugugucguugcaggccuuauucaagcuuaccaugggccagaucgugaccuucuuucaagaggucccccacguuauugaagaggugaugaacaucgugcugauugcccucagcauccuggcuguccuuaaggggcuguacaauuucgccacaugcggacucgugggccugcuuacguuucugcuccugugugggagauccugcaccgcgucucgguauaaaggaguuuacgaacugcagacacucgagcugaacauggaaacccuuaauauguguaugccucugagcugcacaaagaacaauucccaucacuauauuauggugggcaacgagaccgggcucgagcugacacuuaccaauacgucuaucaucaaccauaaauucuguaaucugagcgacgcucacaagaaaaaccucuacgaucaugcccugauguccauuaucucuaccuuucaccugagcauuccgaauuucaaccaguaugaagccauguccugcgacuuuaauggaggcaagaucagcguccaguacaaccucucucacuccuaugcuggcgaugccgcuaaucauugugggacaguggccaacggaguucugcaaaccuucaugcgcauggcguggggcgggagcuacauugcccuugacucuggacacggcuccugggauugcaucaugacaagcuaccaguaucugauuauccagaacaccacgugggaggaccauugucaguuuucuagacccuccccuaucggguaccucggacugcuuagccaacggacacgcgauauuuauaucuccagacggcugcucggcaccuucacauggacccugucugacagcgaaggcaaggauacccccgggggauacugccugacacgcuggaugcucauugaggcugagcugaaauguuuuggcaauacggccguggcuaagugcaacgaaaaacacgacgaggaguucugcgauaugcuuagacuguuugacuucuguaagcaggccauccagcggcucaaagcggaagcccagauguccauucaacugaucaauaaggcugucaacgcccuuaucaaugaucagcugauuaugaagaaccaccuccgcgacaucauggggauuccuuauugcaauuacagcaaauauugguaccugaaccauaccacaaccggaaagacaucucugcccaaauguuggcucguguccaauggcagcuaccugaacgaaacccacuucucugacgauaucgagcagcaagcugacaauaugauuacggagaugcuucagaaggaauauauggagagacaggggaaaacaccucugggacucguggaucuguuugucuucagcaccuccuuuuaccugaucucuaucuuccuucaucucguuaagauuccgacccaccggcauaucgugggcaaaagcugccccaagccucaccgccugaaccacaugggcauuuguuccugcgggcuguauaagcagcccggagugccugucaaauggaagagaugaggacuagucccuguucccagagcccacuuuuuuuucuuuuuuugaaauaaaauagccugucuuucagaucuaaaaaaaaaaaaaaaaaaaaaaaaaaaaaaaaaaaaaaaaaaaaaaaaaaaaaaaaaaaaaaaaaaaaaaaaaaaaaaaaaaaaaaaaaaaaaaaaaaaa

SEQ ID NO: 37052 - RNA, 1724 nt, Artificial Sequence
  mRNA product Design a-1 (A100) comprising derived and/or modified sequence from LASV(G1442-SLE-2011;Clade IV)__AIT17180__GPCmut10 (opt5)
aggagagucccgcagucggcguccagcggcucugcuuguucgugugugugucguugcaggccuuauucaagcuuaccaugggccagaucgugaccuucuuucaagaggucccccacguuauugaagaggugaugaacaucgugcugauugcccucagcauccuggcuguccuuaaggggcuguacaauguggccacaugcggacucauuggccugguuacguuccuucugcucugugggagauccugcaccacaacccuguauaaaggaguguacgaacugcagacacucgagcugaacauggaaacccuuaauauguguaugccucugucuugcacaaagaacaauagccaucacuauauccgggucggcaacgagaccgggcucgagcugacgcuuaccaauacauccaucauuaaccauaaauuuuguaaucugucugacgcgcacaagaaaaaccucuacgaucaugcucugaugagcaucauuuccaccuuccaccugucuaucccgaauuuuaaccaguaugaagccaugagcugcgacuucaauggaggcaagauuuccgugcaguacaaccucagccacucuuaugccggcgaugcugccaaucauugugggacaguugcuaacggagugcugcaaaccuuuaugcgcauggccuggggcggguccuacaucgcgcuugacagcggaagaggcaacugggauugcauuaugacgucuuaccaguaucugaucauccagaauacaaccugggacgaucacugucaguucucccggcccagcccuauuggguaccucggacugcuuucucaacgcacaagagacgucuauaucucccggcgccugcucggcaccuuuaccuggacacugagcgauuccgagggcaaggacacgcccgggggauacugccugaccagauggaugcucauugaagccgagcugaaauguuucggcaacacagcuguggccaagugcaaugagaaacaugaugaagaguuuugcgacaugcuucggcuguucgauuuuuguaagcaggcuauccagcgccucaaagccgaagcgcagaugucuauucaacugaucaacaaggccgugaaugcucuuaucaacgaccagcugauuaugaagaaucaccucagagacaucauggggauuccuuauugcaacuacagcaaauauugguaccugaauaacaccgccacaggaaagaccucccugcccaaauguuggcucaucagcaauggcucuuaccugaacgagacgcacuucuccgaugacauugaacaggaggcugauaauaugaucacagagaugcuucaaaaggaauauauggagcggcaggggaaaaccccucugggacucgucgaccuguucguuuuuagcaccucuuucuaccugaucagcauuuuucuucaucucgugaagaucccgacacaccgccauauugugggcaaauccugccccaagccucacagacugaaccauaugggcaucuguucuugcgggcuguauaagcagcccggagucccugugcgguggaaacgcugaggacuagucccuguucccagagcccacuuuuuuuucuuuuuuugaaauaaaauagccugucuuucagaucuaaaaaaaaaaaaaaaaaaaaaaaaaaaaaaaaaaaaaaaaaaaaaaaaaaaaaaaaaaaaaaaaaaaaaaaaaaaaaaaaaaaaaaaaaaaaaaaaaaaa

SEQ ID NO: 37053 - RNA, 1724 nt, Artificial Sequence
  mRNA product Design a-1 (A100) comprising derived and/or modified sequence from LASV(G3010-SLE-2013;Clade IV)__AIT17344__GPCmut10 (opt5)
aggagagucccgcagucggcguccagcggcucugcuuguucgugugugugucguugcaggccuuauucaagcuuaccaugggccagaucgugaccuucuuucaagaggucccccacguuauugaagaggugaugaacaucgugcugauugcccucagcauccuggcuguccuuaaggggcuguacaauuucgccacaugcggacucgugggccugguuacguuucuucugcucugugggagauccugcaccacaucucuguauaaaggaguguacgaacugcagacccucgagcugaacauggaaacacuuaauauguguaugccucugagcugcaccaagaacaauucccaucacuauauuauggucggcaacgagacagggcucgagcugacccuuacgaauaccucuaucaucaaccauaaauucuguaaucugagcgacgcgcacaagaaaaaccucuacaaucaugcucugauguccauuaucucuacauuucaccugagcauuccgaacuucaaucaguaugaagccauguccugcgauuuuaacggaggcaagaucagcgugcaguacaaucucucucacuccuaugccggcgacgcugccagccauugugggaccguugcuaacggagugcugcaaacauucaugcggauggccuggggcgggucuuacauugcgcuugauuccggauacggcaagugggacugcaucaugaccagcuaucaguaccugauuauccagaacacgacaugggaggaucacugucaguuuucucgccccuccccuaucggguaucucggacugcuuagccaaagaacccgggacauuuacaucucccgcagacugcucggcacauucaccuggacccugucugauagcgaaggcaaagacacacccgggggauauugccugacgcgguggaugcucauugaggccgagcugaaguguuuuggcaauaccgcugucgccaaaugcaacgaaaagcaugaugaggaguucugcgacaugcuucgccuguuugauuucuguaaacaggcuauccagagacucaagacagaagcccagauguccauucaacugaucaauaaggcggugaacgcccuuaucaaugaccagcugauuaugaaaaaccaccuccgggauaucauggggauuccuuacugcaauuauagcaaguacugguaccugaaccacaccacaaccggaaaaacgucucugcccaaguguuggcucguguccaauggcagcuaucugaacgaaacacauuucucugacgacaucgagcagcaagcugauaauaugauuaccgagaugcuucagaaagaauacauggagcgccaggggaagaccccucugggacucgucgaccuguuuguuuucagcacauccuuuuaucugaucucuaucuuccuucaccucgugaaaauuccgacccauagacacaucgugggcaagagcugccccaagccucaucggcugaaccacaugggcauuuguuccugcgggcuguacaaacagcccggagucccugugcgcuggaagagaugaggacuagucccuguucccagagcccacuuuuuuuucuuuuuuugaaauaaaauagccugucuuucagaucuaaaaaaaaaaaaaaaaaaaaaaaaaaaaaaaaaaaaaaaaaaaaaaaaaaaaaaaaaaaaaaaaaaaaaaaaaaaaaaaaaaaaaaaaaaaaaaaaaaaa

SEQ ID NO: 37054 - RNA, 1724 nt, Artificial Sequence
  mRNA product Design a-1 (A100) comprising derived and/or modified sequence from LASV(G502-SLE-2009;Clade IV)__AIT17126__GPCmut10 (opt5)
aggagagucccgcagucggcguccagcggcucugcuuguucgugugugugucguugcaggccuuauucaagcuuaccaugggccagaucgugaccuucuuucaagaggucccccacguuauugaagaggugaugaacaucgugcugauugcccucagcauccuggcuguccuuaaggggcuguacaauuucgccacaugcggacucgugggccugcuuacguuucugcuccugugugggagauccugcaccacaggacuguauaaaggcguuuacgaacuccagacccuggagcuuaacauggaaacacugaauauguguaugccucucucuugcaccaagaacaauagccaucacuauauuaugguggggaacgagacaggacuggagcuuacccugacgaauaccuccaucaucaaccauaaauucuguaaucucucugacgcgcacaagaaaaaccuguacgaucaugcucugaugagcauuaucuccacauuucaccucucuauuccgaauuucaaccaguaugaagccaugagcugcgacuuuaauggcggcaagaucuccguccaguacaaccugagccacucuuaugccggggaugcugccgaccauuguggaaccguggcuaauggcguucuucaaacauucaugcggauggccuggggaggguccuacauugcgcuggauagcggccgcgggagaugggacugcaucaugaccucuuaccaguaucucauuauccagaacacgacaugggaggaucacugucaguuuucccggcccagcccuaucggauaccugggccuucugucucaacgcaccagagacauuuauaucucccggcgccuccugggcacauucaccuggacccugagcgauuccgaagggaaggacacacccggaggcuacugccucacgagauggaugcugauugaggccgagcuuaaauguuuugggaacaccgcuguggccaagugcaaugaaaaacaugaugaggaguucugcgacaugcugcggcucuuugauuucuguaagcaggcuauccagcgccugaaagccgaagcgcagaugucuauucaacuuaucaacaaggccgucaaugcucugaucaacgaccagcucgugaugaagaaucaccugagagacauuaugggaaucccuuauugcaacuacagccgguauugguaccugaaucacacaaccacaggccgcaccucccuccccaaauguuggcuggugagcaacgggucuuaccuuaaugaaacgcauuucuccgaugacauugagcagcaagccgauaacaugaucacagagaugcugcagaaggaauauauggagagacagggaaaaaccccucucggccuggucgaccuguuuguuuucagcaccucuuuuuaccuuauuagcaucuuccuccaccuggugaagaucccgacacaucggcacauugugggcaaauccugccccaagccucaucgccugaaucacauggggaucuguucuugcggacucuauaaacagcccggcgucccugugaaguggaagagaugaggacuagucccuguucccagagcccacuuuuuuuucuuuuuuugaaauaaaauagccugucuuucagaucuaaaaaaaaaaaaaaaaaaaaaaaaaaaaaaaaaaaaaaaaaaaaaaaaaaaaaaaaaaaaaaaaaaaaaaaaaaaaaaaaaaaaaaaaaaaaaaaaaaaa

SEQ ID NO: 37055 - RNA, 1724 nt, Artificial Sequence
  mRNA product Design a-1 (A100) comprising derived and/or modified sequence from LASV(G733-SLE-2010;Clade IV)__AIT17154__GPCmut10 (opt5)
aggagagucccgcagucggcguccagcggcucugcuuguucgugugugugucguugcaggccuuauucaagcuuaccaugggccagaucgugaccuucuuucaagaggucccccacguuauugaagaggugaugaacaucgugcugauugcccucagcauccuggcuguccuuaaggggcuguacaauuucgccacaugcggaauugugggccucguuuccuuucugcuucugugugggagaucuugcacgaccagccucuauaaaggaguguacgaacugcagacacuggagcucaacauggaaacccugaauauguguaugccucuuuccugcacaaagaacaauucucaucacuauaucauggucggcaacgagaccgggcuggagcucacacugaccaauacgagcaucauuaaccauaaauucuguaaucuuuccgacgcgcacaagaaaaaccuguacgaucaugcucucaugucuaucauuagcaccuuucaccuguccaucccgaauuucaaccaguaugaagccaugagcugcgacuuuaauggaggcaagauuucugugcaguacaaccugucccacagcuaugccggcgaugcugccaaucauugugggacaaucgcuaacggaguucuccaaaccuucaugcggauggccuggggcgggucuuacauugcgcuggacuccggacgcgauagaugggacugcaucaugacaagcuaccaguaucuuaucauucagaacaccacgugggaggaucacugucaguuuucucggcccuccccuaucggcuaccuggggcuccugagccaacgcacaagagacauuuauaucucccggcgccuucugggaaccuucacauggacccucucugauagcgaaggcaaggacacccccggcggguacugccugacaagauggaugcugauugaggccgagcucaaauguuuuggaaauacggcuguggccaagugcaacgaaaaacaugaugaggaguucugcgacaugcugcggcuuuuugauuucuguaagcaggcuauccagcgccugaaagccgaagcgcagauguccauccaacucauuaauaaggccgucaacgcucugaucaaugaccagcuuauuaugaagaaccaccugagagacaucaugggcauuccuuauugcaauuacagcaaauauugguaccucaaccacaccacaaccgggaagacaucucugcccaaauguuggcugguguccaauggaagcuaccucaacgaaacccauuucucugaugacaucgagcagcaagccgauaauaugaucacggagaugcugcagaaggaauauauggagcggcagggcaaaacaccucuugggcugguggaccucuuugucuucagcaccuccuuuuaccugauuucuaucuuccugcaccuuguuaagauuccgacccaucgccacguggugggaaaaagcugccccaagccucauagacucaaccacaugggcaucuguuccugcggccuguaugggcagcccggagucccugugaaguggaaacggugaggacuagucccuguucccagagcccacuuuuuuuucuuuuuuugaaauaaaauagccugucuuucagaucuaaaaaaaaaaaaaaaaaaaaaaaaaaaaaaaaaaaaaaaaaaaaaaaaaaaaaaaaaaaaaaaaaaaaaaaaaaaaaaaaaaaaaaaaaaaaaaaaaaaa

SEQ ID NO: 37056 - RNA, 1724 nt, Artificial Sequence
  mRNA product Design a-1 (A100) comprising derived and/or modified sequence from MOPV/LASV reassortant(IGS-1;Clade IV)__AFY05576__GPCmut10 (opt5)
aggagagucccgcagucggcguccagcggcucugcuuguucgugugugugucguugcaggccuuauucaagcuuaccaugggccagaucgugaccuucuuucaagaggucccccacguuauugaagaggugaugaacaucgugcugauugcccucagcguccuggcugugcuuaaggggcuguacaauuucgccacaugcggacucguuggccuggugacguuucuucugcucugugggagauccugcaccacaucucuguauaaaggagucuacgaacugcagacccucgagcugaacauggaaacacuuaauauguguaugccucugagcugcaccaagaacaauucccaucacuauaucauggugggcaacgagacagggcucgagcugacccuuacgaauaccucuauuaucaaccauaaauucuguaaucugagcgacgcgcacaagaaaaaccucuacgaucaugcucugauguccaucauuucuacauuucaccugagcaucccgaauuucaaccaguaugaagccauguccugcgacuuuaauggaggcaagauuagcguucaguacaaccucucucacuccuaugccggcgaugcugccaaucauugugggaccguggcuaacggaguccugcaaacauucaugcggauggccuggggcgggagcuacaucgcgcuugacucuggacgcggcaacugggauugcauuaugaccuccuaccaguaucugaucauucagaauacgacaugggaggaccacugucaguuuagcagacccucuccuaucggguaccucggacugcuuucccaacggacccgcgauaucuauauuagcagacggcugcucggcacauucaccuggacccuguccgacucugaaggcgaggauacacccgggggauacugccugacgcgcuggaugcucaucgaggccgaacugaaguguuuuggcaacaccgcuguggccaaaugcaaugagaagcaugacgaagaguucugcgauaugcuuagacuguuugacuucuguaaacaggcuauucagcggcucaaggccgaagcgcagaugagcauccaacugauuaacaaagccgugaaugcucuuaucaacgaucagcugaucaugaagaaucaccuccgcgacauuauggggaucccuuauugcaacuacuccaaguauugguaccugaaucacacaaccacaggaagaaccagccugcccaaauguuggcucgucucuaacggcuccuaccugaaugagacgcauuucagcgacgauauugagcagcaagccgacaacaugaucacagaaaugcuucagaaggaguauauggaacggcaggggaaaaccccucugggacucguugaucuguuuguguucucuaccagcuuuuaccugauuuccaucuuccuucaccucgugaagaucccgacacaucgccacauugucggcaaaucuugccccaagccucauagacugaaucacaugggcaucuguagcugcgggcuguauaaacagcccggagugccuguuaaguggaagcggugaggacuagucccuguucccagagcccacuuuuuuuucuuuuuuugaaauaaaauagccugucuuucagaucuaaaaaaaaaaaaaaaaaaaaaaaaaaaaaaaaaaaaaaaaaaaaaaaaaaaaaaaaaaaaaaaaaaaaaaaaaaaaaaaaaaaaaaaaaaaaaaaaaaaa

SEQ ID NO: 37057 - RNA, 1724 nt, Artificial Sequence
  mRNA product Design a-1 (A100) comprising derived and/or modified sequence from LASV(LM765-SLE-2012;Clade IV)__AIT17814__GPCmut10 (opt5)
aggagagucccgcagucggcguccagcggcucugcuuguucgugugugugucguugcaggccuuauucaagcuuaccaugggccagaucgugaccuucuuucaagaggucccccacguuauugaagaggugaugaacaucgugcugauugcccucagcauccuggcuguccuuaaggggcuguacaauuucgccacaugcggacucgugggccugguuacguuucuucugcucugugggagauccugcaccacaucucuguauaaaggaguguacgaacugcagacccucgagcugaacauggaaacacuuaauauguguaugccucugagcugcaccaagaacaauucccaucacuauauuauggucggcaacgagacagggcucgagcugacccuuacgaauaccucuaucaucgaccauaaauucuguaaccugagcgaugcgcaccggaagaaucucuacgaccaugcucugauguccauuaucucuacauuucaccugagcauuccgaacuucaaucaguaugaagccauguccugcgauuuuaacggaggcaaaaucagcgugcaguacaaucucucucacuccuaugccaaggacgcugccgaucauuguggcaccguugcuaacggggugcugcaaacauucaugcgcauggccuggggaggcagcuacauugcgcuugacucugggagaggacggugggauugcaucaugaccuccuaccaguaucugauuauccagaauacgacaugggaggaccacugucaguuuagccgccccucuccuaucggcuaccucgggcugcuuucccaaagaacccgggauauuuauaucagccgcagacugcucggaacauucaccuggacccuguccgacucugaaggcaaggauacacccggcggguacugccugacgcgguggaugcucauugaggccgagcugaaauguuuuggaaacaccgcugucgccaagugcaacgaaaaacaugacgaggaguucugcgauaugcuucgccuguuugacuucuguaagcaggcuauccagagacucaaagccgaagcgcagaugagcauucaacugaucaauaaggccgugaacgcucuuaucaaugaccagcugauuaugaagaaccaccuccgggauaucaugggcauuccuuauugcaauuacuccaaauauugguaccugaaccacacaaccacagggaagaccagccugcccaaauguuggcucgugucuaauggauccuaccugaacgaaacgcauuucagcgacgauaucgagcagcaagccgacaauaugauuacagagaugcuucagaaggaauauauggagcgccagggcaaaaccccucuggggcucgucgaucuguuuguuuucucuaccagcuuuuaccugaucuccaucuuccuucaccucgugaagauuccgacacauagacacaucgugggaaaacccugcccuaagccccaucggcugaaccacaugggcauuuguucuugcggccuguauaagcagccugggguccccgugaaauggaagcgcugaggacuagucccuguucccagagcccacuuuuuuuucuuuuuuugaaauaaaauagccugucuuucagaucuaaaaaaaaaaaaaaaaaaaaaaaaaaaaaaaaaaaaaaaaaaaaaaaaaaaaaaaaaaaaaaaaaaaaaaaaaaaaaaaaaaaaaaaaaaaaaaaaaaaa

SEQ ID NO: 37058 - RNA, 1724 nt, Artificial Sequence
  mRNA product Design a-1 (A100) comprising derived and/or modified sequence from LASV(LM776-SLE-2012;Clade IV)__AIT17824__GPCmut10 (opt5)
aggagagucccgcagucggcguccagcggcucugcuuguucgugugugugucguugcaggccuuauucaagcuuaccaugggccagaucgugaccuucuuucaagaggucccccacguuauugaagaggugaugaacaucgugcugauugcccucagcauccuggcuguccuuaaggggcuguacaauuucgccacaugcggacucgugggccugguuacguuucuucugcucugugggagauccugcaccacaucuguguauaaaggagucuacgaacugcagacccuggagcucaacauggaaacacugaauauguguaugccucuuagcugcaccaagaacaauucccaucacuauauuauggugggcaacgagacagggcuggagcucacccugacgaauaccucuaucaucaaccauaaauucuguaaucuuagcgacgcgcacaagaaaaaccuguacgaucaugcucucauguccauuaucucuacauuucaccugagcauuccgaauuucaaccaguaugaagccauguccugcgacuuuaauggaggcaagaucagcguucaguacaaccugucucacuccuaugccggcgaugcugccaaucauugugggaccguggcuaacggaguccuccaaacauucaugcggauggccuggggcgggagcuacauugcgcuggacucuggacacggcaagugggauugcaucaugaccuccuaccaguaucuuauuauccagaacacgacaugggaggaccauugucaguuuagccgccccucuccuaucggguaccugggacuccugucccaaagaacccgggauauuuauaucagccgcagacuucugggcacauucaccuggacccucuccgacucugaaggcaaagauacacccgggggauacugccugacgcgguggaugcugauugaggccgagcucaaguguuuuggcaauaccgcuguggccaaaugcaacgaaaagcacgacgaggaguucugcgauaugcugcgccuuuuugacuucuguaaacaggcuauccagagacugaaggccgaagcgcagaugagcauucaacucaucaauaaggccgugaacgcucugaucaaugaucagcuuauuaugaaaaaccaucugcgggacaucauggggauuccuuauugcaauuacuccaaguauugguaccucaaccacacaaccacaggaaaaaccagccugcccaaguguuggcuggucucuaauggcuccuaccucaacgaaacgcacuucagcgacgauaucgagcagcaagccgacaauaugauuacagagaugcugcagaaagaauauauggagcgccaggggaagaccccucuuggacugguugaucucuuuguguucucuaccagcuuuuaccugaucuccaucuuccugcaucuugugaaaauuccgacacacagacauaucgucggcaagucuugccccaagccucaccggcucaaccacaugggcauuuguagcugcgggcuguauaaacagcccggagugccuguucgcuggaagagaugaggacuagucccuguucccagagcccacuuuuuuuucuuuuuuugaaauaaaauagccugucuuucagaucuaaaaaaaaaaaaaaaaaaaaaaaaaaaaaaaaaaaaaaaaaaaaaaaaaaaaaaaaaaaaaaaaaaaaaaaaaaaaaaaaaaaaaaaaaaaaaaaaaaaa

SEQ ID NO: 37059 - RNA, 1724 nt, Artificial Sequence
  mRNA product Design a-1 (A100) comprising derived and/or modified sequence from LASV(Mad39;Clade IV)__ANH09722__GPCmut10 (opt5)
aggagagucccgcagucggcguccagcggcucugcuuguucgugugugugucguugcaggccuuauucaagcuuaccaugggccagaucgugaccuucuuucaagaggucccccacguuauugaagaggugaugaacaucgugcugauugcccucagcauccuggcuguccuuaaggggcuguacaauguggccacaugcggacucauuggccugguuacguuccuucugcucugugggagauccugcaccacaacccuguauaaaggaguguacgaacugcaggcgcucgagcugaacauggaaacacuuaauauguguaugccucugucuugcaccaagaacaauagccaucacuauauccgggucggcaacgagacagggcucgagcugacccuuacgaauaccucccugaucaaccauaaauuuuguaaucucucugacgcucacaagaaaaaccuguacgaucaugcccugaugagcauuaucuccacauuccaccucucuauuccgaauuuuaaccaguaugaagccaugagcugcgacuucaaugauggaaagaucuccgugcaguacaaccugagccacaccuaugcuggcgacacagccaaucauuguggcaccguugcuaacggggugcuucaaacguuuaugcgcauggccuggggaggcucuuacauugcgcuggauuccgggagaggaggcugggacugcaucaugacaagcuaccaguaucucauuauccagaacaccacaugggaggaucacugucaguucucucggcccuccccuaucggguaccugggacuucugagccaacgcaccagagacauuuauaucucucggcgccuccugggcaccuuuacauggacgcuguccgauagcgaaggcaaggacacccccgggggauacugccucacaagauggaugcugauugaggccgagcuuaaauguuucggcaauaccgcugucgccaagugcaacgaaaaacaugaugaggaauuuugcgacaugcugcgccucuucgauuuuuguaagcaggcuauccagcggcugaaagccgaggcgcagauguccauucaacuuaucaauaaggccgugaacgcucugaucaaugaccagcucauuaugaagaaccaccugagagacaucauggggauuccuuauugcaauuacucuaaauauugguaccugaaccacacagugaccggaaagacgagccuccccaaauguuggcuggucuccaauggcagcuaccuuaacgaaacacauuucucugaugacaucgagcagcaagccgauaauaugauuaccgagaugcugcagaaggaauauauggagcggcaggggaaaaccccucucggacugguugaccuguucguguuuuccaccagcuucuaccuuaucucuaucuuucuccaccuggugaagauuccgacacaucgccacgucgugggcaaacccugcccuaagccccauagacugaaccacaugggcaucuguagcugcggguucuauaagcagccuggaguucccgugcgguggaaacgcugaggacuagucccuguucccagagcccacuuuuuuuucuuuuuuugaaauaaaauagccugucuuucagaucuaaaaaaaaaaaaaaaaaaaaaaaaaaaaaaaaaaaaaaaaaaaaaaaaaaaaaaaaaaaaaaaaaaaaaaaaaaaaaaaaaaaaaaaaaaaaaaaaaaaa

SEQ ID NO: 37060 - RNA, 1724 nt, Artificial Sequence
  mRNA product Design a-1 (A100) comprising derived and/or modified sequence from LASV(Z0947-SLE-2011;Clade IV)__AIT17840__GPCmut10 (opt5)
aggagagucccgcagucggcguccagcggcucugcuuguucgugugugugucguugcaggccuuauucaagcuuaccaugggccagaucgugaccuucuuucaagaggucccccacguuauugaagaggugaugaacaucgugcugauugcccucagcauccuggcuguccuuaaggggcuguacaauuucgccacaugcggacucgugggccugguuacguuucuucugcucugugggagauccugcaccauuucucuguauaaaggaguguacgaacugcagacacucgagcugaacauggaaacccuuaauauguguaugccucugagcugcacaaagaacaauucccaucacuauaucauggucggcaacgagaccgggcucgagcugacacuuaccaauacgucuaucauuaaccauaaauucuguaaucugagcgacgcgcacaagaaaaaccucuacgaucaugcucugauguccaucauuucuaccuuucaccugagcaucccgaauuucaaccaguaugaagccauguccugcgacuuuaauggaggcaagauuagcgugcaguacaaccucucucacuccuaugccggcgaugcugccaaucauugugggacaguugcuaacggagugcugcaaaccuucaugcggauggccuggggcgggagcuacaucgcgcuugacucuggacgcgauagaugggacugcauuaugacauccuaccaguaucugaucauccagaacaccacgugggaggaucacugucaguuuagccggcccucuccuauuggcuaccucgggcugcuuucccaacgcacaagagacaucuauauuagccggcgccugcucggaaccuucacauggacccuguccgauucugaaggcaaggacacccccggcggguacugccugacaagauggaugcucaucgaggccgagcugaaauguuuuggaaauacggcugucgccaagugcaacgaaaaacaugaugaggaguucugcgacaugcuucggcuguuugauuucuguaagcaggcuauucagcgccucaaagccgaagcgcagaugagcauccaacugaucaauaaggccgugaacgcucuuauuaaugaccagcugaucaugaagaaccaccucagagacauuaugggcaucccuuauugcaauuacuccaaauauugguaccugaaccacaccacaaccgggaagacaagccugcccaaauguuggcucgugucuaauggauccuaccugaacgaaacccauuucagcgaugacauugagcagcaagccgauaauaugaucacggagaugcuucagaaggaauauauggagcggcagggcaaaacaccucuggggcucgucgaccuguuuguuuucucuaccagcuuuuaccugaucuccauuuuccuucaccucgugaagaucccgacccaucgccacauugugggaaaacccugcccuaagccccauagacugaaccacaugggcaucuguucuugcggccuguauaagcagccugggguccccgugaaauggaagcggugaggacuagucccuguucccagagcccacuuuuuuuucuuuuuuugaaauaaaauagccugucuuucagaucuaaaaaaaaaaaaaaaaaaaaaaaaaaaaaaaaaaaaaaaaaaaaaaaaaaaaaaaaaaaaaaaaaaaaaaaaaaaaaaaaaaaaaaaaaaaaaaaaaaaa

SEQ ID NO: 37061 - RNA, 1736 nt, Artificial Sequence
  mRNA product Design a-2 (hSL-A64-N5) comprising derived and/or modified sequence from LASV(Josiah;Clade IV)__NP_694870__GPCmut10 (opt1)
aggagaguccgcucagccagguugcagaagcggcuuagcguguguccuaaucuucucucugcguguagguaggccugugccgcaaacaagcuuaccaugggccagaucgugaccuucuuccaggaggucccccacgugaucgaggaggugaugaacaucguccugaucgcccucagcgugcuggccgugcugaaggggcucuacaacuucgcgaccugcggccuggucgggcuggugacguuccuccugcugugcggccgcuccugcaccaccagccucuacaaggggguguacgagcugcagacccuggagcucaacauggagacgcugaacaugugcaugccgcuguccugcaccaagaacaacagccaccacuacaucauggucggcaacgagaccggccucgagcugacgcugaccaacaccuccaucaucaaccacaaguucugcaaccucagcgacgcccacaagaagaaccuguacgaccacgcccugauguccaucaucagcaccuuccaccucuccauccccaacuucaaccaguacgaggccaugagcugcgacuucaacgggggcaagaucuccgugcaguacaaccugagccacuccuacgccggggacgcggccaaccacugcggcacgguggccaacgggguccugcagaccuucaugcggauggccuggggcggcagcuacaucgcgcucgacuccgggcgcggcaacugggacugcaucaugaccagcuaccaguaccugaucauccagaacaccacgugggaggaccacugccaguucucccggcccagccccaucggguaccugggccuccugucccagcgcacccgggacaucuacaucagccgccggcugcucggcaccuucaccuggacgcugagcgacuccgaggggaaggacaccccgggcggguacugccugacccgcuggaugcucaucgaggccgagcugaagugcuucggcaacaccgccguggccaagugcaacgagaagcacgacgaggaguucugcgacaugcugcggcuguucgacuucugcaagcaggccauccagcgccugaaggcggaggcccagaugagcauccagcugaucaacaaggccgugaacgcccucaucaacgaccagcugaucaugaagaaccaccuccgggacaucauggggauccccuacugcaacuacuccaaguacugguaccucaaccacacgaccaccggccgcaccagccugcccaagugcuggcuggucuccaacggcagcuaccucaacgagacgcacuucuccgacgacaucgagcagcaggccgacaacaugaucaccgagaugcugcagaaggaguacauggagcggcaggggaagacgccccugggccucguggaccuguucguguucagcaccuccuucuaccugaucagcaucuuccugcaccucgucaagaucccgacccaccgccacaucguggggaaguccugccccaagccccaccggcugaaccacaugggcaucugcagcugcgggcuguacaagcagcccggcgugccggucaaguggaagcgcugaggacuagucccuguucccagagcccacuuuuuuuucuuuuuuugaaauaaaauagccugucuuucagaucucaaaggcucuuuucagagccaccaaaaaaaaaaaaaaaaaaaaaaaaaaaaaaaaaaaaaaaaaaaaaaaaaaaaaaaaaaaaaaaaagaauu

SEQ ID NO: 37062 - RNA, 1733 nt, Artificial Sequence
  mRNA product Design a-2 (hSL-A64-N5) comprising derived and/or modified sequence from LASV(LP;Clade I)__AAF86701__GPCmut10 (opt1)
aggagaguccgcucagccagguugcagaagcggcuuagcguguguccuaaucuucucucugcguguagguaggccugugccgcaaacaagcuuaccaugggccagaucaucaccuucuuccaggaggugccccacgucaucgaggaggugaugaacaucgugcugaucgcccucagccugcuggccauccucaaggggcuguacaacaucgcgaccugcggcaucaucgggcuggucgccuuccucuuccugugcggcaaguccugcagccugacgcucaagggcggguacgagcugcagacccuggagcucaacauggagacccugaacaugugcaugccgcuguccugcacgaagaacagcucccaccacuacauccgcgugggcaacgagaccgggcucgagcugacccugaccaacacgagcaucaucaaccacaaguucugcaaccucuccgacgcccacaagaagaaccuguacgaccacgcccugaugagcaucaucuccaccuuccaccucagcauccccaacuucaaccaguacgaggccauguccugcgacuucaacggcgggaagaucagcgugcaguacaaccugucccacagcuacgcgggcgacgccgccgagcacugcgggaccgucgccaacggcgugcugcagaccuucaugcggauggcguggggcgggcgcuacaucgcccucgacuccggcaaggggaacugggacugcaucaugacgagcuaccaguaccugaucauccagaacaccaccugggaggaccacugccaguucucccggcccagccccaucggcuaccugggccuccugucccagcgcacccgggacaucuacaucagccgccggcugcucgggacguucaccuggacccugagcgacuccgagggcaacgagacccccgggggcuacugccugacgcgcuggaugcucaucgaggccgagcugaagugcuucgggaacaccgccguggccaagugcaacgagaagcacgacgaggaguucugcgacaugcugcggcuguucgacuucugcaagcaggcgauccgccggcugaaggccgaggcccagaugagcauccagcugaucaacaaggccgucaacgcccucaucaacgaccagcugaucaugaagaaccaccuccgcgacaucaugggcauccccuacugcaacuacuccaaguacugguaccucaaccacaccagcuccggccggaccagccugcccaagugcuggcugaucuccaacgggagcuaccucaacgagacgcaguucuccgacgacaucgagcagcaggcggacaacaugaucaccgagaugcugcagaaggaguacaucgagcgccagggcaagaccccgcuggggcucguggacaucuucaucuucagcaccuccuucuaccugaucagcaucuuccugcaccugaucaagaucccgacgcaccggcacaucgugggcaagcccugccccaagccccaccgccucaaccacaugggggucugcuccugcggccuguacaagcacccgggcgugcccaccaaguggaagcggugaggacuagucccuguucccagagcccacuuuuuuuucuuuuuuugaaauaaaauagccugucuuucagaucucaaaggcucuuuucagagccaccaaaaaaaaaaaaaaaaaaaaaaaaaaaaaaaaaaaaaaaaaaaaaaaaaaaaaaaaaaaaaaaaagaauu

SEQ ID NO: 37063 - RNA, 1733 nt, Artificial Sequence
  mRNA product Design a-2 (hSL-A64-N5) comprising derived and/or modified sequence from LASV(803213;Clade II)__AAF86703__GPCmut10 (opt1)
aggagaguccgcucagccagguugcagaagcggcuuagcguguguccuaaucuucucucugcguguagguaggccugugccgcaaacaagcuuaccaugggccagaucaucaccuucuuccaggaggugccccacgucaucgaggaggugaugaacaucgugcugaucgcccucagccugcuggccauccucaaggggaucuacaacgucgcgaccugcggccuguucgggcugaucuccuuccuccugcugugcggccgcagcugcuccgugacguacaaggggguguacgagcuccagacccuggagcugaacauggccaaccucaacaugugcaugccgcugagcugcaccaagaacaacucccaccacuacaucauggucggcaacgagacgggccuggagcucacccugaccaacaccagcaucaucaaccacaaguucugcaaccuguccgacgcccacaagaagaaccucuacgaccacgcccugaugagcaucaucuccacguuccaccugagcauccccaacuucaaccaguacgaggccauguccugcgacuucaacgggggcaagaucagcgugcaguacaaccucucccacagcuucgcgguggacgccgccaaccacugcgggaccaucgccaacggcguccugcagaccuucaugcggauggcguggggcggguccuacaucgcccuggacagcggcaaggggaacugggacugcaucaugaccuccuaccaguaccucaucauccagaacacgaccugggaggaccacugccaguucagccgccccucccccaucggcuaccuggggcugcucagccagcggacccgcgacaucuacaucagccggcgccugcugggcaccuucacguggacccucuccgacagcgagggcaacgaggcccccgggggcuacugccugacccgguggaugcugaucgaggccgagcucaagugcuucgggaacaccgccguggcgaagugcaacgagaagcacgacgaggaguucugcgacaugcugcgccuguucgacuucugcaagcaggccaucaagcggcucaagacggaggcccagauguccauccagcugaucaacaaggccgugaacgcccugaucaacgaccagcucaucaugaagaaccaccuccgcgacaucaugggcauccccuacugcaacuacagccgguacugguaccugaaccacaccgucaccgggaagaccucccugccccgcugcuggcuggugagcaacggcuccuaccugaacgagacgcacuucagcgacgacaucgagcagcaggcggacaacaugaucaccgagaugcuccagaaggaguacauggaccggcagggcaagaccccgcuggggcugguggaccucuucgucuucuccaccagcuucuaccugaucuccaucuuccugcaccuggugaagaucccgacgcaccgccacaucgugggcaagcccugccccaagccccaccggcucaaccacauggggaucugcagcugcggccuguacaagcacccggggguccccgugaaguggaagcgcugaggacuagucccuguucccagagcccacuuuuuuuucuuuuuuugaaauaaaauagccugucuuucagaucucaaaggcucuuuucagagccaccaaaaaaaaaaaaaaaaaaaaaaaaaaaaaaaaaaaaaaaaaaaaaaaaaaaaaaaaaaaaaaaaagaauu

SEQ ID NO: 37064 - RNA, 1733 nt, Artificial Sequence
  mRNA product Design a-2 (hSL-A64-N5) comprising derived and/or modified sequence from LASV(GA391;Clade III)__CAA36645__GPCmut10 (opt1)
aggagaguccgcucagccagguugcagaagcggcuuagcguguguccuaaucuucucucugcguguagguaggccugugccgcaaacaagcuuaccaugggccagaucgugaccuucuuccaggaggucccccacgugaucgaggaggugaugaacaucguccugaucgcccucagcauccuggccauccugaaggggcucuacaacguggcgaccugcggccugaucgggcuggugacguuccuccugcuguccggccgcagcugcucccucaucuacaaggggaccuacgagcugcagacccuggagcucaacauggagacccugaacaugugcaugccgcugagcugcaccaagaacaacucccaccacuacauccgggucggcaacgagaccggccucgagcugacccugacgaacaccagcauccucaaccacaaguucugcaaccuguccgacgcccacaagcgcaaccuguacgaccacagccucauguccaucaucagcaccuuccaccuguccauccccaacuucaaccaguacgaggccaugagcugcgacuucaacgggggcaagaucaccgugcaguacaaccugucccacagcuucgccguggacgccgcggggcacugcggcacgcucgccaacgggguccugcagaccuucaugcggauggccuggggcggcuccuacaucgcccuggacagcgggcgcggcaacugggacugcaucaugaccuccuaccaguaccucaucauccagaacaccacgugggacgaccacugccaguucagccggcccucccccaucggguaccugggccugcucagccagcgcacccgggacaucuacaucagccgccggcugcugggcaccuucaccuggacgcucuccgacagcgaggggaacgagaccccgggcggguacugccugacccgcuggaugcugaucgaggcggagcucaagugcuucggcaacaccgccguggccaagugcaacgagaagcacgacgaggaguucugcgacaugcugcggcuguucgacuucugcaagcaggccauccgccggcucaagacggaggcccagauguccauccagcugaucaacaaggcggugaacgcccugaucaacgaccagcucaucaugaagaaccaccuccgcgacaucauggggauccccuacugcaacuacagccgguacugguaccugaaccacaccuccaccggcaagaccagccugccccgcugcuggcugaucuccaacggcagcuaccugaacgagacgaaguucuccgacgacaucgagcagcaggccgacaacaugaucaccgagaugcuccagaaggaguacaucgaccggcaggggaagacgccccugggccuggucgaccuguucguguucagcaccuccuucuaccucaucagcaucuuccugcaccuggugaagaucccgacccaccgccacaucgucgggaagcccugccccaagccccaccggcucaaccacaugggcaucugcuccugcgggcuguacaagcagccgggcgugcccgugcgcuggaagcggugaggacuagucccuguucccagagcccacuuuuuuuucuuuuuuugaaauaaaauagccugucuuucagaucucaaaggcucuuuucagagccaccaaaaaaaaaaaaaaaaaaaaaaaaaaaaaaaaaaaaaaaaaaaaaaaaaaaaaaaaaaaaaaaaagaauu

SEQ ID NO: 37065 - RNA, 1736 nt, Artificial Sequence
  mRNA product Design a-2 (hSL-A64-N5) comprising derived and/or modified sequence from LASV(AV;Clade V)__CCA30314__GPCmut10 (opt1)
aggagaguccgcucagccagguugcagaagcggcuuagcguguguccuaaucuucucucugcguguagguaggccugugccgcaaacaagcuuaccaugggccagaucgugaccuucuuccaggaggucccccacgugaucgaggaggugaugaacaucguccugaucgcccucagcauccuggccgugcugaaggggcucuacaacaucgcgaccugcggccugaucgggcugaucacguuccuccugcugugcggccgcuccugcagcuccaaccucuacaaggggguguacgagcugcagagccuggaccucaacauggagacccugaacaugugcaugccgcuguccugcaccaagaacaacagccaccacuacauccgggucggcaacgacacgggccucgagcugacccugaccaacaccuccauccucaaccacaaguucugcaaccugagcgacgcccacaagaaggaccuguacgaccacgcccucauguccaucaucagcacguuccaccuguccauccccaacuucaaccaguacgaggccaugagcugcgacuucaacgggggcaagaucuccgugcaguacaaccugagccacuccuacgccaucgacgcggccaaccacugcgggaccguggccaacggcauccuccagaccuucaugcgcauggccuggggcgggagcuacaucgcgcuggacuccggccgggggaacugggacugcaucaugaccagcuaccaguaccugaucauccagaacacgaccugggagaaccacugccaguucucccgccccagccccaucggcuaccucgggcugcugagccagcggacccgcgacaucuacaucucccggcgccuccugggcaccuucacguggacccugagcgacuccgagggcaacgccacccccgggggcuacugccucacccgguggaugcugaucgaggccgagcugaagugcuucgggaacacggccgucgccaagugcaacgagaagcacgacgaggaguucugcgacaugcuccgccuguucgacuucugcaagcaggcgaucagccggcugaaguccgaggcccagaugagcauccagcucaucaacaaggccgugaacgcccugaucaacgaccagcugaucaugaagaaccaccuccgcgacaucaugggcauccccuacugcaacuacuccaaguacugguaccugaaccacaccaucaccgggaagaccagccugcccaagugcuggcucguguccaacggcagcuaccugaacgagacgcacuucuccgacgacaucgagcagcaggccgacaacaugaucaccgagaugcugcagaaggaguacauggagcggcagggcaagaccccgcucgggcuggucgaccuguucguguucagcaccuccuucuaccugaucagcaucuuccuccgccuggugaagaucccgacgcaccggcacaucgucggcaagcccugccccaagccccaccgccugaaccacauggggaucugcuccugcggccucuacaagcagccgggggugcccgugcgguggaagcgcugaggacuagucccuguucccagagcccacuuuuuuuucuuuuuuugaaauaaaauagccugucuuucagaucucaaaggcucuuuucagagccaccaaaaaaaaaaaaaaaaaaaaaaaaaaaaaaaaaaaaaaaaaaaaaaaaaaaaaaaaaaaaaaaaagaauu

SEQ ID NO: 37066 - RNA, 1733 nt, Artificial Sequence
  mRNA product Design a-2 (hSL-A64-N5) comprising derived and/or modified sequence from LASV(Togo/2016/7082;Clade VI)__AMR44577__GPCmut10 (opt1)
aggagaguccgcucagccagguugcagaagcggcuuagcguguguccuaaucuucucucugcguguagguaggccugugccgcaaacaagcuuaccaugggccagaucaucaccuucuuccaggaggugccccacgucaucgaggaggugaugaacaucgugcugaucgcccucagccugcuggccauccucaagggggucuacaacguggcgaccugcggcaucaucgggcuggugacguuccuguuccucugcggccgcuccugcagccugaucuacaagggguccuacgagcugcagacccucgagcugaacauggagacccugaacaugugcaugccgcucagcugcacgaagaacuccagccaccacuacauccgggucggcaacgagaccggccuggagcugacccucaccaacacguccaucaucaaccacaaguucugcaaccugagcgacgcccacaagcgcaaccuguacgaccacgcccucauguccauccugagcaccuuccaccuguccauccccaacuucaaccaguacgaggccaugagcugcgacuucaacgggggcaagaucuccgugcaguacaaccucagccacgccuacgcgguggacgccgccgagcacugcgggaccgucgccaacggcgugcugcagaccuucaugcggauggcguggggcggguccuacaucgcccuggacagcggccgcgggaacugggacugcaucaugacguccuaccaguaccucaucauccagaacaccaccugggaggaccacugccaguucagccggcccucccccaucggcuaccuggggcugcucagccagcgcacccgggacaucuacaucagccgccggcugcugggcacguucaccuggacccucuccgacagcgagggcaacgagacccccgggggcuacugccugacgcgcuggaugcugaucgaggccgagcucaagugcuucgggaacaccgccguggccaagugcaacgagaagcacgacgaggaguucugcgacaugcugcggcuguucgacuucugcaagcaggcgauccagcgccucaaguccgaggcccagaugagcauccagcugaucaacaaggccgucaacgcccugaucaacgaccagcucaucaugaagaaccaccuccgggacaugaugggcauccccuacugcaacuacuccaaguacugguaccugaaccacaccagcuccgggcgcaccagccugcccaagugcuggcugguguccaacggcagcuaccugaacgagacgcacuucuccgacgacaucgagcagcaggccgacaacaugaucaccgagaugcuccagaaggaguacaucgaccggcagggcaagaccccgcuggggcugguggaccucuucgucuucagcaccuccuucuaccugaucagcaucuuccugcaccugaucaagaucccgacgcaccgccacaucgugggcaagcccugccccaagccccaccggcucaaccacauggggaucugcuccugcggccuguacaagcagccgggggugcccacccgcuggaagcggugaggacuagucccuguucccagagcccacuuuuuuuucuuuuuuugaaauaaaauagccugucuuucagaucucaaaggcucuuuucagagccaccaaaaaaaaaaaaaaaaaaaaaaaaaaaaaaaaaaaaaaaaaaaaaaaaaaaaaaaaaaaaaaaaagaauu

SEQ ID NO: 37067 - RNA, 1733 nt, Artificial Sequence
  mRNA product Design a-2 (hSL-A64-N5) comprising derived and/or modified sequence from LASV(KAK-428;Clade n.d. (VII))__ANH09740__GPCmut10 (opt1)
aggagaguccgcucagccagguugcagaagcggcuuagcguguguccuaaucuucucucugcguguagguaggccugugccgcaaacaagcuuaccaugggccagaucgugaccuucuuccaggaggucccccacgugaucgaggaggugaugaacaucguccugaucgcccucagccugcuggccauccucaaggggcuguacaacuucgcgaccugcggcgugaucgggcugaucacguuccuccugcugugcggccgcuccugcagcgccaccuacaaggggcaguacgagcuccagacccuggagcugaacauggagucccucaacaugugcaugccgcugagcugcacgaagaacaacucccaccacuacauccgggccggcaacaacaccggccuggagcucacccugaccaacacgagcaucaucucccacaaguucugcaaccugagcgacgcccacaagaagaaccucuacgaccacacccugauguccaucaucaccaccuuccaccugagcauccccaacuucaaccaguacgaggccauguccugcgacuucaacgggggcaagaucagcauccaguacaaccucucccacagcuacgcgggggacgccgcccagcacugcggcacgguggccaacgggguccugcagaccuucaugcgcauggcguggggcggcuccuaccuggcccucgacagcgggcggcgcggcugggacugcaucaucuccagcuaccaguaccugaucauccagaacaccaccugggacgaccacugccaguucucccggcccagccccaucggguaccugggcuucgugagccagaagacgcgcgacaucuacaucucccggcgccuccugggcaccuucaccuggacccugagcgacuccgaggggcacgacaugccgggcggguacugccucacgcgguggaugcugaucgaggccgaccugaagugcuucggcaacaccgccguggccaagugcaacgagaagcacgacgaggaguucugcgacauguggcgccucuucgacuucugcaagcaggcgauccagcggcugaaggccgaggcccagaugaacauccagcugaucaacaaggccgucaacgcccucaucaacgaccagcugaugaugaagaaccaccuccgcgacaucauggggauccccuacugcaacuacagcaaguucugguaccugaacaacaccaccacgggccggaccucccugccccgcugcuggcugaucagcaacggcuccuaccucaacgagacccacuucagcgacgacaucgagcagcaggcggacaacaugaucaccgagaugcugcagaaggaguacauggaccggcaggggaagacgccccugggccucguggaccuguucguguucuccaccagcuucuaccugaucaccaucuuccuccaccuggucaagaucccgacccaccgccacaucguggggaagcccugccccaagccccaccggcugaaccacaugggcaucugcuccugcgggcuguacaagcagccgggcgugcccguccgcuggaagcggugaggacuagucccuguucccagagcccacuuuuuuuucuuuuuuugaaauaaaauagccugucuuucagaucucaaaggcucuuuucagagccaccaaaaaaaaaaaaaaaaaaaaaaaaaaaaaaaaaaaaaaaaaaaaaaaaaaaaaaaaaaaaaaaaagaauu

SEQ ID NO: 37068 - RNA, 1733 nt, Artificial Sequence; identical to SEQ ID NO: 37062
  mRNA product Design a-2 (hSL-A64-N5) comprising derived and/or modified sequence from LASV(Pinneo-NIG-1969;Clade I)__AIT17836__GPCmut10 (opt1)

SEQ ID NO: 37069 - RNA, 1733 nt, Artificial Sequence
  mRNA product Design a-2 (hSL-A64-N5) comprising derived and/or modified sequence from LASV(ISTH0009-NIG-2011;Clade II)__AIT17404__GPCmut10 (opt1)
aggagaguccgcucagccagguugcagaagcggcuuagcguguguccuaaucuucucucugcguguagguaggccugugccgcaaacaagcuuaccaugggccagaucaucaccuucuuccaggaggugccccacgucaucgaggaggugaugaacaucgugcugaucgcccucagccugcuggccauccucaaggggaucuacaacgucgcgaccugcggccuguucgggcugguguccuuccuccugcugugcggccgcagcugcuccacgaccuacaaggggguguacgagcuccagacccuggagcuggacauggccagccucaacaugugcaugccgcuguccugcacgaagaacaacagccaccacuacaucauggucggcaacgagaccggccuggagcucacccugaccaacacguccaucaucaaccacaaguucugcaaccugagcgacgcccacaagaagaaccucuacgaccacgcccugauguccaucaucagcaccuuccaccuguccauccccaacuucaaccaguacgaggccaugagcugcgacuucaacgggggcaagaucuccgugcaguacaaccucagccacgcguacgccguggacgccgccaaccacugcgggaccaucgcgaacggcguccugcagaccuucaugcggauggccuggggcggguccuacaucgcccuggacagcggcaagggguccugggacugcaucaugacgagcuaccaguaccucaucauccagaacaccaccugggaggaccacugccaguucucccgccccagccccaucggcuaccuggggcugcucagccagcggacccgcgacaucuacaucucccggcgccugcugggcacguucaccuggacccucagcgacuccgagggcaacgagacccccgggggcuacugccugacgcgguggaugcugaucgaggccgagcucaagugcuucgggaacaccgccguggcgaagugcaacgagaagcacgacgaggaguucugcgacaugcugcgccuguucgacuucugcaagcaggccauccggcgccucaagaccgaggcccagaugagcauccagcugaucaacaaggccgugaacgcccugaucaacgaccagcucaucaugaagaaccaccuccgggacaucaugggcaucccguacugcaacuacuccaaguacugguaccugaaccacaccgucacggggaagaccagccugccccgcugcuggcugguguccaacggcagcuaccugaacgagacccacuucuccgacgacaucgagcagcaggcggacaacaugaucaccgagcuccugcagaaggaguacauggaccggcagggcaagacgccccuggggcucguggaccuguucgucuucagcaccuccuucuaccugaucagcaucuuccugcaccucaucaagaucccgacccaccgccacaucaccggcaagcccugccccaagccccaccggcugaaccacauggggaucugcuccugcggccuguacaagcacccgggggugcccgugaaguggaagcgcugaggacuagucccuguucccagagcccacuuuuuuuucuuuuuuugaaauaaaauagccugucuuucagaucucaaaggcucuuuucagagccaccaaaaaaaaaaaaaaaaaaaaaaaaaaaaaaaaaaaaaaaaaaaaaaaaaaaaaaaaaaaaaaaaagaauu

SEQ ID NO: 37070 - RNA, 1733 nt, Artificial Sequence
  mRNA product Design a-2 (hSL-A64-N5) comprising derived and/or modified sequence from LASV(ISTH2010-NIG-2012;Clade II)__AIT17482__GPCmut10 (opt1)
aggagaguccgcucagccagguugcagaagcggcuuagcguguguccuaaucuucucucugcguguagguaggccugugccgcaaacaagcuuaccaugggccagaucaucaccuucuuccaggaggugccccacgucaucgaggaggugaugaacaucgugcugaucgcccucagccugcuggccauccucaaggggaucuacaacgucgcgaccugcggccuguucgggcugguguccuuccuccugcugugcggccgcagcugcuccacgaccuacaaggggguguacgagcuccagacccuggagcuggacauggccagccucaacaugugcaugccgcuguccugcacgaagaacaacagccaccacuacaucauggucggcaacgagaccggccuggagcucacccugaccaacacguccaucaucaaccacaaguucugcaaccugagcgacgcccacaagaagaaccucuacgaccacgcccugauguccaucaucagcaccuuccaccuguccauccccaacuucaaccaguacgaggccaugagcugcgacuucaacgggggcaagaucuccgugcaguacaaccucagccacgcguacgccguggacgccgccaaccacugcgggaccaucgcgaacggcguccugcagaccuucaugcggauggccuggggcggguccuacaucgcccuggacagcggcaagggguccugggacugcaucaugacgagcuaccaguaccucaucauccagaacaucaccugggaggaccacugccaguucucccgccccagccccaucggcuaccuggggcugcucagccagcggacccgcgacaucuacaucucccggcgccugcugggcaccuucacguggacccucagcgacuccgagggcaacgagacccccgggggcuacugccugacccgguggaugcugaucgaggccgagcucaagugcuucgggaacacggccguggcgaagugcaacgagaagcacgacgaggaguucugcgacaugcugcgccuguucgacuucugcaagcaggccauccggcgccucaagaccgaggcccagaugagcauccagcugaucaacaaggccgugaacgcccugaucaacgaccagcucaucaugaagaaccaccuccgggacaucaugggcauccccuacugcaacuacuccaaguacugguaccugaaccacaccgucaccgggaagacgagccugccccgcugcuggcugguguccaacggcagcuaccugaacgagacccacuucuccgacgacaucgagcagcaggcggacaacaugaucaccgagcuccugcagaaggaguacaucgaccggcagggcaagaccccgcuggggcucguggaccuguucgucuucagcacguccuucuaccugaucagcaucuuccugcaccucgugaagaucccgacccaccgccacguggucggcaagcccugccccaagccccaccggcugaaccacauggggaucugcuccugcggccuguacaagcacccgggggugcccgugaaguggaagcgcugaggacuagucccuguucccagagcccacuuuuuuuucuuuuuuugaaauaaaauagccugucuuucagaucucaaaggcucuuuucagagccaccaaaaaaaaaaaaaaaaaaaaaaaaaaaaaaaaaaaaaaaaaaaaaaaaaaaaaaaaaaaaaaaaagaauu

SEQ ID NO: 37071 - RNA, 1733 nt, Artificial Sequence
  mRNA product Design a-2 (hSL-A64-N5) comprising derived and/or modified sequence from LASV(Lassa virus/H.sapiens-wt/NGA/2015/ISTH_0543;Clade II)__AVO03639__GPCmut10 (opt1)
aggagaguccgcucagccagguugcagaagcggcuuagcguguguccuaaucuucucucugcguguagguaggccugugccgcaaacaagcuuaccaugggccagaucaucaccuucuuccaggaggugccccacgucaucgaggaggugaugaacaucgugcugaucgcccucagccugcuggccauccucaaggggaucuacaacgucgcgaccugcggccuguucgggcugguguccuuccuccugcugugcggccgcagcugcuccacgaccuacaaggggguguacgagcuccagacccuggagcuggacauggccaaccucaacaugugcaugccgcugagcugcacgaagaacaacucccaccacuacaucauggucggcaacgagaccggccuggagcucacccugaccaacacgagcaucaucaaccacaaguucugcaaccuguccgacgcccacaagaagaaccucuacgaccacgcccugaugagcaucaucuccaccuuccaccugagcauccccaacuucaaccaguacgaggccauguccugcgacuucaacgggggcaagaucagcgugcaguacaaccucucccacaccuacgcgguggacgccgccaaccacugcgggaccaucgccaacggcguccugcagacguucaugcggauggcguggggcgggagcuacaucgcccuggacuccggcaaggggagcugggacugcaucaugaccuccuaccaguaccucgugauccagaacaccaccugggaggaccacugccaguucagccgccccucccccaucggcuaccuggggcugcucagccagcggacgcgcgacaucuacaucagccggcgccugcugggcaccuucaccuggacccucuccgacagcgagggcaacgagacgcccgggggcuacugccugacccgguggaugcugaucgaggccgagcucaagugcuucgggaacaccgccguggccaagugcaacgagaagcacgacgaggaguucugcgacaugcugcgccuguucgacuucugcaagcaggcgauccggcgccucaagaccgaggcccagauguccauccagcugaucaacaaggccgucaacgcccugaucaacgaccagcucaucaugaagaaccaccuccgggacaucaugggcauccccuacugcaacuacagcaaguacugguaccugaaccacacggugaccgggaagaccucccugccccgcugcuggcuggugagcaacggcuccuaccugaacgagacccacuucagcgacgacaucgagcagcaggccgacaacaugaucacggagcuccugcagaaggaguacaucgaccggcagggcaagaccccgcuggggcucgucgaccuguucguguucuccaccagcuucuaccugaucuccaucuuccugcaccucgugaagaucccgacccaccgccacaucacgggcaagcccugccccaagccccaccggcugaaccacauggggaucugcagcugcggccuguacaagcacccggggguccccgugaaguggaagcgcugaggacuagucccuguucccagagcccacuuuuuuuucuuuuuuugaaauaaaauagccugucuuucagaucucaaaggcucuuuucagagccaccaaaaaaaaaaaaaaaaaaaaaaaaaaaaaaaaaaaaaaaaaaaaaaaaaaaaaaaaaaaaaaaaagaauu

SEQ ID NO: 37072 - RNA, 1733 nt, Artificial Sequence
  mRNA product Design a-2 (hSL-A64-N5) comprising derived and/or modified sequence from LASV(Lassa virus/H.sapiens-wt/NGA/2016/ISTH_0009;Clade II)__AVO03571__GPCmut10 (opt1)
aggagaguccgcucagccagguugcagaagcggcuuagcguguguccuaaucuucucucugcguguagguaggccugugccgcaaacaagcuuaccaugggccagaucaucaccuucuuccaggaggugccccacgucaucgaggaggugaugaacaucgugcugaucgcccucagccugcuggccauccucaaggggaucuacaacgucgcgaccugcggccugcuggggcucguguccuuccugcugcucugcggccgcagcugcuccacgaccuacaaggggguguacgagcugcagacccuggagcucgacauggccagccugaacaugugcaugccgcuguccugcacgaagaacaacagccaccacuacaucauggucggcaacgagaccggccucgagcugacccugaccaacacguccaucaucaaccacaaguucugcaaccucagcgacgcccacaagaagaaccuguacgaccacgcccugauguccaucaucagcaccuuccaccucuccauccccaacuucaaccaguacgaggccaugagcugcgacuucaacgggggccggaucuccgugcaguacaaccugagccacuccuacgcgguggacgccgccaaccacugcgggaccaucgccaacggcguccugcagaccuucaugcgcauggcguggggcgggagcuacaucgcccucgacuccggcaaggggagcugggacugcaucaugacguccuaccaguaccugaucauccagaacaccaccugggaggaccacugccaguucagccggcccagccccaucggcuaccuggggcuccugucccagcgcacccgggacaucuacaucagccgccggcugcucggcacguucaccuggacccuguccgacagcgagggcaacgagacccccgggggcuacugccugacgcgcuggaugcucaucgaggccgagcugaagugcuucgggaacaccgccguggccaagugcaacgagaagcacgacgaggaguucugcgacaugcugcggcuguucgacuucugcaagcaggcgauccgccggcugaagaccgaggcccagauguccauccagcugaucaacaaggccgugaacgcccucaucaacgaccagcugaucaugaagaaccaccuccgcgacaucaugggcaucccguacugcaacuacagcaaguacugguaccucaaccacaccgucacggggaagaccucccugccccggugcuggcuggugagcaacggcuccuaccucaacgagacccacuucagcgacgacaucgagcagcaggccgacaacaugaucaccgagcugcugcagaaggaguacaucgaccgccagggcaagacgccccucgggcugguggaccuguucgucuucuccaccagcuucuaccugaucuccaucuuccuccaccuggugaagaucccgacccaccggcacaucaccggcaagcccugccccaagccccaccgccugaaccacauggggaucugcagcugcggccucuacaaccacccgggggugcccgucaaguggaagcggugaggacuagucccuguucccagagcccacuuuuuuuucuuuuuuugaaauaaaauagccugucuuucagaucucaaaggcucuuuucagagccaccaaaaaaaaaaaaaaaaaaaaaaaaaaaaaaaaaaaaaaaaaaaaaaaaaaaaaaaaaaaaaaaaagaauu

SEQ ID NO: 37073 - RNA, 1733 nt, Artificial Sequence
  mRNA product Design a-2 (hSL-A64-N5) comprising derived and/or modified sequence from LASV(Lassa virus/H.sapiens-wt/NGA/2016/ISTH_0017;Clade II)__AVO03567__GPCmut10 (opt1)
aggagaguccgcucagccagguugcagaagcggcuuagcguguguccuaaucuucucucugcguguagguaggccugugccgcaaacaagcuuaccaugggccagaucaucaccuucuuccaggaggugccccacgucaucgaggaggugaugaacaucgugcugaucgcccucagccugcuggccauccucaaggggaucuacaacgucgcgaccugcggccuguucgggcugguguccuuccuccugcugugcggccgcagcugcuccacgaccuacaaggggguguacgagcuccagacccuggagcuggacauggccagccucaacaugugcaugccgcuguccugcacgaagaacaacagccaccacuacaucauggucggcaacgagaccggccuggagcucacccugaccaacacguccaucaucaaccacaaguucugcaaccugagcgacgcccacaagaagaaccucuacgaccacgcccugauguccaucaucagcaccuuccaccuguccauccccaacuucaaccaguacgaggccaugagcugcgacuucaacgggggcaagaucuccgugcaguacaaccucagccacaccuacgcgaucgacgccgccaaccacugcgggaccaucgccaacggcgugcugcagacguucaugcggauggcguggggcggguccuacaucgcccuggacagcggcaagggguccugggacugcaucaugaccagcuaccaguaccucaucauccagaacaccaccugggaggaccacugccaguucucccgccccagccccaucggcuaccuggggcugcucagccagcggacgcgcgacaucuacaucucccggcgccugcugggcaccuucaccuggacccucagcgacuccgagggcaacgagacgcccgggggcuacugccugacccgguggaugcugaucgaggccgagcucaagugcuucgggaacaccgccgucgccaagugcaacgagaagcacgacgaggaguucugcgacaugcugcgccuguucgacuucugcaagcaggcgauccggcgccucaagaccgaggcccagaugagcauccagcugaucaacaaggccgugaacgcccugaucaacgaccagcucaucaugaagaaccaccuccgggacaucaugggcauccccuacugcaacuacuccaaguacugguaccugaaccacacggugaccgggaagaccagccugccccgcugcuggcuggucuccaacggcagcuaccugaacgagacccacuucuccgacgacaucgagcagcaggccgacaacaugaucacggagcuccugcagaaggaguacauggaccggcagggcaagaccccgcuggggcucguggaccuguucguguucagcaccuccuucuaccugaucagcaucuuccugcaccucguccgcaucccgacccaccggcacgugaucggcaagcccugccccaagccccaccgccugaaccacauggggaucugcuccugcggccuguacaagcacccgggggugcccgucaaguggaagcggugaggacuagucccuguucccagagcccacuuuuuuuucuuuuuuugaaauaaaauagccugucuuucagaucucaaaggcucuuuucagagccaccaaaaaaaaaaaaaaaaaaaaaaaaaaaaaaaaaaaaaaaaaaaaaaaaaaaaaaaaaaaaaaaaagaauu

SEQ ID NO: 37074 - RNA, 1733 nt, Artificial Sequence
  mRNA product Design a-2 (hSL-A64-N5) comprising derived and/or modified sequence from LASV(Lassa virus/H.sapiens-wt/NGA/2018/ISTH_0959;Clade II)__AVV65099__GPCmut10 (opt1)
aggagaguccgcucagccagguugcagaagcggcuuagcguguguccuaaucuucucucugcguguagguaggccugugccgcaaacaagcuuaccaugggccagaucaucaccuucuuccaggaggugccccacgucaucgaggaggugaugaacaucgugcugaucgcccucagccugcuggccauccucaaggggaucuacaacgucgugaccugcggccuguucgggcugguguccuuccuccugcugugcggccgcagcugcuccacgaccuacaagggggucuacgagcuccagacccuggagcuggacauggcgagccucaacaugugcaugccgcuguccugcacgaagaacaacagccaccacuacaucauggugggcaacgagaccggccuggagcucacccugaccaacacguccaucaucaaccacaaguucugcaaccugagcgacgcccacaagaagaaccucuacgaccacgcccugauguccaucaucagcaccuuccaccuguccauccccaacuucaaccaguacgaggccaugagcugcgacuucaacgggggcaagaucuccgugcaguacaaccucagccacgccuacgcgaucgacgccgccaaccacugcgggaccaucgccaacggcguccugcagaccuucaugcggauggcguggggcggguccuacaucgcccuggacagcggcaagggguccugggacugcaucaugacgagcuaccaguaccucaucauccagaacaccaccugggaggaccacugccaguucucccgccccagccccaucggcuaccuggggcugcucagccagcggacccgcgacaucuacaucucccggcgccugcugggcacguucaccuggacccucagcgacuccgagggcaacgagacccccgggggcuacugccugacgcgguggaugcugaucgaggccgagcucaagugcuucgggaacaccgccguggccaagugcaacgagaagcacgacgaggaguucugcgacaugcugcgccuguucgacuucugcaagcaggcgauccggcgccucaagaccgaggcccagaugagcauccagcugaucaacaaggccgugaacgcccugaucaacgaccagcucaucaugaagaaccaccuccgggacaucaugggcaucccguacugcaacuacuccaaguacugguaccugaaccacaccgucacggggaagaccagccugccccgcugcuggcugguguccaacggcagcuaccugaacgagacccacuucuccgacgacaucgagcagcaggccgacaacaugaucaccgagcuccugcagaaggaguacaucgaccggcagggcaagacgccccuggggcucguggaccuguucgucuucagcaccuccuucuaccugaucagcaucuuccugcaccucgugaagaucccgacccaccgccacgugaucggcaagcccugccccaagccccaccggcugaaccacauggggaucugcuccugcggccuguacaagcacccggggguccccgugaaguggaagcgcugaggacuagucccuguucccagagcccacuuuuuuuucuuuuuuugaaauaaaauagccugucuuucagaucucaaaggcucuuuucagagccaccaaaaaaaaaaaaaaaaaaaaaaaaaaaaaaaaaaaaaaaaaaaaaaaaaaaaaaaaaaaaaaaaagaauu

SEQ ID NO: 37075 - RNA, 1733 nt, Artificial Sequence
  mRNA product Design a-2 (hSL-A64-N5) comprising derived and/or modified sequence from LASV(LASV003-NIG-2008;Clade II)__AIT17580__GPCmut10 (opt1)
aggagaguccgcucagccagguugcagaagcggcuuagcguguguccuaaucuucucucugcguguagguaggccugugccgcaaacaagcuuaccaugggccagaucaucaccuucuuccaggaggugccccacgucaucgaggaggugaugaacaucgugcugaucgcccucagccugcuggccauccucaaggggaucuacaacgucgcgaccugcggccuguucgggcugguguccuuccuccugcugugcggccgcagcugcuccacgaccuacaaggggguguacgagcuccagacccuggagcuggacauggccagccucaacaugugcaugccgcuguccugcacgaagaacaacagccaccacuacaucauggucggcaacgagaccggccuggagcucacccugaccaacacguccaucaucaaccacaaguucugcaaccugagcgacgcccacaagaagaaccucuacgaccacgcccugauguccaucaucagcaccuuccaccuguccauccccaacuucaaccaguacgaggccaugagcugcgacuucaacgggggcaagaucuccgugcaguacaaccucagccacaccuacgcgguggacgccgccaaccacugcgggaccaucgccaacggcguccugcagacguucaugcggauggcguggggcggguccuacaucgcccuggacagcggcaagggguccugggacugcaucaugaccagcuaccaguaccucaucauccagaacaccaccugggaggaccacugccaguucucccgccccagccccaucggcuaccuggggcugcucagccagcggacgcgcgacaucuacaucucccggcgccugcugggcaccuucaccuggacccucagcgacuccgagagcaacgagacgccgggcggguacugccugacccgguggaugcugaucgaggccgagcucaagugcuucggcaacaccgccguggccaagugcaacgagaagcacgacgaggaguucugcgacaugcugcgccuguucgacuucugcaagcaggcgauccggcgccucaaggccgaggcccagauguccauccagcugaucaacaaggccgugaacgcccugaucaacgaccagcucaucaugaagaaccaccuccgggacaucauggggauccccuacugcaacuacagcaaguacugguaccugaaccacaccgucacgggccgcaccucccugccccggugcuggcuggugagcaacggguccuaccugaacgagacccacuucagcgacgacaucgagcagcaggcggacaacaugaucaccgagcuccugcagaaggaguacauggaccgccagggcaagacgccccugggccucguggaccuguucgucuucuccaccagcuucuaccugaucuccaucuuccugcaccucgugaagaucccgacccaccggcacgugaucgggaagcccugccccaagccccaccgccugaaccacaugggcaucugcagcugcgggcuguacaagcacccgggcguccccgugaaguggaagcggugaggacuagucccuguucccagagcccacuuuuuuuucuuuuuuugaaauaaaauagccugucuuucagaucucaaaggcucuuuucagagccaccaaaaaaaaaaaaaaaaaaaaaaaaaaaaaaaaaaaaaaaaaaaaaaaaaaaaaaaaaaaaaaaaagaauu

SEQ ID NO: 37076 - RNA, 1733 nt, Artificial Sequence
  mRNA product Design a-2 (hSL-A64-N5) comprising derived and/or modified sequence from LASV(LASV035-NIG-2009;Clade II)__AIT17588__GPCmut10 (opt1)
aggagaguccgcucagccagguugcagaagcggcuuagcguguguccuaaucuucucucugcguguagguaggccugugccgcaaacaagcuuaccaugggccagaucaucaccuucuuccaggaggugccccacgucaucgaggaggugaugaacaucgugcugaucgcccucagccugcuggccauccucaaggggaucuacaacgucgcgaccugcggccuguucgggcugguguccuuccuccugcugugcggccgcagcugcuccacgaccuacaaggggguguacgagcuccagacccuggagcuggacauggccagccucaacaugugcaugccgcuguccugcacgaagaacaacagccaccacuacaucauggucggcaacgagaccggccuggagcucacccugaccaacacguccaucaucaaccacaaguucugcaaccugagcgacgcccacaagaagaaccucuacgaccacgcccugauguccaucaucagcaccuuccaccuguccauccccaacuucaaccaguacgaggccaugagcugcgacuucaacgggggcaagaucuccgugcaguacaaccucagccacgcguacgccguggacgccgccaaccacugcgggaccaucgcgaacggcguccugcagaccuucaugcggauggccuggggcggguccuacaucgcccuggacagcggcaagggguccugggacugcaucaugacgagcuaccaguaccucaucauccagaacaccaccugggaggaccacugccaguucucccgccccagccccaucggcuaccuggggcugcucagccagcggacccgcgacaucuacaucucccggcgccugcugggcacguucaccuggacccucagcgacuccgagggcaacgagacccccgggggcuacugccugacgcgguggaugcugaucgaggccgagcucaagugcuucgggaacaccgccguggcgaagugcaacgagaagcacgacgaggaguucugcgacaugcugcgccuguucgacuucugcaagcaggccauccggcgccucaaggccgaggcccagaugagcauccagcugaucaacaaggccgugaacgcgcugaucaacgaccagcucaucaugaagaaccaccuccgggacaucaugggcauccccuacugcaacuacuccaaguacugguaccugaaccacaccgucaccgggaagacgagccugccccgcugcuggcugguguccaacggcagcuaccugaacgagacccacuucuccgacgacaucgagcagcaggccgacaacaugaucaccgagcuccugcagaaggaguacaucgaccggcagggcaagaccccgcuggggcucguggaccuguucgucuucagcacguccuucuaccugaucagcaucuuccugcaccucgugaagaucccgacccaccgccacgugaucggcaagcccugccccaagccccaccggcugaaccacauggggaucugcuccugcggccuguacaagcacccggggguccccgugaaguggaagcgcugaggacuagucccuguucccagagcccacuuuuuuuucuuuuuuugaaauaaaauagccugucuuucagaucucaaaggcucuuuucagagccaccaaaaaaaaaaaaaaaaaaaaaaaaaaaaaaaaaaaaaaaaaaaaaaaaaaaaaaaaaaaaaaaaagaauu

SEQ ID NO: 37077 - RNA, 1733 nt, Artificial Sequence
  mRNA product Design a-2 (hSL-A64-N5) comprising derived and/or modified sequence from LASV(LASV1000-NIG-2009;Clade II)__AIT17782__GPCmut10 (opt1)
aggagaguccgcucagccagguugcagaagcggcuuagcguguguccuaaucuucucucugcguguagguaggccugugccgcaaacaagcuuaccaugggccagaucaucaccuucuuccaggaggugccccacgucaucgaggaggugaugaacaucgugcugaucgcccucagccugcuggccauccucaaggggaucuacaacgucgcgaccugcggccuguucgggcugguguccuuccuccugcugugcggccgcagcugcuccacgaccuacaaggggguguacgagcuccagacccuggagcuggacauggccagccucaacaugugcaugccgcuguccugcacgaagaacaacagccaccacuacaucauggucggcaacgagaccggccuggagcucacccugaccaacacguccaucaucaaccacaaguucugcaaccugagcgacgcccacaagaagaaccucuacgaccacgcccugauguccaucaucagcaccuuccaccuguccauccccaacuucaaccaguacgaggccaugagcugcgacuucaacgggggcaagaucuccgugcaguacaaccucagccacaccuacgcgguggacgccgccaaccacugcgggaccaucgccaacggcguccugcagacguucaugcggauggcguggggcggguccuacaucgcccuggacagcggcaagggguccugggacugcaucaugaccagcuaccaguaccucaucauccagaacaccaccugggaggaccacugccaguucucccgccccagccccaucggcuaccuggggcugcucagccagcggacgcgcgacaucuacaucucccggcgccugcugggcaccuucaccuggacccucagcgacuccgagggcaacgagacgcccgggggcuacugccugacccgguggaugcugaucgaggccgagcucaagugcuucgggaacaccgccguggccaagugcaacgagaagcacgacgaggaguucugcgacaugcugcgccuguucgacuucugcaagcaggcgaucaagcggcucaagaccgaggcccagaugagcauccagcugaucaacaaggccgugaacgcccugaucaacgaccagcucaucaugaagaaccaccuccgcgacaucaugggcauccccuacugcaacuacuccaaguacugguaccugaaccacacggucaccgggaagaccagccugccccggugcuggcugguguccaacggcagcuaccugaacgagacccacuucuccgacgacaucgagcagcaggccgacaacaugaucacggagcuccugcagaaggaguacaucgaccgccagggcaagaccccgcuggggcucguggaccuguucgucuucagcaccuccuucuaccugaucagcaucuuccugcaccucgugaagaucccgacccaccggcacguggucggcaagcccugccccaagccccaccgccugaaccacauggggaucugcuccugcggccuguacaagcacccgggggugcccgugaaguggaagcggugaggacuagucccuguucccagagcccacuuuuuuuucuuuuuuugaaauaaaauagccugucuuucagaucucaaaggcucuuuucagagccaccaaaaaaaaaaaaaaaaaaaaaaaaaaaaaaaaaaaaaaaaaaaaaaaaaaaaaaaaaaaaaaaaagaauu

SEQ ID NO: 37078 - RNA, 1733 nt, Artificial Sequence
  mRNA product Design a-2 (hSL-A64-N5) comprising derived and/or modified sequence from LASV(LASV221-NIG-2010;Clade II)__AIT17624__GPCmut10 (opt1)
aggagaguccgcucagccagguugcagaagcggcuuagcguguguccuaaucuucucucugcguguagguaggccugugccgcaaacaagcuuaccaugggccagaucaucaccuucuuccaggaggugccccacgucaucgaggaggugaugaacaucgugcugaucgcccucagccugcuggccauccucaaggggaucuacaacgucgcgaccugcggccuguucgggcugguguccuuccuccugcugugcggccgcagcugcuccacgaccuacaaggggguguacgagcuccagacccuggagcuggacauggccagccucaacaugugcaugccgcuguccugcacgaagaacaacagccaccacuacaucauggucggcaacgagaccggccuggagcucacccugaccaacacguccaucaucaaccacaaguucugcaaccugagcgacgcccacaagaagaaccucuacgaccacgcccugauguccaucaucagcaccuuccaccuguccauccccaacuucaaccaguacgaggccaugagcugcgacuucaacgggggcaagaucuccgugcaguacaaccucagccacaccuacgcgaucgacgccgccaaccacugcgggaccaucgccaacggcgugcugcagacguucaugcggauggcguggggcggguccuacaucgcccuggacagcggcaagggguccugggacugcaucaugaccagcuaccaguaccucaucauccagaacaccaccugggaggaccacugccaguucucccgccccagccccaucggcuaccuggggcugcucagccagcggacgcgcgacaucuacaucucccggcgccugcugggcaccuucaccuggacccucagcgacuccgagggcaacgagacgcccgggggcuacugccugacccgguggaugcugaucgaggccgagcucaagugcuucgggaacaccgccgucgccaagugcaacgagaagcacgacgaggaguucugcgacaugcugcgccuguucgacuucugcaagcaggcgauccggcgccucaagaccgaggcccagaugagcauccagcugaucaacaaggccgugaacgcccugaucaacgaccagcucaucaugaagaaccaccuccgggacaucaugggcauccccuacugcaacuacuccaaguacugguaccugaaccacacggugaccgggaagaccagccugccccgcugcuggcuggucuccaacggcagcuaccugaacgagacccacuucuccgacgacaucgagcagcaggccgacaacaugaucacggagaugcuccagaaggaguacauggaccggcagggcaagaccccgcuggggcugguggaccucuucguguucagcaccuccuucuaccugaucagcaucuuccugcaccuggucaagaucccgacccaccgccacgugaucggcaagcccugccccaagccccaccggcucaaccacauggggaucugcuccugcggccuguacaagcacccgggggugcccgucaaguggaagcgcugaggacuagucccuguucccagagcccacuuuuuuuucuuuuuuugaaauaaaauagccugucuuucagaucucaaaggcucuuuucagagccaccaaaaaaaaaaaaaaaaaaaaaaaaaaaaaaaaaaaaaaaaaaaaaaaaaaaaaaaaaaaaaaaaagaauu

SEQ ID NO: 37079 - RNA, 1733 nt, Artificial Sequence
  mRNA product Design a-2 (hSL-A64-N5) comprising derived and/or modified sequence from LASV(LASV237-NIG-2010;Clade II)__AIT17638__GPCmut10 (opt1)
aggagaguccgcucagccagguugcagaagcggcuuagcguguguccuaaucuucucucugcguguagguaggccugugccgcaaacaagcuuaccaugggccagaucaucaccuucuuccaggaggugccccacgucaucgaggaggugaugaacaucgugcugaucgcccucagccugcuggccauccucaaggggaucuacaacgucgcgaccugcggccuguucgggcugguguccuuccuccugcugugcggccgcagcugcuccacgaccuacaaggggguguacgagcuccagacccuggagcuggacauggccagccucaacaugugcaugccgcuguccugcacgaagaacaacagccaccacuacaucauggucggcaacgagaccggccuggagcucacccugaccaacacguccaucaucaaccacaaguucugcaaccugagcgacgcccacaagaaggaccucuacgaccacgcccugauguccaucaucagcaccuuccaccuguccauccccaacuucaaccaguacgaggccaugagcugcgacuucaacgggggcaagaucuccgugcaguacaaccucagccacaccuacgcgguggacgccgccaaccacugcgggaccaucgccaacggcguccugcagacguucaugcggauggcguggggcggguccuacaucgcccuggacagcggcaagggguccugggacugcaucaugaccagcuaccaguaccucaucauccagaacaccaccugggaggaccacugccaguucucccgccccagccccaucggcuaccuggggcugcucagccagcggacgcgcgacaucuacaucucccggcgccugcugggcaccuucaccuggacccucagcgacuccgagggcaacgagacgcccgggggcuacugccugacccgguggaugcugaucgaggccgagcucaagugcuucgggaacaccgccguggccaagugcaacgagaagcacgacgaggaguucugcgacaugcugcgccuguucgacuucugcaagcaggcgauccggcgccucaagaccgaggcccagaugagcauccagcugaucaacaaggccgugaacgcccugaucaacgaccagcucaucaugaagaaccaccuccgggacaucaugggcauccccuacugcaacuacuccaaguacugguaccugaaccacacggucaccgggaagaccagccugccccgcugcuggcugguguccaacggcagcuaccugaacgagacccacuucuccgacgacaucgagcagcaggccgacaacaugaucacggagcuccugcagaaggaguacauggaccggcagggcaagaccccgcuggggcucguggaccuguucgucuucagcaccuccuucuaccugaucagcaucuuccugcaccucaucaagaucccgacccaccgccacaucacgggcaagcccugccccaagccccaccggcugaaccacauggggaucugcuccugcggccuguacaagcacccgggggugcccgugaaguggaagcgcugaggacuagucccuguucccagagcccacuuuuuuuucuuuuuuugaaauaaaauagccugucuuucagaucucaaaggcucuuuucagagccaccaaaaaaaaaaaaaaaaaaaaaaaaaaaaaaaaaaaaaaaaaaaaaaaaaaaaaaaaaaaaaaaaagaauu

SEQ ID NO: 37080 - RNA, 1733 nt, Artificial Sequence
  mRNA product Design a-2 (hSL-A64-N5) comprising derived and/or modified sequence from LASV(LASV253-NIG-2011;Clade II)__AIT17670__GPCmut10 (opt1)
aggagaguccgcucagccagguugcagaagcggcuuagcguguguccuaaucuucucucugcguguagguaggccugugccgcaaacaagcuuaccaugggccagaucaucaccuucuuccaggaggugccccacgucaucgaggaggugaugaacaucgugcugaucgcccucagccugcuggccauccucaaggggaucuacaacgucgcgaccugcggccuguucgggcugguguccuuccuccugcugugcggccgcagcugcuccacgaccuacaaggggguguacgagcuccagacccuggagcuggacauggccagccucaacaugugcaugccgcuguccugcacgaagaacaacagccaccacuacaucauggucggcaacgagaccggccuggagcucacccugaccaacacguccaucaucaaccacaaguucugcaaccugagcgacgcccacaagaagaaccucuacgaccacgcccugauguccaucaucagcaccuuccaccuguccauccccaacuucaaccaguacgaggccaugagcugcgacuucaacgggggcaagaucuccgugcaguacaaccucagccacaccuacgcgguggacgccgccaaccacugcgggaccaucgccaacggcguccugcagacguucaugcggauggcguggggcggguccuacaucgcccuggacagcggcaagggguccugggacugcaucaugaccagcuaccaguaccucaucauccagaacaccaccugggaggaccacugccaguucucccgccccagccccaucggcuaccuggggcugcucagccagcggacgcgcgacaucuacaucucccggcgccugcugggcaccuucaccuggacccucagcgacuccgagggcaacgagacgcccgggggcuacugccugacccgguggaugcugaucgaggccgagcucaagugcuucgggaacaccgccguggccaagugcaacgagaagcacgacgaggaguucugcgacaugcugcgccuguucgacuucugcaagcaggcgauccggcgccucaaggccgaggcccagaugagcauccagcugaucaacaaggccgugaacgcccugaucaacgaccagcucaucaugaagaaccaccuccgggacaucaugggcaucccguacugcaacuacuccaaguacugguaccugaaccacaccgucacggggcgcaccagccugccccggugcuggcugguguccaacggcagcuaccugaacgagacccacuucuccgacgacaucgagcagcaggcggacaacaugaucaccgagcuccugcagaaggaguacaucgaccgccagggcaagacgccccuggggcucguggaccuguucgucuucagcaccuccuucuaccugaucagcaucuuccugcaccucgugaagaucccgacccaccggcacaucaucggcaagcccugccccaagccccaccgccugaaccacauggggaucugcuccugcggccuguacaagcacccgggggugcccgucaaguggaagcggugaggacuagucccuguucccagagcccacuuuuuuuucuuuuuuugaaauaaaauagccugucuuucagaucucaaaggcucuuuucagagccaccaaaaaaaaaaaaaaaaaaaaaaaaaaaaaaaaaaaaaaaaaaaaaaaaaaaaaaaaaaaaaaaaagaauu

SEQ ID NO: 37081 - RNA, 1733 nt, Artificial Sequence
  mRNA product Design a-2 (hSL-A64-N5) comprising derived and/or modified sequence from LASV(LASV254-NIG-2011;Clade II)__AIT17674__GPCmut10 (opt1)
aggagaguccgcucagccagguugcagaagcggcuuagcguguguccuaaucuucucucugcguguagguaggccugugccgcaaacaagcuuaccaugggccagaucaucaccuucuuccaggaggugccccacgucaucgaggaggugaugaacaucgugcugaucgcccucagccugcuggccauccucaaggggaucuacaacgucgcgaccugcggccuguucgggcugguguccuuccuccugcugugcggccgcagcugcuccacgaccuacaaggggguguacgagcuccagacccuggagcuggacaugaccaaccucaacaugugcaugccgcugagcugcaccaagaacaacucccaccacuacaucauggucggcaacgagaccggccuggagcucacccugacgaacaccagcaucaucaaccacaaguucugcaaccuguccgacgcccacaagaagaaccucuacaaccacgcccugaugagcaucaucuccaccuuccaccugagcauccccaacuucaaccaguacgaggccauguccugcgacuucaacgggggcaagaucagcgugcaguacaaccucucccacagcuacgccguggacgcggccaaccacugcgggaccaucgccaacggcguccugcagacguucaugcggauggccuggggcggguccuacaucgcgcuggacagcggcaaggggaacugggacugcaucaugaccuccuaccaguaccucaucauccagaacaccaccugggaggaccacugccaguucagccgccccucccccaucggcuaccuggggcugcucagccagcggacgcgcgacaucuacaucagccggcgccugcugggcaccuucaccuggacccucuccgacagcgagggcaacgagacgcccgggggcuacugccugacccgguggaugcugaucgaggccgagcucaagugcuucgggaacaccgccguggccaagugcaacgagaagcacgacgaggaguucugcgacaugcugcgccuguucgacuucugcaagcaggccauccggcgccucaagaccgaggcgcaggccaacauccagcugaucaacaaggccgugaacgcccugaucaacgaccagcucaucaugaagaaccaccuccgggacaucaugggcauccccuacugcaacuacuccaaguacugguaccugaaccacacggucaccgggaagaccagccugccccgcugcuggcugguguccaacggcagcuaccugaacgagacccacuucuccgacgacaucgagcagcaggccgacaacaugaucacggagcuccugcagaaggaguacauggaccggcagggcaagaccccgcuggggcucguggaccuguucgucuucagcaccuccuucuaccugaucagcaucuuccugcaccucgugaagaucccgacccaccgccacgugaucggcaagcccugccccaagccccaccggcugaaccacauggggaucugcuccugcggccuguacaagcacccggggguccccgugaaguggaagcgcugaggacuagucccuguucccagagcccacuuuuuuuucuuuuuuugaaauaaaauagccugucuuucagaucucaaaggcucuuuucagagccaccaaaaaaaaaaaaaaaaaaaaaaaaaaaaaaaaaaaaaaaaaaaaaaaaaaaaaaaaaaaaaaaaagaauu

SEQ ID NO: 37082 - RNA, 1733 nt, Artificial Sequence
  mRNA product Design a-2 (hSL-A64-N5) comprising derived and/or modified sequence from LASV(Nig08-A19;Clade III)__ADU56618__GPCmut10 (opt1)
aggagaguccgcucagccagguugcagaagcggcuuagcguguguccuaaucuucucucugcguguagguaggccugugccgcaaacaagcuuaccaugggccagaucgugaccuucuuccaggaggucccccacgugaucgaggaggugaugaacaucguccugaucgcccucagcauccuggccauccugaaggggcucuacaacaucgcgaccugcggccugaucgggcuggugacguuccuccugcuguccggccgcagcugcuccaugaccuacaaggggguguacgagcuccagacccuggagcugaacaugaacacccucaacaugugcaugccgcugagcugcaccaagaacaacucccaccacuacaucauggucggcaacgagaccggccuggagcucacccugacgaacaccagccugcuccaccacaaguucugcaaccuguccgacgcccacaagaagaaccuguacgaccacacccucaugagcaucaucuccaccuuccaccugagcauccccaacuucaaccaguacgaggccauguccugcgacuucaacgggggcaagaucacggugcaguacaaccugagccacuccuacgccaucgacgccgcgaaccacugcgggaccguggccaacggcguccuccagaccuucaugcggauggccuggggcgggagcuacaucgcccuggacuccggccgcgggaagugggacugcaucaugaccagcuaccaguaccugaucauccagaacacgaccugggaggaccacugccaguucucccggcccagccccaucggcuaccucgggcugcugucccagcgcacccgggacaucuacaucagccgccggcuccugggcaccuucacguggacccugagcgacuccgagggcaacgagacccccgggggcuacugccucacccgcuggaugcugaucgaggcggagcugaagugcuucgggaacacggccguggccaagugcaacgagaagcacgacgaggaguucugcgacaugcuccggcuguucgacuucugcaagcaggccauccgccggcugaaggccgaggcgcagaugagcauccagcucaucaacaaggccgugaacgcccugaucaacgaccagcugaucaugaagaaccaccuccgcgacaucaugggcauccccuacugcaacuacuccaaguacugguaccugaaccacaccagcaccgggcggaccucccugccccgcugcuggcucgucagcaacggcuccuaccugaacgagacgcacuucagcgacgacaucgagcagcaggccgacaacaugaucaccgagaugcugcagaaggaguaccucgaccggcagggcaagaccccgcuggggcugguggaccuguucguguucuccaccagcuucuaccucaucuccaucuuccugcaccuggucaagaucccgacgcaccgccacaucgugggcaagcccugccccaagccccaccggcucaaccacauggggaucugcagcugcggccuguacaagcagccgggggugcccguccgcuggaagcggugaggacuagucccuguucccagagcccacuuuuuuuucuuuuuuugaaauaaaauagccugucuuucagaucucaaaggcucuuuucagagccaccaaaaaaaaaaaaaaaaaaaaaaaaaaaaaaaaaaaaaaaaaaaaaaaaaaaaaaaaaaaaaaaaagaauu

SEQ ID NO: 37083 - RNA, 1736 nt, Artificial Sequence
  mRNA product Design a-2 (hSL-A64-N5) comprising derived and/or modified sequence from LASV(G1180-SLE-2010;Clade IV)__AIT17168__GPCmut10 (opt1)
aggagaguccgcucagccagguugcagaagcggcuuagcguguguccuaaucuucucucugcguguagguaggccugugccgcaaacaagcuuaccaugggccagaucgugaccuucuuccaggaggucccccacgugaucgaggaggugaugaacaucguccugaucgcccucagcauccuggccgugcugaaggggcucuacaacuucgcgaccugcggccugguggggcugcucaccuuccugcugcucugcggccgcuccugcaccgccagccgguacaagggggucuacgagcugcagacccuggagcucaacauggagacccugaacaugugcaugccgcuguccugcaccaagaacaacagccaccacuacaucauggugggcaacgagaccggccucgagcugacccugacgaacaccuccaucaucaaccacaaguucugcaaccucagcgacgcccacaagaagaaccuguacgaccacgcccugauguccaucaucagcaccuuccaccucuccauccccaacuucaaccaguacgaggccaugagcugcgacuucaacgggggcaagaucuccgugcaguacaaccugagccacuccuacgcgggggacgccgccaaccacugcggcaccgucgccaacggggugcugcagacguucaugcgcauggcguggggcggcagcuacaucgcccucgacuccgggcacggcagcugggacugcaucaugaccuccuaccaguaccugaucauccagaacaccaccugggaggaccacugccaguucagccggcccucccccaucggguaccugggccuccugagccagcgcacgcgggacaucuacaucagccgccggcugcucggcaccuucaccuggacccuguccgacagcgaggggaaggacacgccgggcggguacugccugacccgcuggaugcucaucgaggccgagcugaagugcuucggcaacaccgccguggccaagugcaacgagaagcacgacgaggaguucugcgacaugcugcggcuguucgacuucugcaagcaggcgauccagcgccugaaggccgaggcccagauguccauccagcugaucaacaaggccgucaacgcccucaucaacgaccagcugaucaugaagaaccaccuccgggacaucauggggauccccuacugcaacuacagcaaguacugguaccucaaccacaccacgaccggcaagaccucccugcccaagugcuggcuggugagcaacggcuccuaccucaacgagacccacuucagcgacgacaucgagcagcaggcggacaacaugaucacggagaugcugcagaaggaguacauggagcgccaggggaagacgccccugggccucguggaccuguucgucuucuccaccagcuucuaccugaucuccaucuuccugcaccucgugaagaucccgacccaccggcacaucgugggcaagagcugccccaagccccaccgccugaaccacauggggaucugcuccugcgggcuguacaagcagcccggcgucccggugaaguggaagcggugaggacuagucccuguucccagagcccacuuuuuuuucuuuuuuugaaauaaaauagccugucuuucagaucucaaaggcucuuuucagagccaccaaaaaaaaaaaaaaaaaaaaaaaaaaaaaaaaaaaaaaaaaaaaaaaaaaaaaaaaaaaaaaaaagaauu

SEQ ID NO: 37084 - RNA, 1736 nt, Artificial Sequence
  mRNA product Design a-2 (hSL-A64-N5) comprising derived and/or modified sequence from LASV(G1442-SLE-2011;Clade IV)__AIT17180__GPCmut10 (opt1)
aggagaguccgcucagccagguugcagaagcggcuuagcguguguccuaaucuucucucugcguguagguaggccugugccgcaaacaagcuuaccaugggccagaucgugaccuucuuccaggaggucccccacgugaucgaggaggugaugaacaucguccugaucgcccucagcauccuggccgugcugaaggggcucuacaacguggcgaccugcggccugaucgggcuggucacguuccuccugcugugcggccgcuccugcaccaccacccucuacaaggggguguacgagcugcagacgcuggagcucaacauggagacccugaacaugugcaugccgcugagcugcaccaagaacaacucccaccacuacauccgggugggcaacgagacgggccucgagcugacccugaccaacaccagcaucaucaaccacaaguucugcaaccucuccgacgcccacaagaagaaccuguacgaccacgcccugaugagcaucaucuccacguuccaccucagcauccccaacuucaaccaguacgaggccauguccugcgacuucaacgggggcaagaucagcguccaguacaaccugucccacagcuacgccggggacgcggccaaccacugcggcaccguggccaacggggugcugcagaccuucaugcgcauggccuggggcggcuccuacaucgcgcucgacagcgggcggggcaacugggacugcaucaugaccuccuaccaguaccugaucauccagaacacgaccugggacgaccacugccaguucagccgccccucccccaucggguaccugggccuccugagccagcggacccgcgacgucuacaucucccggcgccugcucggcaccuucacguggacccugagcgacagcgaggggaaggacaccccgggcggguacugccugacccgguggaugcucaucgaggccgagcugaagugcuucggcaacacggccguggccaagugcaacgagaagcacgacgaggaguucugcgacaugcugcgccucuucgacuucugcaagcaggccauccagcggcugaaggcggaggcccagauguccauccagcugaucaacaaggccgugaacgcccucaucaacgaccagcugaucaugaagaaccaccuccgcgacaucauggggauccccuacugcaacuacagcaaguacugguaccugaacaacaccgccaccggcaagaccucccugcccaagugcuggcugaucagcaacggcuccuaccucaacgagacgcacuucagcgacgacaucgagcaggaggcggacaacaugaucaccgagaugcugcagaaggaguacauggagcggcaggggaagacgccccugggccucgucgaccuguucguguucuccaccagcuucuaccugaucuccaucuuccugcaccucgugaagaucccgacccaccgccacaucgucggcaagagcugccccaagccccaccggcugaaccacauggggaucugcuccugcgggcuguacaagcagcccggcgugccggugcgcuggaagcggugaggacuagucccuguucccagagcccacuuuuuuuucuuuuuuugaaauaaaauagccugucuuucagaucucaaaggcucuuuucagagccaccaaaaaaaaaaaaaaaaaaaaaaaaaaaaaaaaaaaaaaaaaaaaaaaaaaaaaaaaaaaaaaaaagaauu

SEQ ID NO: 37085 - RNA, 1736 nt, Artificial Sequence
  mRNA product Design a-2 (hSL-A64-N5) comprising derived and/or modified sequence from LASV(G3010-SLE-2013;Clade IV)__AIT17344__GPCmut10 (opt1)
aggagaguccgcucagccagguugcagaagcggcuuagcguguguccuaaucuucucucugcguguagguaggccugugccgcaaacaagcuuaccaugggccagaucgugaccuucuuccaggaggucccccacgugaucgaggaggugaugaacaucguccugaucgcccucagcauccuggccgugcugaaggggcucuacaacuucgcgaccugcggccugguggggcuggucacguuccuccugcugugcggccgcuccugcaccaccagccucuacaaggggguguacgagcugcagacccuggagcucaacauggagacgcugaacaugugcaugccgcuguccugcaccaagaacaacagccaccacuacaucauggugggcaacgagaccggccucgagcugacgcugaccaacaccuccaucaucaaccacaaguucugcaaccucagcgacgcccacaagaagaaccuguacaaccacgcccugauguccaucaucagcaccuuccaccucuccauccccaacuucaaccaguacgaggccaugagcugcgacuucaacgggggcaagaucuccguccaguacaaccugagccacuccuacgccggggacgcggccagccacugcggcacgguggccaacggggugcugcagaccuucaugcggauggccuggggcggcuccuacaucgcgcucgacagcggguacggcaagugggacugcaucaugaccuccuaccaguaccugaucauccagaacaccacgugggaggaccacugccaguucagccgccccucccccaucggguaccugggccuccugagccagcggacccgcgacaucuacaucagccggcgccugcucggcaccuucaccuggacgcuguccgacagcgaggggaaggacaccccgggcggguacugccugacccgguggaugcucaucgaggccgagcugaagugcuucggcaacaccgccgucgccaagugcaacgagaagcacgacgaggaguucugcgacaugcugcgccucuucgacuucugcaagcaggccauccagcggcugaagacggaggcgcagauguccauccagcugaucaacaaggccgugaacgcccucaucaacgaccagcugaucaugaagaaccaccuccgcgacaucauggggauccccuacugcaacuacagcaaguacugguaccugaaccacaccaccaccggcaagacgucccugcccaagugcuggcuggugagcaacggcuccuaccucaacgagacccacuucagcgacgacaucgagcagcaggccgacaacaugaucaccgagaugcugcagaaggaguacauggagcggcaggggaagacgccccugggccucgucgaccuguucguguucuccaccagcuucuaccugaucuccaucuuccugcaccucgugaagaucccgacccaccgccacaucgucggcaagagcugccccaagccccaccggcugaaccacauggggaucugcuccugcgggcuguacaagcagcccggcgugccggugcgcuggaagcggugaggacuagucccuguucccagagcccacuuuuuuuucuuuuuuugaaauaaaauagccugucuuucagaucucaaaggcucuuuucagagccaccaaaaaaaaaaaaaaaaaaaaaaaaaaaaaaaaaaaaaaaaaaaaaaaaaaaaaaaaaaaaaaaaagaauu

SEQ ID NO: 37086 - RNA, 1736 nt, Artificial Sequence
  mRNA product Design a-2 (hSL-A64-N5) comprising derived and/or modified sequence from LASV(G502-SLE-2009;Clade IV)__AIT17126__GPCmut10 (opt1)
aggagaguccgcucagccagguugcagaagcggcuuagcguguguccuaaucuucucucugcguguagguaggccugugccgcaaacaagcuuaccaugggccagaucgugaccuucuuccaggaggucccccacgugaucgaggaggugaugaacaucguccugaucgcccucagcauccuggccgugcugaaggggcucuacaacuucgcgaccugcggccugguggggcugcucacguuccugcugcucugcggccgcuccugcaccaccgggcuguacaagggcgucuacgagcugcagacccucgagcugaacauggagacgcugaacaugugcaugccgcucagcugcaccaagaacaacucccaccacuacaucauggugggcaacgagaccgggcuggagcugacgcucaccaacaccagcaucaucaaccacaaguucugcaaccuguccgacgcccacaagaagaaccuguacgaccacgcccucaugagcaucaucuccaccuuccaccugagcauccccaacuucaaccaguacgaggccauguccugcgacuucaacggcgggaagaucagcgugcaguacaaccugucccacagcuacgccggcgacgcggccgaccacugcgggacggucgccaacggcgugcuccagaccuucaugcggauggccuggggcggguccuacaucgcgcuggacagcggccgcgggcggugggacugcaucaugaccuccuaccaguaccugaucauccagaacaccacgugggaggaccacugccaguucagccgccccucccccaucggcuaccucggccugcugagccagcggacccgcgacaucuacaucucccggcgccuccuggggaccuucaccuggacgcugagcgacagcgagggcaaggacacccccgggggcuacugccucacccgguggaugcugaucgaggccgagcugaagugcuucgggaacaccgccguggccaagugcaacgagaagcacgacgaggaguucugcgacaugcuccgccuguucgacuucugcaagcaggccauccagcggcugaaggcggaggcccagauguccauccagcucaucaacaaggccgucaacgcccugaucaacgaccagcuggugaugaagaaccaccuccgcgacaucaugggcauccccuacugcaacuacagccgguacugguaccugaaccacacgaccaccggccgcaccucccugcccaagugcuggcucgugagcaacggguccuaccugaacgagacgcacuucagcgacgacaucgagcagcaggccgacaacaugaucaccgagaugcugcagaaggaguacauggagcggcagggcaagaccccgcucgggcuggucgaccuguucguguucuccaccagcuucuaccugaucuccaucuuccuccaccuggugaagaucccgacgcaccgccacaucgucggcaagagcugccccaagccccaccggcugaaccacauggggaucugcuccugcggccucuacaagcagcccggcgugccggugaaguggaagcgcugaggacuagucccuguucccagagcccacuuuuuuuucuuuuuuugaaauaaaauagccugucuuucagaucucaaaggcucuuuucagagccaccaaaaaaaaaaaaaaaaaaaaaaaaaaaaaaaaaaaaaaaaaaaaaaaaaaaaaaaaaaaaaaaaagaauu

SEQ ID NO: 37087 - RNA, 1736 nt, Artificial Sequence
  mRNA product Design a-2 (hSL-A64-N5) comprising derived and/or modified sequence from LASV(G733-SLE-2010;Clade IV)__AIT17154__GPCmut10 (opt1)
aggagaguccgcucagccagguugcagaagcggcuuagcguguguccuaaucuucucucugcguguagguaggccugugccgcaaacaagcuuaccaugggccagaucgugaccuucuuccaggaggucccccacgugaucgaggaggugaugaacaucguccugaucgcccucagcauccuggccgugcugaaggggcucuacaacuucgcgaccugcggcaucguggggcuggucuccuuccugcuccugugcggccgcagcugcacgaccucccuguacaaggggguguacgagcuccagacccuggagcugaacauggagacccucaacaugugcaugccgcugagcugcaccaagaacaacucccaccacuacaucauggugggcaacgagaccggccuggagcucacccugacgaacaccagcaucaucaaccacaaguucugcaaccuguccgacgcccacaagaagaaccucuacgaccacgcccugaugagcaucaucuccaccuuccaccugagcauccccaacuucaaccaguacgaggccauguccugcgacuucaacgggggcaagaucagcguccaguacaaccucucccacagcuacgccggggacgcggccaaccacugcggcaccaucgccaacggggugcugcagacguucaugcggauggccuggggcggcuccuacaucgcgcuggacagcgggcgcgaccggugggacugcaucaugaccuccuaccaguaccucaucauccagaacaccaccugggaggaccacugccaguucagccgccccucccccaucggcuaccuggggcugcucagccagcggacgcgcgacaucuacaucagccggcgccugcugggcaccuucaccuggacccucuccgacagcgagggcaaggacacgcccgggggcuacugccugacccgguggaugcugaucgaggccgagcucaagugcuucgggaacaccgccguggccaagugcaacgagaagcacgacgaggaguucugcgacaugcugcgccuguucgacuucugcaagcaggccauccagcggcucaaggcggaggcccagauguccauccagcugaucaacaaggccgucaacgcccugaucaacgaccagcucaucaugaagaaccaccuccgcgacaucaugggcauccccuacugcaacuacagcaaguacugguaccugaaccacaccacgaccgggaagaccucccugcccaagugcuggcuggugagcaacggcuccuaccugaacgagacccacuucagcgacgacaucgagcagcaggccgacaacaugaucacggagaugcuccagaaggaguacauggagcggcagggcaagaccccgcuggggcugguggaccucuucgucuucuccaccagcuucuaccugaucuccaucuuccugcaccuggugaagaucccgacccaccgccacguggucggcaagagcugccccaagccccaccggcucaaccacauggggaucugcuccugcggccuguacgggcagcccggcgugccggugaaguggaagcgcugaggacuagucccuguucccagagcccacuuuuuuuucuuuuuuugaaauaaaauagccugucuuucagaucucaaaggcucuuuucagagccaccaaaaaaaaaaaaaaaaaaaaaaaaaaaaaaaaaaaaaaaaaaaaaaaaaaaaaaaaaaaaaaaaagaauu

SEQ ID NO: 37088 - RNA, 1736 nt, Artificial Sequence
  mRNA product Design a-2 (hSL-A64-N5) comprising derived and/or modified sequence from MOPV/LASV reassortant(IGS-1;Clade IV)__AFY05576__GPCmut10 (opt1)
aggagaguccgcucagccagguugcagaagcggcuuagcguguguccuaaucuucucucugcguguagguaggccugugccgcaaacaagcuuaccaugggccagaucgugaccuucuuccaggaggucccccacgugaucgaggaggugaugaacaucguccugaucgcccucagcgugcuggccgugcugaaggggcucuacaacuucgcgaccugcggccuggucgggcuggugacguuccuccugcugugcggccgcuccugcaccaccagccucuacaaggggguguacgagcugcagacccuggagcucaacauggagacgcugaacaugugcaugccgcuguccugcaccaagaacaacagccaccacuacaucauggucggcaacgagaccggccucgagcugacgcugaccaacaccuccaucaucaaccacaaguucugcaaccucagcgacgcccacaagaagaaccuguacgaccacgcccugauguccaucaucagcaccuuccaccucuccauccccaacuucaaccaguacgaggccaugagcugcgacuucaacgggggcaagaucuccgugcaguacaaccugagccacuccuacgccggggacgcggccaaccacugcggcacgguggccaacgggguccugcagaccuucaugcggauggccuggggcggcagcuacaucgcgcucgacuccgggcgcggcaacugggacugcaucaugaccagcuaccaguaccugaucauccagaacaccacgugggaggaccacugccaguucucccggcccagccccaucggguaccugggccuccugucccagcgcacccgggacaucuacaucagccgccggcugcucggcaccuucaccuggacgcugagcgacuccgagggggaggacaccccgggcggguacugccugacccgcuggaugcucaucgaggccgagcugaagugcuucggcaacaccgccguggccaagugcaacgagaagcacgacgaggaguucugcgacaugcugcggcuguucgacuucugcaagcaggccauccagcgccugaaggcggaggcccagaugagcauccagcugaucaacaaggccgugaacgcccucaucaacgaccagcugaucaugaagaaccaccuccgggacaucauggggauccccuacugcaacuacuccaaguacugguaccucaaccacacgaccaccggccgcaccagccugcccaagugcuggcuggucuccaacggcagcuaccucaacgagacgcacuucuccgacgacaucgagcagcaggccgacaacaugaucaccgagaugcugcagaaggaguacauggagcggcaggggaagacgccccugggccucguggaccuguucguguucagcaccuccuucuaccugaucagcaucuuccugcaccucgucaagaucccgacccaccgccacaucguggggaaguccugccccaagccccaccggcugaaccacaugggcaucugcagcugcgggcuguacaagcagcccggcgugccggucaaguggaagcgcugaggacuagucccuguucccagagcccacuuuuuuuucuuuuuuugaaauaaaauagccugucuuucagaucucaaaggcucuuuucagagccaccaaaaaaaaaaaaaaaaaaaaaaaaaaaaaaaaaaaaaaaaaaaaaaaaaaaaaaaaaaaaaaaaagaauu

SEQ ID NO: 37089 - RNA, 1736 nt, Artificial Sequence
  mRNA product Design a-2 (hSL-A64-N5) comprising derived and/or modified sequence from LASV(LM765-SLE-2012;Clade IV)__AIT17814__GPCmut10 (opt1)
aggagaguccgcucagccagguugcagaagcggcuuagcguguguccuaaucuucucucugcguguagguaggccugugccgcaaacaagcuuaccaugggccagaucgugaccuucuuccaggaggucccccacgugaucgaggaggugaugaacaucguccugaucgcccucagcauccuggccgugcugaaggggcucuacaacuucgcgaccugcggccugguggggcuggucacguuccuccugcugugcggccgcuccugcaccaccagccucuacaaggggguguacgagcugcagacccuggagcucaacauggagacgcugaacaugugcaugccgcuguccugcaccaagaacaacagccaccacuacaucauggugggcaacgagaccggccucgagcugacgcugaccaacaccuccaucaucgaccacaaguucugcaaccucagcgacgcccaccggaagaaccuguacgaccacgcccugauguccaucaucagcaccuuccaccucuccauccccaacuucaaccaguacgaggccaugagcugcgacuucaacgggggcaagaucuccguccaguacaaccugagccacuccuacgccaaggacgcggccgaccacugcgggacgguggccaacggcgugcugcagaccuucaugcgcauggccuggggcgggagcuacaucgcgcucgacuccggccgggggcgcugggacugcaucaugaccagcuaccaguaccugaucauccagaacaccacgugggaggaccacugccaguucucccggcccagccccaucggcuaccuggggcuccugucccagcgcacccgggacaucuacaucagccgccggcugcucggcaccuucaccuggacgcugagcgacuccgagggcaaggacacccccgggggcuacugccugacccgcuggaugcucaucgaggccgagcugaagugcuucgggaacaccgccgucgccaagugcaacgagaagcacgacgaggaguucugcgacaugcugcggcuguucgacuucugcaagcaggccauccagcgccugaaggcggaggcccagaugagcauccagcugaucaacaaggccgugaacgcccucaucaacgaccagcugaucaugaagaaccaccuccgggacaucaugggcauccccuacugcaacuacuccaaguacugguaccucaaccacacgaccaccgggaagaccagccugcccaagugcuggcugguguccaacggcagcuaccucaacgagacgcacuucuccgacgacaucgagcagcaggccgacaacaugaucaccgagaugcugcagaaggaguacauggagcgccagggcaagaccccgcuggggcucgucgaccuguucguguucagcaccuccuucuaccugaucagcaucuuccugcaccucgugaagaucccgacgcaccggcacaucgucggcaagcccugccccaagccccaccgccugaaccacauggggaucugcuccugcggccuguacaagcagccgggggugcccgugaaguggaagcggugaggacuagucccuguucccagagcccacuuuuuuuucuuuuuuugaaauaaaauagccugucuuucagaucucaaaggcucuuuucagagccaccaaaaaaaaaaaaaaaaaaaaaaaaaaaaaaaaaaaaaaaaaaaaaaaaaaaaaaaaaaaaaaaaagaauu

SEQ ID NO: 37090 - RNA, 1736 nt, Artificial Sequence
  mRNA product Design a-2 (hSL-A64-N5) comprising derived and/or modified sequence from LASV(LM776-SLE-2012;Clade IV)__AIT17824__GPCmut10 (opt1)
aggagaguccgcucagccagguugcagaagcggcuuagcguguguccuaaucuucucucugcguguagguaggccugugccgcaaacaagcuuaccaugggccagaucgugaccuucuuccaggaggucccccacgugaucgaggaggugaugaacaucguccugaucgcccucagcauccuggccgugcugaaggggcucuacaacuucgcgaccugcggccugguggggcuggucacguuccuccugcugugcggccgcuccugcaccaccagcguguacaaggggguguacgagcuccagacccuggagcugaacauggagacgcucaacaugugcaugccgcuguccugcaccaagaacaacagccaccacuacaucauggucggcaacgagaccggccuggagcucacgcugaccaacaccuccaucaucaaccacaaguucugcaaccugagcgacgcccacaagaagaaccucuacgaccacgcccugauguccaucaucagcaccuuccaccuguccauccccaacuucaaccaguacgaggccaugagcugcgacuucaacgggggcaagaucuccgugcaguacaaccucagccacuccuacgccggggacgcggccaaccacugcggcacgguggccaacgggguccugcagaccuucaugcggauggccuggggcggcagcuacaucgcgcuggacuccgggcacggcaagugggacugcaucaugaccagcuaccaguaccucaucauccagaacaccacgugggaggaccacugccaguucucccgccccagccccaucggguaccugggccugcucucccagcggacccgcgacaucuacaucagccggcgccugcugggcaccuucaccuggacgcucagcgacuccgaggggaaggacaccccgggcggguacugccugacccgguggaugcugaucgaggccgagcucaagugcuucggcaacaccgccguggccaagugcaacgagaagcacgacgaggaguucugcgacaugcugcgccuguucgacuucugcaagcaggccauccagcggcucaaggcggaggcccagaugagcauccagcugaucaacaaggccgugaacgcccugaucaacgaccagcucaucaugaagaaccaccuccgcgacaucauggggauccccuacugcaacuacuccaaguacugguaccugaaccacacgaccaccggcaagaccagccugcccaagugcuggcuggucuccaacggcagcuaccugaacgagacgcacuucuccgacgacaucgagcagcaggccgacaacaugaucaccgagaugcuccagaaggaguacauggagcggcaggggaagacgccccugggccugguggaccucuucguguucagcaccuccuucuaccugaucagcaucuuccugcaccuggucaagaucccgacccaccgccacaucguggggaaguccugccccaagccccaccggcucaaccacaugggcaucugcagcugcgggcuguacaagcagcccggcgugccgguccgcuggaagcggugaggacuagucccuguucccagagcccacuuuuuuuucuuuuuuugaaauaaaauagccugucuuucagaucucaaaggcucuuuucagagccaccaaaaaaaaaaaaaaaaaaaaaaaaaaaaaaaaaaaaaaaaaaaaaaaaaaaaaaaaaaaaaaaaagaauu

SEQ ID NO: 37091 - RNA, 1736 nt, Artificial Sequence
  mRNA product Design a-2 (hSL-A64-N5) comprising derived and/or modified sequence from LASV(Mad39;Clade IV)__ANH09722__GPCmut10 (opt1)
aggagaguccgcucagccagguugcagaagcggcuuagcguguguccuaaucuucucucugcguguagguaggccugugccgcaaacaagcuuaccaugggccagaucgugaccuucuuccaggaggucccccacgugaucgaggaggugaugaacaucguccugaucgcccucagcauccuggccgugcugaaggggcucuacaacguggcgaccugcggccugaucgggcuggucacguuccuccugcugugcggccgcuccugcaccaccacccucuacaaggggguguacgagcugcaggcccuggagcucaacauggagacgcugaacaugugcaugccgcugagcugcaccaagaacaacucccaccacuacauccgggugggcaacgagaccggccucgagcugacgcugaccaacaccagccucaucaaccacaaguucugcaaccuguccgacgcccacaagaagaaccuguacgaccacgcccucaugagcaucaucuccaccuuccaccugagcauccccaacuucaaccaguacgaggccauguccugcgacuucaacgacgggaagaucagcguccaguacaaccugucccacacguacgcgggcgacaccgccaaccacugcgggaccguggccaacggcgugcuccagaccuucaugcgcauggccuggggcgggagcuacaucgcgcuggacuccggccgcgggggcugggacugcaucaugacgagcuaccaguaccugaucauccagaacaccaccugggaggaccacugccaguucucccggcccagccccaucggguaccucggccugcugucccagcggacccgcgacaucuacaucagccggcgccuccugggcacguucaccuggacccuguccgacagcgaggggaaggacaccccgggcggguacugccucacgcgguggaugcugaucgaggccgagcugaagugcuucggcaacaccgccgucgccaagugcaacgagaagcacgacgaggaguucugcgacaugcuccgccuguucgacuucugcaagcaggccauccagcggcugaaggcggaggcccagaugagcauccagcucaucaacaaggccgugaacgcccugaucaacgaccagcugaucaugaagaaccaccuccgcgacaucauggggauccccuacugcaacuacuccaaguacugguaccugaaccacaccgugaccggcaagacgagccugcccaagugcuggcucgucuccaacggcagcuaccugaacgagacccacuucuccgacgacaucgagcagcaggccgacaacaugaucaccgagaugcugcagaaggaguacauggagcggcaggggaagacgccccucggccugguggaccuguucguguucagcaccuccuucuaccugaucagcaucuuccuccaccuggucaagaucccgacccaccgccacgugguggggaagcccugccccaagccccaccggcugaaccacaugggcaucugcuccugcggguucuacaagcagccgggcguccccgugcgcuggaagcggugaggacuagucccuguucccagagcccacuuuuuuuucuuuuuuugaaauaaaauagccugucuuucagaucucaaaggcucuuuucagagccaccaaaaaaaaaaaaaaaaaaaaaaaaaaaaaaaaaaaaaaaaaaaaaaaaaaaaaaaaaaaaaaaaagaauu

SEQ ID NO: 37092 - RNA, 1736 nt, Artificial Sequence
  mRNA product Design a-2 (hSL-A64-N5) comprising derived and/or modified sequence from LASV(Z0947-SLE-2011;Clade IV)__AIT17840__GPCmut10 (opt1)
aggagaguccgcucagccagguugcagaagcggcuuagcguguguccuaaucuucucucugcguguagguaggccugugccgcaaacaagcuuaccaugggccagaucgugaccuucuuccaggaggucccccacgugaucgaggaggugaugaacaucguccugaucgcccucagcauccuggccgugcugaaggggcucuacaacuucgcgaccugcggccugguggggcuggucacguuccuccugcugugcggccgcuccugcaccaucagccucuacaaggggguguacgagcugcagacccuggagcucaacauggagacccugaacaugugcaugccgcuguccugcaccaagaacaacagccaccacuacaucauggugggcaacgagaccggccucgagcugacccugacgaacaccuccaucaucaaccacaaguucugcaaccucagcgacgcccacaagaagaaccuguacgaccacgcccugauguccaucaucagcaccuuccaccucuccauccccaacuucaaccaguacgaggccaugagcugcgacuucaacgggggcaagaucuccguccaguacaaccugagccacuccuacgccggggacgcggccaaccacugcggcaccguggccaacggggugcugcagacguucaugcggauggccuggggcggcagcuacaucgcgcucgacuccgggcgcgaccggugggacugcaucaugaccagcuaccaguaccugaucauccagaacaccaccugggaggaccacugccaguucucccgccccagccccaucggcuaccuggggcuccugucccagcggacgcgcgacaucuacaucagccggcgccugcucggcaccuucaccuggacccugagcgacuccgagggcaaggacacgcccgggggcuacugccugacccgguggaugcucaucgaggccgagcugaagugcuucgggaacaccgccgucgccaagugcaacgagaagcacgacgaggaguucugcgacaugcugcgccucuucgacuucugcaagcaggccauccagcggcugaaggcggaggcccagaugagcauccagcugaucaacaaggccgugaacgcccucaucaacgaccagcugaucaugaagaaccaccuccgcgacaucaugggcauccccuacugcaacuacuccaaguacugguaccugaaccacaccacgaccgggaagaccagccugcccaagugcuggcugguguccaacggcagcuaccucaacgagacccacuucuccgacgacaucgagcagcaggccgacaacaugaucacggagaugcugcagaaggaguacauggagcggcagggcaagaccccgcuggggcucgucgaccuguucguguucagcaccuccuucuaccugaucagcaucuuccugcaccucgugaagaucccgacccaccgccacaucgucggcaagcccugccccaagccccaccggcugaaccacauggggaucugcuccugcggccuguacaagcagccgggggugcccgugaaguggaagcgcugaggacuagucccuguucccagagcccacuuuuuuuucuuuuuuugaaauaaaauagccugucuuucagaucucaaaggcucuuuucagagccaccaaaaaaaaaaaaaaaaaaaaaaaaaaaaaaaaaaaaaaaaaaaaaaaaaaaaaaaaaaaaaaaaagaauu

SEQ ID NO: 37093 - RNA, 1736 nt, Artificial Sequence
  mRNA product Design a-2 (hSL-A64-N5) comprising derived and/or modified sequence from LASV(Josiah;Clade IV)__NP_694870__GPCmut10 (opt1)
aggagaguccgcucagccagguugcagaagcggcuuagcguguguccuaaucuucucucugcguguagguaggccugugccgcaaacaagcuuaccaugggccagaucgugaccuucuuccaggaggucccccacgugaucgaggaggugaugaacaucguccugaucgcccucagcgugcuggccgugcugaaggggcucuacaacuucgcgaccugcggccuggucgggcuggugaccuuccuccugcugugcggccgcuccugcaccaccagccucuacaaggggguguacgagcugcagacccuggagcucaacauggagacgcugaacaugugcaugccgcuguccugcaccaagaacaacagccaccacuacaucauggucggcaacgagaccggccucgagcugacccugacgaacaccuccaucaucaaccacaaguucugcaaccucagcgacgcccacaagaagaaccuguacgaccacgcccugauguccaucaucagcaccuuccaccucuccauccccaacuucaaccaguacgaggccaugagcugcgacuucaacgggggcaagaucuccgugcaguacaaccugagccacuccuacgccggggacgcggccaaccacugcggcaccguggccaacgggguccugcagacguucaugcggauggccuggggcggcagcuacaucgcgcucgacuccgggcgcggcaacugggacugcaucaugaccagcuaccaguaccugaucauccagaacaccaccugggaggaccacugccaguucucccggcccagccccaucggguaccugggccuccugucccagcgcacgcgggacaucuacaucagccgccggcugcucggcaccuucaccuggacccugagcgacuccgaggggaaggacacgccgggcggguacugccugacccgcuggaugcucaucgaggccgagcugaagugcuucggcaacaccgccguggccaagugcaacgagaagcacgacgaggaguucugcgacaugcugcggcuguucgacuucugcaagcaggccauccagcgccugaaggcggaggcccagaugagcauccagcugaucaacaaggccgugaacgcccucaucaacgaccagcugaucaugaagaaccaccuccgggacaucauggggauccccuacugcaacuacuccaaguacugguaccucaaccacaccacgaccggccgcaccagccugcccaagugcuggcuggucuccaacggcagcuaccucaacgagacccacuucuccgacgacaucgagcagcaggccgacaacaugaucacggagaugcugcagaaggaguacauggagcggcaggggaagacgccccugggccugguggaccucuucguguucagcaccuccuucuaccugaucagcaucuuccugcaccucgucaagaucccgacccaccgccacaucguggggaaguccugccccaagccccaccggcugaaccacaugggcaucugcagcugcgggcuguacaagcagcccggcgugccggucaaguggaagcgcugaggacuagucccuguucccagagcccacuuuuuuuucuuuuuuugaaauaaaauagccugucuuucagaucucaaaggcucuuuucagagccaccaaaaaaaaaaaaaaaaaaaaaaaaaaaaaaaaaaaaaaaaaaaaaaaaaaaaaaaaaaaaaaaaagaauu

SEQ ID NO: 37094 - RNA, 1733 nt, Artificial Sequence
  mRNA product Design a-2 (hSL-A64-N5) comprising derived and/or modified sequence from LASV(LP;Clade I)__AAF86701__GPCmut10 (opt1)
aggagaguccgcucagccagguugcagaagcggcuuagcguguguccuaaucuucucucugcguguagguaggccugugccgcaaacaagcuuaccaugggccagaucaucaccuucuuccaggaggugccccacgucaucgaggaggugaugaacaucgugcugaucgcccucagccugcuggccauccucaaggggcuguacaacaucgcgaccugcggcaucaucgggcuggucgccuuccucuuccugugcggcaaguccugcagccugacgcucaagggcggguacgagcugcagacccuggagcucaacauggagacccugaacaugugcaugccgcuguccugcaccaagaacagcucccaccacuacauccgcgugggcaacgagacggggcucgagcugacccugaccaacaccagcaucaucaaccacaaguucugcaaccucuccgacgcccacaagaagaaccuguacgaccacgcccugaugagcaucaucuccacguuccaccucagcauccccaacuucaaccaguacgaggccauguccugcgacuucaacggcgggaagaucagcgugcaguacaaccugucccacagcuacgcgggcgacgccgccgagcacugcgggaccgucgccaacggcgugcugcagaccuucaugcggauggcguggggcgggcgcuacaucgcccucgacuccggcaaggggaacugggacugcaucaugaccagcuaccaguaccugaucauccagaacacgaccugggaggaccacugccaguucucccggcccagccccaucggcuaccugggccuccugucccagcgcacccgggacaucuacaucagccgccggcugcucgggaccuucacguggacccugagcgacuccgagggcaacgagacccccgggggcuacugccugacccgcuggaugcucaucgaggccgagcugaagugcuucgggaacacggccguggccaagugcaacgagaagcacgacgaggaguucugcgacaugcugcggcuguucgacuucugcaagcaggcgauccgccggcugaaggccgaggcccagaugagcauccagcugaucaacaaggccgucaacgcccucaucaacgaccagcugaucaugaagaaccaccuccgcgacaucaugggcauccccuacugcaacuacuccaaguacugguaccucaaccacaccagcuccggccggaccagccugcccaagugcuggcugaucuccaacgggagcuaccucaacgagacccaguucuccgacgacaucgagcagcaggcggacaacaugaucacggagaugcugcagaaggaguacaucgagcgccagggcaagaccccgcuggggcugguggacaucuucaucuucagcaccuccuucuaccucaucagcaucuuccugcaccugaucaagaucccgacccaccggcacaucgugggcaagcccugccccaagccccaccgccucaaccacaugggggucugcuccugcggccuguacaagcacccgggcgugcccacgaaguggaagcggugaggacuagucccuguucccagagcccacuuuuuuuucuuuuuuugaaauaaaauagccugucuuucagaucucaaaggcucuuuucagagccaccaaaaaaaaaaaaaaaaaaaaaaaaaaaaaaaaaaaaaaaaaaaaaaaaaaaaaaaaaaaaaaaaagaauu

SEQ ID NO: 37095 - RNA, 1733 nt, Artificial Sequence
  mRNA product Design a-2 (hSL-A64-N5) comprising derived and/or modified sequence from LASV(803213;Clade II)__AAF86703__GPCmut10 (opt1)
aggagaguccgcucagccagguugcagaagcggcuuagcguguguccuaaucuucucucugcguguagguaggccugugccgcaaacaagcuuaccaugggccagaucaucaccuucuuccaggaggugccccacgucaucgaggaggugaugaacaucgugcugaucgcccucagccugcuggccauccucaaggggaucuacaacgucgcgaccugcggccuguucgggcugaucuccuuccuccugcugugcggccgcagcugcuccgugacguacaaggggguguacgagcuccagacccuggagcugaacauggccaaccucaacaugugcaugccgcugagcugcaccaagaacaacucccaccacuacaucauggucggcaacgagaccggccuggagcucacgcugaccaacaccagcaucaucaaccacaaguucugcaaccuguccgacgcccacaagaagaaccucuacgaccacgcccugaugagcaucaucuccaccuuccaccugagcauccccaacuucaaccaguacgaggccauguccugcgacuucaacgggggcaagaucagcgugcaguacaaccucucccacagcuucgcgguggacgccgccaaccacugcgggacgaucgccaacggcguccugcagaccuucaugcggauggcguggggcggguccuacaucgcccuggacagcggcaaggggaacugggacugcaucaugaccuccuaccaguaccucaucauccagaacaccacgugggaggaccacugccaguucagccgccccucccccaucggcuaccuggggcugcucagccagcggacccgcgacaucuacaucagccggcgccugcugggcaccuucaccuggacgcucuccgacagcgagggcaacgaggcccccgggggcuacugccugacccgguggaugcugaucgaggccgagcucaagugcuucgggaacaccgccguggcgaagugcaacgagaagcacgacgaggaguucugcgacaugcugcgccuguucgacuucugcaagcaggccaucaagcggcucaagaccgaggcccagauguccauccagcugaucaacaaggccgugaacgcccugaucaacgaccagcucaucaugaagaaccaccuccgcgacaucaugggcauccccuacugcaacuacagccgguacugguaccugaaccacacggucaccgggaagaccucccugccccgcugcuggcuggugagcaacggcuccuaccugaacgagacccacuucagcgacgacaucgagcagcaggcggacaacaugaucacggagaugcuccagaaggaguacauggaccggcagggcaagaccccgcuggggcugguggaccuguucgucuucuccaccagcuucuaccucaucuccaucuuccugcaccuggugaagaucccgacccaccgccacaucgugggcaagcccugccccaagccccaccggcucaaccacauggggaucugcagcugcggccuguacaagcacccggggguccccgugaaguggaagcgcugaggacuagucccuguucccagagcccacuuuuuuuucuuuuuuugaaauaaaauagccugucuuucagaucucaaaggcucuuuucagagccaccaaaaaaaaaaaaaaaaaaaaaaaaaaaaaaaaaaaaaaaaaaaaaaaaaaaaaaaaaaaaaaaaagaauu

SEQ ID NO: 37096 - RNA, 1733 nt, Artificial Sequence
  mRNA product Design a-2 (hSL-A64-N5) comprising derived and/or modified sequence from LASV(GA391;Clade III)__CAA36645__GPCmut10 (opt1)
aggagaguccgcucagccagguugcagaagcggcuuagcguguguccuaaucuucucucugcguguagguaggccugugccgcaaacaagcuuaccaugggccagaucgugaccuucuuccaggaggucccccacgugaucgaggaggugaugaacaucguccugaucgcccucagcauccuggccauccugaaggggcucuacaacguggcgaccugcggccugaucgggcuggugaccuuccuccugcuguccggccgcagcugcucccucaucuacaaggggaccuacgagcugcagacccuggagcucaacauggagacccugaacaugugcaugccgcugagcugcacgaagaacaacucccaccacuacauccgggucggcaacgagaccggccucgagcugacccugaccaacacgagcauccucaaccacaaguucugcaaccuguccgacgcccacaagcgcaaccuguacgaccacagccucauguccaucaucagcaccuuccaccuguccauccccaacuucaaccaguacgaggccaugagcugcgacuucaacgggggcaagaucaccgugcaguacaaccugucccacagcuucgccguggacgccgcggggcacugcggcacccucgccaacgggguccugcagacguucaugcggauggccuggggcggcuccuacaucgcccuggacagcgggcgcggcaacugggacugcaucaugaccuccuaccaguaccucaucauccagaacaccaccugggacgaccacugccaguucagccggcccucccccaucggguaccugggccugcucagccagcgcacgcgggacaucuacaucagccgccggcugcugggcaccuucaccuggacccucuccgacagcgaggggaacgagacgccgggcggguacugccugacccgcuggaugcugaucgaggcggagcucaagugcuucggcaacaccgccguggccaagugcaacgagaagcacgacgaggaguucugcgacaugcugcggcuguucgacuucugcaagcaggccauccgccggcucaagaccgaggcccagauguccauccagcugaucaacaaggcggugaacgcccugaucaacgaccagcucaucaugaagaaccaccuccgcgacaucauggggauccccuacugcaacuacagccgguacugguaccugaaccacacguccaccggcaagaccagccugccccgcugcuggcugaucuccaacggcagcuaccugaacgagaccaaguucuccgacgacaucgagcagcaggccgacaacaugaucacggagaugcugcagaaggaguacaucgaccggcaggggaagacgccccucggccuggucgaccuguucguguucagcaccuccuucuaccucaucagcaucuuccugcaccuggugaagaucccgacccaccgccacaucgucgggaagcccugccccaagccccaccggcucaaccacaugggcaucugcuccugcgggcuguacaagcagccgggcgugcccgugcgcuggaagcggugaggacuagucccuguucccagagcccacuuuuuuuucuuuuuuugaaauaaaauagccugucuuucagaucucaaaggcucuuuucagagccaccaaaaaaaaaaaaaaaaaaaaaaaaaaaaaaaaaaaaaaaaaaaaaaaaaaaaaaaaaaaaaaaaagaauu

SEQ ID NO: 37097 - RNA, 1736 nt, Artificial Sequence
  mRNA product Design a-2 (hSL-A64-N5) comprising derived and/or modified sequence from LASV(AV;Clade V)__CCA30314__GPCmut10 (opt1)
aggagaguccgcucagccagguugcagaagcggcuuagcguguguccuaaucuucucucugcguguagguaggccugugccgcaaacaagcuuaccaugggccagaucgugaccuucuuccaggaggucccccacgugaucgaggaggugaugaacaucguccugaucgcccucagcauccuggccgugcugaaggggcucuacaacaucgcgaccugcggccugaucgggcugaucacguuccuccugcugugcggccgcuccugcagcuccaaccucuacaaggggguguacgagcugcagagccuggaccucaacauggagacccugaacaugugcaugccgcuguccugcaccaagaacaacagccaccacuacauccgggucggcaacgacaccggccucgagcugacgcugaccaacaccuccauccucaaccacaaguucugcaaccugagcgacgcccacaagaaggaccuguacgaccacgcccucauguccaucaucagcaccuuccaccuguccauccccaacuucaaccaguacgaggccaugagcugcgacuucaacgggggcaagaucuccgugcaguacaaccugagccacuccuacgccaucgacgcggccaaccacugcgggacgguggccaacggcauccuccagaccuucaugcgcauggccuggggcgggagcuacaucgcgcuggacuccggccgggggaacugggacugcaucaugaccagcuaccaguaccugaucauccagaacaccacgugggagaaccacugccaguucucccgccccagccccaucggcuaccucgggcugcugagccagcggacccgcgacaucuacaucucccggcgccuccugggcaccuucaccuggacgcugagcgacuccgagggcaacgccacccccgggggcuacugccucacccgguggaugcugaucgaggccgagcugaagugcuucgggaacaccgccgucgccaagugcaacgagaagcacgacgaggaguucugcgacaugcuccgccuguucgacuucugcaagcaggcgaucagccggcugaaguccgaggcccagaugagcauccagcucaucaacaaggccgugaacgcccugaucaacgaccagcugaucaugaagaaccaccuccgcgacaucaugggcauccccuacugcaacuacuccaaguacugguaccugaaccacacgaucaccgggaagaccagccugcccaagugcuggcucguguccaacggcagcuaccugaacgagacccacuucuccgacgacaucgagcagcaggccgacaacaugaucacggagaugcugcagaaggaguacauggagcggcagggcaagaccccgcuggggcucgucgaccuguucguguucagcaccuccuucuaccugaucagcaucuuccuccgccuggugaagaucccgacccaccggcacaucgucggcaagcccugccccaagccccaccgccugaaccacauggggaucugcuccugcggccucuacaagcagccgggggugcccgugcgguggaagcgcugaggacuagucccuguucccagagcccacuuuuuuuucuuuuuuugaaauaaaauagccugucuuucagaucucaaaggcucuuuucagagccaccaaaaaaaaaaaaaaaaaaaaaaaaaaaaaaaaaaaaaaaaaaaaaaaaaaaaaaaaaaaaaaaaagaauu

SEQ ID NO: 37098 - RNA, 1733 nt, Artificial Sequence
  mRNA product Design a-2 (hSL-A64-N5) comprising derived and/or modified sequence from LASV(Togo/2016/7082;Clade VI)__AMR44577__GPCmut10 (opt1)
aggagaguccgcucagccagguugcagaagcggcuuagcguguguccuaaucuucucucugcguguagguaggccugugccgcaaacaagcuuaccaugggccagaucaucaccuucuuccaggaggugccccacgucaucgaggaggugaugaacaucgugcugaucgcccucagccugcuggccauccucaagggggucuacaacguggcgaccugcggcaucaucgggcuggugacguuccuguuccucugcggccgcuccugcagccugaucuacaagggguccuacgagcugcagacccucgagcugaacauggagacccugaacaugugcaugccgcucagcugcaccaagaacuccagccaccacuacauccgggucggcaacgagacgggccuggagcugacccucaccaacaccuccaucaucaaccacaaguucugcaaccugagcgacgcccacaagcgcaaccuguacgaccacgcccucauguccauccugagcacguuccaccuguccauccccaacuucaaccaguacgaggccaugagcugcgacuucaacgggggcaagaucuccgugcaguacaaccucagccacgccuacgcgguggacgccgccgagcacugcgggaccgucgccaacggcgugcugcagaccuucaugcggauggcguggggcggguccuacaucgcccuggacagcggccgcgggaacugggacugcaucaugaccuccuaccaguaccucaucauccagaacacgaccugggaggaccacugccaguucagccggcccucccccaucggcuaccuggggcugcucagccagcgcacccgggacaucuacaucagccgccggcugcugggcaccuucacguggacccucuccgacagcgagggcaacgagacccccgggggcuacugccugacccgcuggaugcugaucgaggccgagcucaagugcuucgggaacacggccguggccaagugcaacgagaagcacgacgaggaguucugcgacaugcugcggcuguucgacuucugcaagcaggcgauccagcgccucaaguccgaggcccagaugagcauccagcugaucaacaaggccgucaacgcccugaucaacgaccagcucaucaugaagaaccaccuccgggacaugaugggcauccccuacugcaacuacuccaaguacugguaccugaaccacaccagcuccgggcgcaccagccugcccaagugcuggcugguguccaacggcagcuaccugaacgagacccacuucuccgacgacaucgagcagcaggccgacaacaugaucacggagaugcuccagaaggaguacaucgaccggcagggcaagaccccgcuggggcugguggaccuguucgucuucagcaccuccuucuaccucaucagcaucuuccugcaccugaucaagaucccgacccaccgccacaucgugggcaagcccugccccaagccccaccggcucaaccacauggggaucugcuccugcggccuguacaagcagccgggggugcccacgcgcuggaagcggugaggacuagucccuguucccagagcccacuuuuuuuucuuuuuuugaaauaaaauagccugucuuucagaucucaaaggcucuuuucagagccaccaaaaaaaaaaaaaaaaaaaaaaaaaaaaaaaaaaaaaaaaaaaaaaaaaaaaaaaaaaaaaaaaagaauu

SEQ ID NO: 37099 - RNA, 1733 nt, Artificial Sequence
  mRNA product Design a-2 (hSL-A64-N5) comprising derived and/or modified sequence from LASV(KAK-428;Clade n.d. (VII))__ANH09740__GPCmut10 (opt1)
aggagaguccgcucagccagguugcagaagcggcuuagcguguguccuaaucuucucucugcguguagguaggccugugccgcaaacaagcuuaccaugggccagaucgugaccuucuuccaggaggucccccacgugaucgaggaggugaugaacaucguccugaucgcccucagccugcuggccauccucaaggggcuguacaacuucgcgaccugcggcgugaucgggcugaucacguuccuccugcugugcggccgcuccugcagcgccaccuacaaggggcaguacgagcuccagacccuggagcugaacauggagucccucaacaugugcaugccgcugagcugcaccaagaacaacucccaccacuacauccgggccggcaacaacacgggccuggagcucacccugaccaacaccagcaucaucucccacaaguucugcaaccugagcgacgcccacaagaagaaccucuacgaccacacgcugauguccaucaucaccaccuuccaccugagcauccccaacuucaaccaguacgaggccauguccugcgacuucaacgggggcaagaucagcauccaguacaaccucucccacagcuacgcgggggacgccgcccagcacugcggcaccguggccaacgggguccugcagacguucaugcgcauggcguggggcggcuccuaccuggcccucgacagcgggcggcgcggcugggacugcaucaucuccagcuaccaguaccugaucauccagaacaccaccugggacgaccacugccaguucucccggcccagccccaucggguaccugggcuucgugagccagaagacccgcgacaucuacaucucccggcgccuccugggcacguucaccuggacccugagcgacuccgaggggcacgacaugccgggcggguacugccucacccgguggaugcugaucgaggccgaccugaagugcuucggcaacacggccguggccaagugcaacgagaagcacgacgaggaguucugcgacauguggcgccucuucgacuucugcaagcaggcgauccagcggcugaaggccgaggcccagaugaacauccagcugaucaacaaggccgucaacgcccucaucaacgaccagcugaugaugaagaaccaccuccgcgacaucauggggauccccuacugcaacuacagcaaguucugguaccugaacaacaccaccaccggccggacgucccugccccgcugcuggcugaucagcaacggcuccuaccucaacgagacccacuucagcgacgacaucgagcagcaggcggacaacaugaucaccgagaugcugcagaaggaguacauggaccggcaggggaagacgccccugggccucguggaccuguucguguucuccaccagcuucuaccugaucaccaucuuccugcaccucgucaagaucccgacccaccgccacaucguggggaagcccugccccaagccccaccggcugaaccacaugggcaucugcuccugcgggcuguacaagcagccgggcgugcccguccgcuggaagcggugaggacuagucccuguucccagagcccacuuuuuuuucuuuuuuugaaauaaaauagccugucuuucagaucucaaaggcucuuuucagagccaccaaaaaaaaaaaaaaaaaaaaaaaaaaaaaaaaaaaaaaaaaaaaaaaaaaaaaaaaaaaaaaaaagaauu

SEQ ID NO: 37100 - RNA, 1733 nt, Artificial Sequence; identical to SEQ ID NO: 37094
  mRNA product Design a-2 (hSL-A64-N5) comprising derived and/or modified sequence from LASV(Pinneo-NIG-1969;Clade I)__AIT17836__GPCmut10 (opt1)

SEQ ID NO: 37101 - RNA, 1733 nt, Artificial Sequence
  mRNA product Design a-2 (hSL-A64-N5) comprising derived and/or modified sequence from LASV(ISTH0009-NIG-2011;Clade II)__AIT17404__GPCmut10 (opt1)
aggagaguccgcucagccagguugcagaagcggcuuagcguguguccuaaucuucucucugcguguagguaggccugugccgcaaacaagcuuaccaugggccagaucaucaccuucuuccaggaggugccccacgucaucgaggaggugaugaacaucgugcugaucgcccucagccugcuggccauccucaaggggaucuacaacgucgcgaccugcggccuguucgggcugguguccuuccuccugcugugcggccgcagcugcuccacgaccuacaaggggguguacgagcuccagacccuggagcuggacauggccagccucaacaugugcaugccgcuguccugcaccaagaacaacagccaccacuacaucauggucggcaacgagacgggccuggagcucacccugaccaacaccuccaucaucaaccacaaguucugcaaccugagcgacgcccacaagaagaaccucuacgaccacgcccugauguccaucaucagcacguuccaccuguccauccccaacuucaaccaguacgaggccaugagcugcgacuucaacgggggcaagaucuccgugcaguacaaccucagccacgcguacgccguggacgccgccaaccacugcgggaccaucgcgaacggcguccugcagaccuucaugcggauggccuggggcggguccuacaucgcccuggacagcggcaagggguccugggacugcaucaugaccagcuaccaguaccucaucauccagaacacgaccugggaggaccacugccaguucucccgccccagccccaucggcuaccuggggcugcucagccagcggacccgcgacaucuacaucucccggcgccugcugggcaccuucacguggacccucagcgacuccgagggcaacgagacccccgggggcuacugccugacccgguggaugcugaucgaggccgagcucaagugcuucgggaacacggccguggcgaagugcaacgagaagcacgacgaggaguucugcgacaugcugcgccuguucgacuucugcaagcaggccauccggcgccucaagaccgaggcccagaugagcauccagcugaucaacaaggccgugaacgcccugaucaacgaccagcucaucaugaagaaccaccuccgggacaucaugggcauccccuacugcaacuacuccaaguacugguaccugaaccacaccgucaccgggaagacgagccugccccgcugcuggcugguguccaacggcagcuaccugaacgagacccacuucuccgacgacaucgagcagcaggcggacaacaugaucaccgagcuccugcagaaggaguacauggaccggcagggcaagaccccgcuggggcugguggaccucuucgucuucagcacguccuucuaccugaucagcaucuuccugcaccucaucaagaucccgacccaccgccacaucaccggcaagcccugccccaagccccaccggcugaaccacauggggaucugcuccugcggccuguacaagcacccgggggugcccgugaaguggaagcgcugaggacuagucccuguucccagagcccacuuuuuuuucuuuuuuugaaauaaaauagccugucuuucagaucucaaaggcucuuuucagagccaccaaaaaaaaaaaaaaaaaaaaaaaaaaaaaaaaaaaaaaaaaaaaaaaaaaaaaaaaaaaaaaaaagaauu

SEQ ID NO: 37102 - RNA, 1733 nt, Artificial Sequence
  mRNA product Design a-2 (hSL-A64-N5) comprising derived and/or modified sequence from LASV(ISTH2010-NIG-2012;Clade II)__AIT17482__GPCmut10 (opt1)
aggagaguccgcucagccagguugcagaagcggcuuagcguguguccuaaucuucucucugcguguagguaggccugugccgcaaacaagcuuaccaugggccagaucaucaccuucuuccaggaggugccccacgucaucgaggaggugaugaacaucgugcugaucgcccucagccugcuggccauccucaaggggaucuacaacgucgcgaccugcggccuguucgggcugguguccuuccuccugcugugcggccgcagcugcuccacgaccuacaaggggguguacgagcuccagacccuggagcuggacauggccagccucaacaugugcaugccgcuguccugcaccaagaacaacagccaccacuacaucauggucggcaacgagacgggccuggagcucacccugaccaacaccuccaucaucaaccacaaguucugcaaccugagcgacgcccacaagaagaaccucuacgaccacgcccugauguccaucaucagcacguuccaccuguccauccccaacuucaaccaguacgaggccaugagcugcgacuucaacgggggcaagaucuccgugcaguacaaccucagccacgcguacgccguggacgccgccaaccacugcgggaccaucgcgaacggcguccugcagaccuucaugcggauggccuggggcggguccuacaucgcccuggacagcggcaagggguccugggacugcaucaugaccagcuaccaguaccucaucauccagaacaucacgugggaggaccacugccaguucucccgccccagccccaucggcuaccuggggcugcucagccagcggacccgcgacaucuacaucucccggcgccugcugggcaccuucaccuggacgcucagcgacuccgagggcaacgagacccccgggggcuacugccugacccgguggaugcugaucgaggccgagcucaagugcuucgggaacaccgccguggcgaagugcaacgagaagcacgacgaggaguucugcgacaugcugcgccuguucgacuucugcaagcaggccauccggcgccucaagacggaggcccagaugagcauccagcugaucaacaaggccgugaacgcccugaucaacgaccagcucaucaugaagaaccaccuccgggacaucaugggcauccccuacugcaacuacuccaaguacugguaccugaaccacaccgucaccgggaagaccagccugccccgcugcuggcugguguccaacggcagcuaccugaacgagacgcacuucuccgacgacaucgagcagcaggcggacaacaugaucaccgagcuccugcagaaggaguacaucgaccggcagggcaagaccccgcuggggcugguggaccucuucgucuucagcaccuccuucuaccugaucagcaucuuccugcaccucgugaagaucccgacgcaccgccacguggucggcaagcccugccccaagccccaccggcugaaccacauggggaucugcuccugcggccuguacaagcacccgggggugcccgugaaguggaagcgcugaggacuagucccuguucccagagcccacuuuuuuuucuuuuuuugaaauaaaauagccugucuuucagaucucaaaggcucuuuucagagccaccaaaaaaaaaaaaaaaaaaaaaaaaaaaaaaaaaaaaaaaaaaaaaaaaaaaaaaaaaaaaaaaaagaauu

SEQ ID NO: 37103 - RNA, 1733 nt, Artificial Sequence
  mRNA product Design a-2 (hSL-A64-N5) comprising derived and/or modified sequence from LASV(Lassa virus/H.sapiens-wt/NGA/2015/ISTH_0543;Clade II)__AVO03639__GPCmut10 (opt1)
aggagaguccgcucagccagguugcagaagcggcuuagcguguguccuaaucuucucucugcguguagguaggccugugccgcaaacaagcuuaccaugggccagaucaucaccuucuuccaggaggugccccacgucaucgaggaggugaugaacaucgugcugaucgcccucagccugcuggccauccucaaggggaucuacaacgucgcgaccugcggccuguucgggcugguguccuuccuccugcugugcggccgcagcugcuccacgaccuacaaggggguguacgagcuccagacccuggagcuggacauggccaaccucaacaugugcaugccgcugagcugcaccaagaacaacucccaccacuacaucauggucggcaacgagacgggccuggagcucacccugaccaacaccagcaucaucaaccacaaguucugcaaccuguccgacgcccacaagaagaaccucuacgaccacgcccugaugagcaucaucuccacguuccaccugagcauccccaacuucaaccaguacgaggccauguccugcgacuucaacgggggcaagaucagcgugcaguacaaccucucccacaccuacgcgguggacgccgccaaccacugcgggaccaucgccaacggcguccugcagaccuucaugcggauggcguggggcgggagcuacaucgcccuggacuccggcaaggggagcugggacugcaucaugacguccuaccaguaccucgugauccagaacaccaccugggaggaccacugccaguucagccgccccucccccaucggcuaccuggggcugcucagccagcggacccgcgacaucuacaucagccggcgccugcugggcacguucaccuggacccucuccgacagcgagggcaacgagacccccgggggcuacugccugacgcgguggaugcugaucgaggccgagcucaagugcuucgggaacaccgccguggccaagugcaacgagaagcacgacgaggaguucugcgacaugcugcgccuguucgacuucugcaagcaggcgauccggcgccucaagaccgaggcccagauguccauccagcugaucaacaaggccgucaacgcccugaucaacgaccagcucaucaugaagaaccaccuccgggacaucaugggcaucccguacugcaacuacagcaaguacugguaccugaaccacaccgugacggggaagaccucccugccccgcugcuggcuggugagcaacggcuccuaccugaacgagacccacuucagcgacgacaucgagcagcaggccgacaacaugaucaccgagcuccugcagaaggaguacaucgaccggcagggcaagacgccccuggggcuggucgaccucuucguguucuccaccagcuucuaccugaucuccaucuuccugcaccucgugaagaucccgacccaccgccacaucaccggcaagcccugccccaagccccaccggcugaaccacauggggaucugcagcugcggccuguacaagcacccggggguccccgugaaguggaagcgcugaggacuagucccuguucccagagcccacuuuuuuuucuuuuuuugaaauaaaauagccugucuuucagaucucaaaggcucuuuucagagccaccaaaaaaaaaaaaaaaaaaaaaaaaaaaaaaaaaaaaaaaaaaaaaaaaaaaaaaaaaaaaaaaaagaauu

SEQ ID NO: 37104 - RNA, 1733 nt, Artificial Sequence
  mRNA product Design a-2 (hSL-A64-N5) comprising derived and/or modified sequence from LASV(Lassa virus/H.sapiens-wt/NGA/2016/ISTH_0009;Clade II)__AVO03571__GPCmut10 (opt1)
aggagaguccgcucagccagguugcagaagcggcuuagcguguguccuaaucuucucucugcguguagguaggccugugccgcaaacaagcuuaccaugggccagaucaucaccuucuuccaggaggugccccacgucaucgaggaggugaugaacaucgugcugaucgcccucagccugcuggccauccucaaggggaucuacaacgucgcgaccugcggccugcuggggcucguguccuuccugcugcucugcggccgcagcugcuccacgaccuacaaggggguguacgagcugcagacccuggagcucgacauggccagccugaacaugugcaugccgcuguccugcaccaagaacaacagccaccacuacaucauggucggcaacgagacgggccucgagcugacccugaccaacaccuccaucaucaaccacaaguucugcaaccucagcgacgcccacaagaagaaccuguacgaccacgcccugauguccaucaucagcacguuccaccucuccauccccaacuucaaccaguacgaggccaugagcugcgacuucaacgggggccggaucuccgugcaguacaaccugagccacuccuacgcgguggacgccgccaaccacugcgggaccaucgccaacggcguccugcagaccuucaugcgcauggcguggggcgggagcuacaucgcccucgacuccggcaaggggagcugggacugcaucaugaccuccuaccaguaccugaucauccagaacacgaccugggaggaccacugccaguucagccggcccagccccaucggcuaccuggggcuccugucccagcgcacccgggacaucuacaucagccgccggcugcucggcaccuucacguggacccuguccgacagcgagggcaacgagacccccgggggcuacugccugacccgcuggaugcucaucgaggccgagcugaagugcuucgggaacacggccguggccaagugcaacgagaagcacgacgaggaguucugcgacaugcugcggcuguucgacuucugcaagcaggcgauccgccggcugaagaccgaggcccagauguccauccagcugaucaacaaggccgugaacgcccucaucaacgaccagcugaucaugaagaaccaccuccgcgacaucaugggcauccccuacugcaacuacagcaaguacugguaccucaaccacaccgucaccgggaagacgucccugccccggugcuggcuggugagcaacggcuccuaccucaacgagacccacuucagcgacgacaucgagcagcaggccgacaacaugaucaccgagcugcugcagaaggaguacaucgaccgccagggcaagaccccgcuggggcucguggaccuguucgucuucuccacgagcuucuaccugaucuccaucuuccuccaccuggugaagaucccgacccaccggcacaucaccggcaagcccugccccaagccccaccgccugaaccacauggggaucugcagcugcggccucuacaaccacccgggggugcccgucaaguggaagcggugaggacuagucccuguucccagagcccacuuuuuuuucuuuuuuugaaauaaaauagccugucuuucagaucucaaaggcucuuuucagagccaccaaaaaaaaaaaaaaaaaaaaaaaaaaaaaaaaaaaaaaaaaaaaaaaaaaaaaaaaaaaaaaaaagaauu

SEQ ID NO: 37105 - RNA, 1733 nt, Artificial Sequence
  mRNA product Design a-2 (hSL-A64-N5) comprising derived and/or modified sequence from LASV(Lassa virus/H.sapiens-wt/NGA/2016/ISTH_0017;Clade II)__AVO03567__GPCmut10 (opt1)
aggagaguccgcucagccagguugcagaagcggcuuagcguguguccuaaucuucucucugcguguagguaggccugugccgcaaacaagcuuaccaugggccagaucaucaccuucuuccaggaggugccccacgucaucgaggaggugaugaacaucgugcugaucgcccucagccugcuggccauccucaaggggaucuacaacgucgcgaccugcggccuguucgggcugguguccuuccuccugcugugcggccgcagcugcuccacgaccuacaaggggguguacgagcuccagacccuggagcuggacauggccagccucaacaugugcaugccgcuguccugcaccaagaacaacagccaccacuacaucauggucggcaacgagacgggccuggagcucacccugaccaacaccuccaucaucaaccacaaguucugcaaccugagcgacgcccacaagaagaaccucuacgaccacgcccugauguccaucaucagcacguuccaccuguccauccccaacuucaaccaguacgaggccaugagcugcgacuucaacgggggcaagaucuccgugcaguacaaccucagccacaccuacgcgaucgacgccgccaaccacugcgggaccaucgccaacggcgugcugcagaccuucaugcggauggcguggggcggguccuacaucgcccuggacagcggcaagggguccugggacugcaucaugacgagcuaccaguaccucaucauccagaacaccaccugggaggaccacugccaguucucccgccccagccccaucggcuaccuggggcugcucagccagcggacccgcgacaucuacaucucccggcgccugcugggcacguucaccuggacccucagcgacuccgagggcaacgagacccccgggggcuacugccugacgcgguggaugcugaucgaggccgagcucaagugcuucgggaacaccgccgucgccaagugcaacgagaagcacgacgaggaguucugcgacaugcugcgccuguucgacuucugcaagcaggcgauccggcgccucaagaccgaggcccagaugagcauccagcugaucaacaaggccgugaacgcccugaucaacgaccagcucaucaugaagaaccaccuccgggacaucaugggcaucccguacugcaacuacuccaaguacugguaccugaaccacaccgugacggggaagaccagccugccccgcugcuggcuggucuccaacggcagcuaccugaacgagacccacuucuccgacgacaucgagcagcaggccgacaacaugaucaccgagcuccugcagaaggaguacauggaccggcagggcaagacgccccuggggcugguggaccucuucguguucagcaccuccuucuaccugaucagcaucuuccugcaccucguccgcaucccgacccaccggcacgugaucggcaagcccugccccaagccccaccgccugaaccacauggggaucugcuccugcggccuguacaagcacccgggggugcccgucaaguggaagcggugaggacuagucccuguucccagagcccacuuuuuuuucuuuuuuugaaauaaaauagccugucuuucagaucucaaaggcucuuuucagagccaccaaaaaaaaaaaaaaaaaaaaaaaaaaaaaaaaaaaaaaaaaaaaaaaaaaaaaaaaaaaaaaaaagaauu

SEQ ID NO: 37106 - RNA, 1733 nt, Artificial Sequence
  mRNA product Design a-2 (hSL-A64-N5) comprising derived and/or modified sequence from LASV(Lassa virus/H.sapiens-wt/NGA/2018/ISTH_0959;Clade II)__AVV65099__GPCmut10 (opt1)
aggagaguccgcucagccagguugcagaagcggcuuagcguguguccuaaucuucucucugcguguagguaggccugugccgcaaacaagcuuaccaugggccagaucaucaccuucuuccaggaggugccccacgucaucgaggaggugaugaacaucgugcugaucgcccucagccugcuggccauccucaaggggaucuacaacgucgugaccugcggccuguucgggcugguguccuuccuccugcugugcggccgcagcugcuccacgaccuacaagggggucuacgagcuccagacccuggagcuggacauggcgagccucaacaugugcaugccgcuguccugcaccaagaacaacagccaccacuacaucauggugggcaacgagacgggccuggagcucacccugaccaacaccuccaucaucaaccacaaguucugcaaccugagcgacgcccacaagaagaaccucuacgaccacgcccugauguccaucaucagcacguuccaccuguccauccccaacuucaaccaguacgaggccaugagcugcgacuucaacgggggcaagaucuccgugcaguacaaccucagccacgccuacgcgaucgacgccgccaaccacugcgggaccaucgccaacggcguccugcagaccuucaugcggauggcguggggcggguccuacaucgcccuggacagcggcaagggguccugggacugcaucaugaccagcuaccaguaccucaucauccagaacacgaccugggaggaccacugccaguucucccgccccagccccaucggcuaccuggggcugcucagccagcggacccgcgacaucuacaucucccggcgccugcugggcaccuucacguggacccucagcgacuccgagggcaacgagacccccgggggcuacugccugacccgguggaugcugaucgaggccgagcucaagugcuucgggaacacggccguggccaagugcaacgagaagcacgacgaggaguucugcgacaugcugcgccuguucgacuucugcaagcaggcgauccggcgccucaagaccgaggcccagaugagcauccagcugaucaacaaggccgugaacgcccugaucaacgaccagcucaucaugaagaaccaccuccgggacaucaugggcauccccuacugcaacuacuccaaguacugguaccugaaccacaccgucaccgggaagacgagccugccccgcugcuggcugguguccaacggcagcuaccugaacgagacccacuucuccgacgacaucgagcagcaggccgacaacaugaucaccgagcuccugcagaaggaguacaucgaccggcagggcaagaccccgcuggggcugguggaccucuucgucuucagcacguccuucuaccugaucagcaucuuccugcaccucgugaagaucccgacccaccgccacgugaucggcaagcccugccccaagccccaccggcugaaccacauggggaucugcuccugcggccuguacaagcacccggggguccccgugaaguggaagcgcugaggacuagucccuguucccagagcccacuuuuuuuucuuuuuuugaaauaaaauagccugucuuucagaucucaaaggcucuuuucagagccaccaaaaaaaaaaaaaaaaaaaaaaaaaaaaaaaaaaaaaaaaaaaaaaaaaaaaaaaaaaaaaaaaagaauu

SEQ ID NO: 37107 - RNA, 1733 nt, Artificial Sequence
  mRNA product Design a-2 (hSL-A64-N5) comprising derived and/or modified sequence from LASV(LASV003-NIG-2008;Clade II)__AIT17580__GPCmut10 (opt1)
aggagaguccgcucagccagguugcagaagcggcuuagcguguguccuaaucuucucucugcguguagguaggccugugccgcaaacaagcuuaccaugggccagaucaucaccuucuuccaggaggugccccacgucaucgaggaggugaugaacaucgugcugaucgcccucagccugcuggccauccucaaggggaucuacaacgucgcgaccugcggccuguucgggcugguguccuuccuccugcugugcggccgcagcugcuccacgaccuacaaggggguguacgagcuccagacccuggagcuggacauggccagccucaacaugugcaugccgcuguccugcaccaagaacaacagccaccacuacaucauggucggcaacgagacgggccuggagcucacccugaccaacaccuccaucaucaaccacaaguucugcaaccugagcgacgcccacaagaagaaccucuacgaccacgcccugauguccaucaucagcacguuccaccuguccauccccaacuucaaccaguacgaggccaugagcugcgacuucaacgggggcaagaucuccgugcaguacaaccucagccacaccuacgcgguggacgccgccaaccacugcgggaccaucgccaacggcguccugcagaccuucaugcggauggcguggggcggguccuacaucgcccuggacagcggcaagggguccugggacugcaucaugacgagcuaccaguaccucaucauccagaacaccaccugggaggaccacugccaguucucccgccccagccccaucggcuaccuggggcugcucagccagcggacccgcgacaucuacaucucccggcgccugcugggcacguucaccuggacccucagcgacuccgagagcaacgagaccccgggcggguacugccugacgcgguggaugcugaucgaggccgagcucaagugcuucggcaacaccgccguggccaagugcaacgagaagcacgacgaggaguucugcgacaugcugcgccuguucgacuucugcaagcaggcgauccggcgccucaaggccgaggcccagauguccauccagcugaucaacaaggccgugaacgcccugaucaacgaccagcucaucaugaagaaccaccuccgggacaucauggggauccccuacugcaacuacagcaaguacugguaccugaaccacaccgucaccggccgcacgucccugccccggugcuggcuggugagcaacggguccuaccugaacgagacccacuucagcgacgacaucgagcagcaggcggacaacaugaucaccgagcuccugcagaaggaguacauggaccgccagggcaagacgccccugggccugguggaccucuucgucuucuccaccagcuucuaccugaucuccaucuuccugcaccucgugaagaucccgacccaccggcacgugaucgggaagcccugccccaagccccaccgccugaaccacaugggcaucugcagcugcgggcuguacaagcacccgggcguccccgugaaguggaagcggugaggacuagucccuguucccagagcccacuuuuuuuucuuuuuuugaaauaaaauagccugucuuucagaucucaaaggcucuuuucagagccaccaaaaaaaaaaaaaaaaaaaaaaaaaaaaaaaaaaaaaaaaaaaaaaaaaaaaaaaaaaaaaaaaagaauu

SEQ ID NO: 37108 - RNA, 1733 nt, Artificial Sequence
  mRNA product Design a-2 (hSL-A64-N5) comprising derived and/or modified sequence from LASV(LASV035-NIG-2009;Clade II)__AIT17588__GPCmut10 (opt1)
aggagaguccgcucagccagguugcagaagcggcuuagcguguguccuaaucuucucucugcguguagguaggccugugccgcaaacaagcuuaccaugggccagaucaucaccuucuuccaggaggugccccacgucaucgaggaggugaugaacaucgugcugaucgcccucagccugcuggccauccucaaggggaucuacaacgucgcgaccugcggccuguucgggcugguguccuuccuccugcugugcggccgcagcugcuccacgaccuacaaggggguguacgagcuccagacccuggagcuggacauggccagccucaacaugugcaugccgcuguccugcaccaagaacaacagccaccacuacaucauggucggcaacgagacgggccuggagcucacccugaccaacaccuccaucaucaaccacaaguucugcaaccugagcgacgcccacaagaagaaccucuacgaccacgcccugauguccaucaucagcacguuccaccuguccauccccaacuucaaccaguacgaggccaugagcugcgacuucaacgggggcaagaucuccgugcaguacaaccucagccacgcguacgccguggacgccgccaaccacugcgggaccaucgcgaacggcguccugcagaccuucaugcggauggccuggggcggguccuacaucgcccuggacagcggcaagggguccugggacugcaucaugaccagcuaccaguaccucaucauccagaacacgaccugggaggaccacugccaguucucccgccccagccccaucggcuaccuggggcugcucagccagcggacccgcgacaucuacaucucccggcgccugcugggcaccuucacguggacccucagcgacuccgagggcaacgagacccccgggggcuacugccugacccgguggaugcugaucgaggccgagcucaagugcuucgggaacacggccguggcgaagugcaacgagaagcacgacgaggaguucugcgacaugcugcgccuguucgacuucugcaagcaggccauccggcgccucaaggccgaggcccagaugagcauccagcugaucaacaaggccgugaacgcgcugaucaacgaccagcucaucaugaagaaccaccuccgggacaucaugggcauccccuacugcaacuacuccaaguacugguaccugaaccacaccgucaccgggaagaccagccugccccgcugcuggcugguguccaacggcagcuaccugaacgagacgcacuucuccgacgacaucgagcagcaggccgacaacaugaucaccgagcuccugcagaaggaguacaucgaccggcagggcaagaccccgcuggggcugguggaccucuucgucuucagcaccuccuucuaccugaucagcaucuuccugcaccucgugaagaucccgacgcaccgccacgugaucggcaagcccugccccaagccccaccggcugaaccacauggggaucugcuccugcggccuguacaagcacccggggguccccgugaaguggaagcgcugaggacuagucccuguucccagagcccacuuuuuuuucuuuuuuugaaauaaaauagccugucuuucagaucucaaaggcucuuuucagagccaccaaaaaaaaaaaaaaaaaaaaaaaaaaaaaaaaaaaaaaaaaaaaaaaaaaaaaaaaaaaaaaaaagaauu

SEQ ID NO: 37109 - RNA, 1733 nt, Artificial Sequence
  mRNA product Design a-2 (hSL-A64-N5) comprising derived and/or modified sequence from LASV(LASV1000-NIG-2009;Clade II)__AIT17782__GPCmut10 (opt1)
aggagaguccgcucagccagguugcagaagcggcuuagcguguguccuaaucuucucucugcguguagguaggccugugccgcaaacaagcuuaccaugggccagaucaucaccuucuuccaggaggugccccacgucaucgaggaggugaugaacaucgugcugaucgcccucagccugcuggccauccucaaggggaucuacaacgucgcgaccugcggccuguucgggcugguguccuuccuccugcugugcggccgcagcugcuccacgaccuacaaggggguguacgagcuccagacccuggagcuggacauggccagccucaacaugugcaugccgcuguccugcaccaagaacaacagccaccacuacaucauggucggcaacgagacgggccuggagcucacccugaccaacaccuccaucaucaaccacaaguucugcaaccugagcgacgcccacaagaagaaccucuacgaccacgcccugauguccaucaucagcacguuccaccuguccauccccaacuucaaccaguacgaggccaugagcugcgacuucaacgggggcaagaucuccgugcaguacaaccucagccacaccuacgcgguggacgccgccaaccacugcgggaccaucgccaacggcguccugcagaccuucaugcggauggcguggggcggguccuacaucgcccuggacagcggcaagggguccugggacugcaucaugacgagcuaccaguaccucaucauccagaacaccaccugggaggaccacugccaguucucccgccccagccccaucggcuaccuggggcugcucagccagcggacccgcgacaucuacaucucccggcgccugcugggcacguucaccuggacccucagcgacuccgagggcaacgagacccccgggggcuacugccugacgcgguggaugcugaucgaggccgagcucaagugcuucgggaacaccgccguggccaagugcaacgagaagcacgacgaggaguucugcgacaugcugcgccuguucgacuucugcaagcaggcgaucaagcggcucaagaccgaggcccagaugagcauccagcugaucaacaaggccgugaacgcccugaucaacgaccagcucaucaugaagaaccaccuccgcgacaucaugggcaucccguacugcaacuacuccaaguacugguaccugaaccacaccgucacggggaagaccagccugccccggugcuggcugguguccaacggcagcuaccugaacgagacccacuucuccgacgacaucgagcagcaggccgacaacaugaucaccgagcuccugcagaaggaguacaucgaccgccagggcaagacgccccuggggcugguggaccucuucgucuucagcaccuccuucuaccugaucagcaucuuccugcaccucgugaagaucccgacccaccggcacguggucggcaagcccugccccaagccccaccgccugaaccacauggggaucugcuccugcggccuguacaagcacccgggggugcccgugaaguggaagcggugaggacuagucccuguucccagagcccacuuuuuuuucuuuuuuugaaauaaaauagccugucuuucagaucucaaaggcucuuuucagagccaccaaaaaaaaaaaaaaaaaaaaaaaaaaaaaaaaaaaaaaaaaaaaaaaaaaaaaaaaaaaaaaaaagaauu

SEQ ID NO: 37110 - RNA, 1733 nt, Artificial Sequence
  mRNA product Design a-2 (hSL-A64-N5) comprising derived and/or modified sequence from LASV(LASV221-NIG-2010;Clade II)__AIT17624__GPCmut10 (opt1)
aggagaguccgcucagccagguugcagaagcggcuuagcguguguccuaaucuucucucugcguguagguaggccugugccgcaaacaagcuuaccaugggccagaucaucaccuucuuccaggaggugccccacgucaucgaggaggugaugaacaucgugcugaucgcccucagccugcuggccauccucaaggggaucuacaacgucgcgaccugcggccuguucgggcugguguccuuccuccugcugugcggccgcagcugcuccacgaccuacaaggggguguacgagcuccagacccuggagcuggacauggccagccucaacaugugcaugccgcuguccugcaccaagaacaacagccaccacuacaucauggucggcaacgagacgggccuggagcucacccugaccaacaccuccaucaucaaccacaaguucugcaaccugagcgacgcccacaagaagaaccucuacgaccacgcccugauguccaucaucagcacguuccaccuguccauccccaacuucaaccaguacgaggccaugagcugcgacuucaacgggggcaagaucuccgugcaguacaaccucagccacaccuacgcgaucgacgccgccaaccacugcgggaccaucgccaacggcgugcugcagaccuucaugcggauggcguggggcggguccuacaucgcccuggacagcggcaagggguccugggacugcaucaugacgagcuaccaguaccucaucauccagaacaccaccugggaggaccacugccaguucucccgccccagccccaucggcuaccuggggcugcucagccagcggacccgcgacaucuacaucucccggcgccugcugggcacguucaccuggacccucagcgacuccgagggcaacgagacccccgggggcuacugccugacgcgguggaugcugaucgaggccgagcucaagugcuucgggaacaccgccgucgccaagugcaacgagaagcacgacgaggaguucugcgacaugcugcgccuguucgacuucugcaagcaggcgauccggcgccucaagaccgaggcccagaugagcauccagcugaucaacaaggccgugaacgcccugaucaacgaccagcucaucaugaagaaccaccuccgggacaucaugggcaucccguacugcaacuacuccaaguacugguaccugaaccacaccgugacggggaagaccagccugccccgcugcuggcuggucuccaacggcagcuaccugaacgagacccacuucuccgacgacaucgagcagcaggccgacaacaugaucaccgagaugcuccagaaggaguacauggaccggcagggcaagacgccccuggggcugguggaccuguucguguucagcaccuccuucuaccucaucagcaucuuccugcaccuggucaagaucccgacccaccgccacgugaucggcaagcccugccccaagccccaccggcucaaccacauggggaucugcuccugcggccuguacaagcacccgggggugcccgucaaguggaagcgcugaggacuagucccuguucccagagcccacuuuuuuuucuuuuuuugaaauaaaauagccugucuuucagaucucaaaggcucuuuucagagccaccaaaaaaaaaaaaaaaaaaaaaaaaaaaaaaaaaaaaaaaaaaaaaaaaaaaaaaaaaaaaaaaaagaauu

SEQ ID NO: 37111 - RNA, 1733 nt, Artificial Sequence
  mRNA product Design a-2 (hSL-A64-N5) comprising derived and/or modified sequence from LASV(LASV237-NIG-2010;Clade II)__AIT17638__GPCmut10 (opt1)
aggagaguccgcucagccagguugcagaagcggcuuagcguguguccuaaucuucucucugcguguagguaggccugugccgcaaacaagcuuaccaugggccagaucaucaccuucuuccaggaggugccccacgucaucgaggaggugaugaacaucgugcugaucgcccucagccugcuggccauccucaaggggaucuacaacgucgcgaccugcggccuguucgggcugguguccuuccuccugcugugcggccgcagcugcuccacgaccuacaaggggguguacgagcuccagacccuggagcuggacauggccagccucaacaugugcaugccgcuguccugcaccaagaacaacagccaccacuacaucauggucggcaacgagacgggccuggagcucacccugaccaacaccuccaucaucaaccacaaguucugcaaccugagcgacgcccacaagaaggaccucuacgaccacgcccugauguccaucaucagcacguuccaccuguccauccccaacuucaaccaguacgaggccaugagcugcgacuucaacgggggcaagaucuccgugcaguacaaccucagccacaccuacgcgguggacgccgccaaccacugcgggaccaucgccaacggcguccugcagaccuucaugcggauggcguggggcggguccuacaucgcccuggacagcggcaagggguccugggacugcaucaugacgagcuaccaguaccucaucauccagaacaccaccugggaggaccacugccaguucucccgccccagccccaucggcuaccuggggcugcucagccagcggacccgcgacaucuacaucucccggcgccugcugggcacguucaccuggacccucagcgacuccgagggcaacgagacccccgggggcuacugccugacgcgguggaugcugaucgaggccgagcucaagugcuucgggaacaccgccguggccaagugcaacgagaagcacgacgaggaguucugcgacaugcugcgccuguucgacuucugcaagcaggcgauccggcgccucaagaccgaggcccagaugagcauccagcugaucaacaaggccgugaacgcccugaucaacgaccagcucaucaugaagaaccaccuccgggacaucaugggcaucccguacugcaacuacuccaaguacugguaccugaaccacaccgucacggggaagaccagccugccccgcugcuggcugguguccaacggcagcuaccugaacgagacccacuucuccgacgacaucgagcagcaggccgacaacaugaucaccgagcuccugcagaaggaguacauggaccggcagggcaagacgccccuggggcugguggaccucuucgucuucagcaccuccuucuaccugaucagcaucuuccugcaccucaucaagaucccgacccaccgccacaucaccggcaagcccugccccaagccccaccggcugaaccacauggggaucugcuccugcggccuguacaagcacccgggggugcccgugaaguggaagcgcugaggacuagucccuguucccagagcccacuuuuuuuucuuuuuuugaaauaaaauagccugucuuucagaucucaaaggcucuuuucagagccaccaaaaaaaaaaaaaaaaaaaaaaaaaaaaaaaaaaaaaaaaaaaaaaaaaaaaaaaaaaaaaaaaagaauu

SEQ ID NO: 37112 - RNA, 1733 nt, Artificial Sequence
  mRNA product Design a-2 (hSL-A64-N5) comprising derived and/or modified sequence from LASV(LASV253-NIG-2011;Clade II)__AIT17670__GPCmut10 (opt1)
aggagaguccgcucagccagguugcagaagcggcuuagcguguguccuaaucuucucucugcguguagguaggccugugccgcaaacaagcuuaccaugggccagaucaucaccuucuuccaggaggugccccacgucaucgaggaggugaugaacaucgugcugaucgcccucagccugcuggccauccucaaggggaucuacaacgucgcgaccugcggccuguucgggcugguguccuuccuccugcugugcggccgcagcugcuccacgaccuacaaggggguguacgagcuccagacccuggagcuggacauggccagccucaacaugugcaugccgcuguccugcaccaagaacaacagccaccacuacaucauggucggcaacgagacgggccuggagcucacccugaccaacaccuccaucaucaaccacaaguucugcaaccugagcgacgcccacaagaagaaccucuacgaccacgcccugauguccaucaucagcacguuccaccuguccauccccaacuucaaccaguacgaggccaugagcugcgacuucaacgggggcaagaucuccgugcaguacaaccucagccacaccuacgcgguggacgccgccaaccacugcgggaccaucgccaacggcguccugcagaccuucaugcggauggcguggggcggguccuacaucgcccuggacagcggcaagggguccugggacugcaucaugacgagcuaccaguaccucaucauccagaacaccaccugggaggaccacugccaguucucccgccccagccccaucggcuaccuggggcugcucagccagcggacccgcgacaucuacaucucccggcgccugcugggcacguucaccuggacccucagcgacuccgagggcaacgagacccccgggggcuacugccugacgcgguggaugcugaucgaggccgagcucaagugcuucgggaacaccgccguggccaagugcaacgagaagcacgacgaggaguucugcgacaugcugcgccuguucgacuucugcaagcaggcgauccggcgccucaaggccgaggcccagaugagcauccagcugaucaacaaggccgugaacgcccugaucaacgaccagcucaucaugaagaaccaccuccgggacaucaugggcauccccuacugcaacuacuccaaguacugguaccugaaccacaccgucaccgggcgcacgagccugccccggugcuggcugguguccaacggcagcuaccugaacgagacccacuucuccgacgacaucgagcagcaggcggacaacaugaucaccgagcuccugcagaaggaguacaucgaccgccagggcaagaccccgcuggggcugguggaccucuucgucuucagcacguccuucuaccugaucagcaucuuccugcaccucgugaagaucccgacccaccggcacaucaucggcaagcccugccccaagccccaccgccugaaccacauggggaucugcuccugcggccuguacaagcacccgggggugcccgucaaguggaagcggugaggacuagucccuguucccagagcccacuuuuuuuucuuuuuuugaaauaaaauagccugucuuucagaucucaaaggcucuuuucagagccaccaaaaaaaaaaaaaaaaaaaaaaaaaaaaaaaaaaaaaaaaaaaaaaaaaaaaaaaaaaaaaaaaagaauu

SEQ ID NO: 37113 - RNA, 1733 nt, Artificial Sequence
  mRNA product Design a-2 (hSL-A64-N5) comprising derived and/or modified sequence from LASV(LASV254-NIG-2011;Clade II)__AIT17674__GPCmut10 (opt1)
aggagaguccgcucagccagguugcagaagcggcuuagcguguguccuaaucuucucucugcguguagguaggccugugccgcaaacaagcuuaccaugggccagaucaucaccuucuuccaggaggugccccacgucaucgaggaggugaugaacaucgugcugaucgcccucagccugcuggccauccucaaggggaucuacaacgucgcgaccugcggccuguucgggcugguguccuuccuccugcugugcggccgcagcugcuccacgaccuacaaggggguguacgagcuccagacccuggagcuggacaugaccaaccucaacaugugcaugccgcugagcugcacgaagaacaacucccaccacuacaucauggucggcaacgagaccggccuggagcucacccugaccaacacgagcaucaucaaccacaaguucugcaaccuguccgacgcccacaagaagaaccucuacaaccacgcccugaugagcaucaucuccaccuuccaccugagcauccccaacuucaaccaguacgaggccauguccugcgacuucaacgggggcaagaucagcgugcaguacaaccucucccacagcuacgccguggacgcggccaaccacugcgggaccaucgccaacggcguccugcagaccuucaugcggauggccuggggcggguccuacaucgcgcuggacagcggcaaggggaacugggacugcaucaugacguccuaccaguaccucaucauccagaacaccaccugggaggaccacugccaguucagccgccccucccccaucggcuaccuggggcugcucagccagcggacccgcgacaucuacaucagccggcgccugcugggcacguucaccuggacccucuccgacagcgagggcaacgagacccccgggggcuacugccugacgcgguggaugcugaucgaggccgagcucaagugcuucgggaacaccgccguggccaagugcaacgagaagcacgacgaggaguucugcgacaugcugcgccuguucgacuucugcaagcaggccauccggcgccucaagaccgaggcgcaggccaacauccagcugaucaacaaggccgugaacgcccugaucaacgaccagcucaucaugaagaaccaccuccgggacaucaugggcaucccguacugcaacuacuccaaguacugguaccugaaccacaccgucacggggaagaccagccugccccgcugcuggcugguguccaacggcagcuaccugaacgagacccacuucuccgacgacaucgagcagcaggccgacaacaugaucaccgagcuccugcagaaggaguacauggaccggcagggcaagacgccccuggggcugguggaccucuucgucuucagcaccuccuucuaccugaucagcaucuuccugcaccucgugaagaucccgacccaccgccacgugaucggcaagcccugccccaagccccaccggcugaaccacauggggaucugcuccugcggccuguacaagcacccggggguccccgugaaguggaagcgcugaggacuagucccuguucccagagcccacuuuuuuuucuuuuuuugaaauaaaauagccugucuuucagaucucaaaggcucuuuucagagccaccaaaaaaaaaaaaaaaaaaaaaaaaaaaaaaaaaaaaaaaaaaaaaaaaaaaaaaaaaaaaaaaaagaauu

SEQ ID NO: 37114 - RNA, 1733 nt, Artificial Sequence
  mRNA product Design a-2 (hSL-A64-N5) comprising derived and/or modified sequence from LASV(Nig08-A19;Clade III)__ADU56618__GPCmut10 (opt1)
aggagaguccgcucagccagguugcagaagcggcuuagcguguguccuaaucuucucucugcguguagguaggccugugccgcaaacaagcuuaccaugggccagaucgugaccuucuuccaggaggucccccacgugaucgaggaggugaugaacaucguccugaucgcccucagcauccuggccauccugaaggggcucuacaacaucgcgaccugcggccugaucgggcuggugacguuccuccugcuguccggccgcagcugcuccaugaccuacaaggggguguacgagcuccagacccuggagcugaacaugaacacccucaacaugugcaugccgcugagcugcacgaagaacaacucccaccacuacaucauggucggcaacgagaccggccuggagcucacccugaccaacacgagccugcuccaccacaaguucugcaaccuguccgacgcccacaagaagaaccuguacgaccacacccucaugagcaucaucuccaccuuccaccugagcauccccaacuucaaccaguacgaggccauguccugcgacuucaacgggggcaagaucaccgugcaguacaaccugagccacuccuacgccaucgacgccgcgaaccacugcgggacgguggccaacggcguccuccagaccuucaugcggauggccuggggcgggagcuacaucgcccuggacuccggccgcgggaagugggacugcaucaugaccagcuaccaguaccugaucauccagaacaccacgugggaggaccacugccaguucucccggcccagccccaucggcuaccucgggcugcugucccagcgcacccgggacaucuacaucagccgccggcuccugggcaccuucaccuggacgcugagcgacuccgagggcaacgagacccccgggggcuacugccucacccgcuggaugcugaucgaggcggagcugaagugcuucgggaacaccgccguggccaagugcaacgagaagcacgacgaggaguucugcgacaugcuccggcuguucgacuucugcaagcaggccauccgccggcugaaggccgaggcgcagaugagcauccagcucaucaacaaggccgugaacgcccugaucaacgaccagcugaucaugaagaaccaccuccgcgacaucaugggcauccccuacugcaacuacuccaaguacugguaccugaaccacacgagcaccgggcggaccucccugccccgcugcuggcucgucagcaacggcuccuaccugaacgagacccacuucagcgacgacaucgagcagcaggccgacaacaugaucacggagaugcugcagaaggaguaccuggaccggcagggcaagaccccgcucgggcugguggaccuguucguguucuccaccagcuucuaccucaucuccaucuuccugcaccuggucaagaucccgacccaccgccacaucgugggcaagcccugccccaagccccaccggcucaaccacauggggaucugcagcugcggccuguacaagcagccgggggugcccguccgcuggaagcggugaggacuagucccuguucccagagcccacuuuuuuuucuuuuuuugaaauaaaauagccugucuuucagaucucaaaggcucuuuucagagccaccaaaaaaaaaaaaaaaaaaaaaaaaaaaaaaaaaaaaaaaaaaaaaaaaaaaaaaaaaaaaaaaaagaauu

SEQ ID NO: 37115 - RNA, 1736 nt, Artificial Sequence
  mRNA product Design a-2 (hSL-A64-N5) comprising derived and/or modified sequence from LASV(G1180-SLE-2010;Clade IV)__AIT17168__GPCmut10 (opt1)
aggagaguccgcucagccagguugcagaagcggcuuagcguguguccuaaucuucucucugcguguagguaggccugugccgcaaacaagcuuaccaugggccagaucgugaccuucuuccaggaggucccccacgugaucgaggaggugaugaacaucguccugaucgcccucagcauccuggccgugcugaaggggcucuacaacuucgcgaccugcggccugguggggcugcucacguuccugcugcucugcggccgcuccugcaccgccagccgguacaagggggucuacgagcugcagacccuggagcucaacauggagacccugaacaugugcaugccgcuguccugcacgaagaacaacagccaccacuacaucauggugggcaacgagaccggccucgagcugacccugaccaacacguccaucaucaaccacaaguucugcaaccucagcgacgcccacaagaagaaccuguacgaccacgcccugauguccaucaucagcaccuuccaccucuccauccccaacuucaaccaguacgaggccaugagcugcgacuucaacgggggcaagaucuccgugcaguacaaccugagccacuccuacgcgggggacgccgccaaccacugcggcaccgucgccaacggggugcugcagaccuucaugcgcauggcguggggcggcagcuacaucgcccucgacuccgggcacggcagcugggacugcaucaugacguccuaccaguaccugaucauccagaacaccaccugggaggaccacugccaguucagccggcccucccccaucggguaccugggccuccugagccagcgcacccgggacaucuacaucagccgccggcugcucggcacguucaccuggacccuguccgacagcgaggggaaggacaccccgggcggguacugccugacgcgcuggaugcucaucgaggccgagcugaagugcuucggcaacaccgccguggccaagugcaacgagaagcacgacgaggaguucugcgacaugcugcggcuguucgacuucugcaagcaggcgauccagcgccugaaggccgaggcccagauguccauccagcugaucaacaaggccgucaacgcccucaucaacgaccagcugaucaugaagaaccaccuccgggacaucauggggauccccuacugcaacuacagcaaguacugguaccucaaccacaccaccacgggcaagaccucccugcccaagugcuggcuggugagcaacggcuccuaccucaacgagacccacuucagcgacgacaucgagcagcaggcggacaacaugaucaccgagaugcugcagaaggaguacauggagcgccaggggaagacgccccugggccugguggaccucuucgucuucuccaccagcuucuaccugaucuccaucuuccugcaccucgugaagaucccgacccaccggcacaucgugggcaagagcugccccaagccccaccgccugaaccacauggggaucugcuccugcgggcuguacaagcagcccggcgucccggugaaguggaagcggugaggacuagucccuguucccagagcccacuuuuuuuucuuuuuuugaaauaaaauagccugucuuucagaucucaaaggcucuuuucagagccaccaaaaaaaaaaaaaaaaaaaaaaaaaaaaaaaaaaaaaaaaaaaaaaaaaaaaaaaaaaaaaaaaagaauu

SEQ ID NO: 37116 - RNA, 1736 nt, Artificial Sequence
  mRNA product Design a-2 (hSL-A64-N5) comprising derived and/or modified sequence from LASV(G1442-SLE-2011;Clade IV)__AIT17180__GPCmut10 (opt1)
aggagaguccgcucagccagguugcagaagcggcuuagcguguguccuaaucuucucucugcguguagguaggccugugccgcaaacaagcuuaccaugggccagaucgugaccuucuuccaggaggucccccacgugaucgaggaggugaugaacaucguccugaucgcccucagcauccuggccgugcugaaggggcucuacaacguggcgaccugcggccugaucgggcuggucaccuuccuccugcugugcggccgcuccugcaccaccacccucuacaaggggguguacgagcugcagacgcuggagcucaacauggagacccugaacaugugcaugccgcugagcugcaccaagaacaacucccaccacuacauccgggugggcaacgagaccggccucgagcugacgcugaccaacaccagcaucaucaaccacaaguucugcaaccucuccgacgcccacaagaagaaccuguacgaccacgcccugaugagcaucaucuccaccuuccaccucagcauccccaacuucaaccaguacgaggccauguccugcgacuucaacgggggcaagaucagcguccaguacaaccugucccacagcuacgccggggacgcggccaaccacugcggcacgguggccaacggggugcugcagaccuucaugcgcauggccuggggcggcuccuacaucgcgcucgacagcgggcggggcaacugggacugcaucaugaccuccuaccaguaccugaucauccagaacaccacgugggacgaccacugccaguucagccgccccucccccaucggguaccugggccuccugagccagcggacccgcgacgucuacaucucccggcgccugcucggcaccuucaccuggacgcugagcgacagcgaggggaaggacaccccgggcggguacugccugacccgguggaugcucaucgaggccgagcugaagugcuucggcaacaccgccguggccaagugcaacgagaagcacgacgaggaguucugcgacaugcugcgccucuucgacuucugcaagcaggccauccagcggcugaaggcggaggcccagauguccauccagcugaucaacaaggccgugaacgcccucaucaacgaccagcugaucaugaagaaccaccuccgcgacaucauggggauccccuacugcaacuacagcaaguacugguaccugaacaacacggccaccggcaagaccucccugcccaagugcuggcugaucagcaacggcuccuaccucaacgagacccacuucagcgacgacaucgagcaggaggcggacaacaugaucacggagaugcugcagaaggaguacauggagcggcaggggaagacgccccugggccuggucgaccucuucguguucuccaccagcuucuaccugaucuccaucuuccugcaccucgugaagaucccgacccaccgccacaucgucggcaagagcugccccaagccccaccggcugaaccacauggggaucugcuccugcgggcuguacaagcagcccggcgugccggugcgcuggaagcggugaggacuagucccuguucccagagcccacuuuuuuuucuuuuuuugaaauaaaauagccugucuuucagaucucaaaggcucuuuucagagccaccaaaaaaaaaaaaaaaaaaaaaaaaaaaaaaaaaaaaaaaaaaaaaaaaaaaaaaaaaaaaaaaaagaauu

SEQ ID NO: 37117 - RNA, 1736 nt, Artificial Sequence
  mRNA product Design a-2 (hSL-A64-N5) comprising derived and/or modified sequence from LASV(G3010-SLE-2013;Clade IV)__AIT17344__GPCmut10 (opt1)
aggagaguccgcucagccagguugcagaagcggcuuagcguguguccuaaucuucucucugcguguagguaggccugugccgcaaacaagcuuaccaugggccagaucgugaccuucuuccaggaggucccccacgugaucgaggaggugaugaacaucguccugaucgcccucagcauccuggccgugcugaaggggcucuacaacuucgcgaccugcggccugguggggcuggucacguuccuccugcugugcggccgcuccugcaccaccagccucuacaaggggguguacgagcugcagacccuggagcucaacauggagacgcugaacaugugcaugccgcuguccugcaccaagaacaacagccaccacuacaucauggugggcaacgagaccggccucgagcugacccugacgaacaccuccaucaucaaccacaaguucugcaaccucagcgacgcccacaagaagaaccuguacaaccacgcccugauguccaucaucagcaccuuccaccucuccauccccaacuucaaccaguacgaggccaugagcugcgacuucaacgggggcaagaucuccguccaguacaaccugagccacuccuacgccggggacgcggccagccacugcggcaccguggccaacggggugcugcagacguucaugcggauggccuggggcggcuccuacaucgcgcucgacagcggguacggcaagugggacugcaucaugaccuccuaccaguaccugaucauccagaacaccaccugggaggaccacugccaguucagccgccccucccccaucggguaccugggccuccugagccagcggacgcgcgacaucuacaucagccggcgccugcucggcaccuucaccuggacccuguccgacagcgaggggaaggacacgccgggcggguacugccugacccgguggaugcucaucgaggccgagcugaagugcuucggcaacaccgccgucgccaagugcaacgagaagcacgacgaggaguucugcgacaugcugcgccucuucgacuucugcaagcaggccauccagcggcugaagaccgaggcgcagauguccauccagcugaucaacaaggccgugaacgcccucaucaacgaccagcugaucaugaagaaccaccuccgcgacaucauggggauccccuacugcaacuacagcaaguacugguaccugaaccacacgaccaccggcaagaccucccugcccaagugcuggcuggugagcaacggcuccuaccucaacgagacgcacuucagcgacgacaucgagcagcaggccgacaacaugaucaccgagaugcugcagaaggaguacauggagcggcaggggaagacgccccugggccuggucgaccucuucguguucuccaccagcuucuaccugaucuccaucuuccugcaccucgugaagaucccgacccaccgccacaucgucggcaagagcugccccaagccccaccggcugaaccacauggggaucugcuccugcgggcuguacaagcagcccggcgugccggugcgcuggaagcggugaggacuagucccuguucccagagcccacuuuuuuuucuuuuuuugaaauaaaauagccugucuuucagaucucaaaggcucuuuucagagccaccaaaaaaaaaaaaaaaaaaaaaaaaaaaaaaaaaaaaaaaaaaaaaaaaaaaaaaaaaaaaaaaaagaauu

SEQ ID NO: 37118 - RNA, 1736 nt, Artificial Sequence
  mRNA product Design a-2 (hSL-A64-N5) comprising derived and/or modified sequence from LASV(G502-SLE-2009;Clade IV)__AIT17126__GPCmut10 (opt1)
aggagaguccgcucagccagguugcagaagcggcuuagcguguguccuaaucuucucucugcguguagguaggccugugccgcaaacaagcuuaccaugggccagaucgugaccuucuuccaggaggucccccacgugaucgaggaggugaugaacaucguccugaucgcccucagcauccuggccgugcugaaggggcucuacaacuucgcgaccugcggccugguggggcugcucacguuccugcugcucugcggccgcuccugcaccaccgggcuguacaagggcgucuacgagcugcagacccucgagcugaacauggagacgcugaacaugugcaugccgcucagcugcaccaagaacaacucccaccacuacaucauggugggcaacgagaccgggcuggagcugacccucacgaacaccagcaucaucaaccacaaguucugcaaccuguccgacgcccacaagaagaaccuguacgaccacgcccucaugagcaucaucuccaccuuccaccugagcauccccaacuucaaccaguacgaggccauguccugcgacuucaacggcgggaagaucagcgugcaguacaaccugucccacagcuacgccggcgacgcggccgaccacugcgggaccgucgccaacggcgugcuccagacguucaugcggauggccuggggcggguccuacaucgcgcuggacagcggccgcgggcggugggacugcaucaugaccuccuaccaguaccugaucauccagaacaccaccugggaggaccacugccaguucagccgccccucccccaucggcuaccucggccugcugagccagcggacgcgcgacaucuacaucucccggcgccuccuggggaccuucaccuggacccugagcgacagcgagggcaaggacacgcccgggggcuacugccucacccgguggaugcugaucgaggccgagcugaagugcuucgggaacaccgccguggccaagugcaacgagaagcacgacgaggaguucugcgacaugcuccgccuguucgacuucugcaagcaggccauccagcggcugaaggcggaggcccagauguccauccagcucaucaacaaggccgucaacgcccugaucaacgaccagcuggugaugaagaaccaccuccgcgacaucaugggcauccccuacugcaacuacagccgguacugguaccugaaccacaccacgaccggccgcaccucccugcccaagugcuggcucgugagcaacggguccuaccugaacgagacccacuucagcgacgacaucgagcagcaggccgacaacaugaucacggagaugcugcagaaggaguacauggagcggcagggcaagaccccgcuggggcucgucgaccuguucguguucuccaccagcuucuaccugaucuccaucuuccuccaccuggugaagaucccgacccaccgccacaucgucggcaagagcugccccaagccccaccggcugaaccacauggggaucugcuccugcggccucuacaagcagcccggcgugccggugaaguggaagcgcugaggacuagucccuguucccagagcccacuuuuuuuucuuuuuuugaaauaaaauagccugucuuucagaucucaaaggcucuuuucagagccaccaaaaaaaaaaaaaaaaaaaaaaaaaaaaaaaaaaaaaaaaaaaaaaaaaaaaaaaaaaaaaaaaagaauu

SEQ ID NO: 37119 - RNA, 1736 nt, Artificial Sequence
  mRNA product Design a-2 (hSL-A64-N5) comprising derived and/or modified sequence from LASV(G733-SLE-2010;Clade IV)__AIT17154__GPCmut10 (opt1)
aggagaguccgcucagccagguugcagaagcggcuuagcguguguccuaaucuucucucugcguguagguaggccugugccgcaaacaagcuuaccaugggccagaucgugaccuucuuccaggaggucccccacgugaucgaggaggugaugaacaucguccugaucgcccucagcauccuggccgugcugaaggggcucuacaacuucgcgaccugcggcaucguggggcuggucuccuuccugcuccugugcggccgcagcugcacgaccucccuguacaaggggguguacgagcuccagacccuggagcugaacauggagacccucaacaugugcaugccgcugagcugcacgaagaacaacucccaccacuacaucauggugggcaacgagaccggccuggagcucacccugaccaacacgagcaucaucaaccacaaguucugcaaccuguccgacgcccacaagaagaaccucuacgaccacgcccugaugagcaucaucuccaccuuccaccugagcauccccaacuucaaccaguacgaggccauguccugcgacuucaacgggggcaagaucagcguccaguacaaccucucccacagcuacgccggggacgcggccaaccacugcggcaccaucgccaacggggugcugcagaccuucaugcggauggccuggggcggcuccuacaucgcgcuggacagcgggcgcgaccggugggacugcaucaugacguccuaccaguaccucaucauccagaacaccaccugggaggaccacugccaguucagccgccccucccccaucggcuaccuggggcugcucagccagcggacccgcgacaucuacaucagccggcgccugcugggcacguucaccuggacccucuccgacagcgagggcaaggacacccccgggggcuacugccugacgcgguggaugcugaucgaggccgagcucaagugcuucgggaacaccgccguggccaagugcaacgagaagcacgacgaggaguucugcgacaugcugcgccuguucgacuucugcaagcaggccauccagcggcucaaggcggaggcccagauguccauccagcugaucaacaaggccgucaacgcccugaucaacgaccagcucaucaugaagaaccaccuccgcgacaucaugggcaucccguacugcaacuacagcaaguacugguaccugaaccacaccaccacggggaagaccucccugcccaagugcuggcuggugagcaacggcuccuaccugaacgagacccacuucagcgacgacaucgagcagcaggccgacaacaugaucaccgagaugcuccagaaggaguacauggagcggcagggcaagacgccccuggggcugguggaccuguucgucuucuccaccagcuucuaccucaucuccaucuuccugcaccuggugaagaucccgacccaccgccacguggucggcaagagcugccccaagccccaccggcucaaccacauggggaucugcuccugcggccuguacgggcagcccggcgugccggugaaguggaagcgcugaggacuagucccuguucccagagcccacuuuuuuuucuuuuuuugaaauaaaauagccugucuuucagaucucaaaggcucuuuucagagccaccaaaaaaaaaaaaaaaaaaaaaaaaaaaaaaaaaaaaaaaaaaaaaaaaaaaaaaaaaaaaaaaaagaauu

SEQ ID NO: 37120 - RNA, 1736 nt, Artificial Sequence
  mRNA product Design a-2 (hSL-A64-N5) comprising derived and/or modified sequence from MOPV/LASV reassortant(IGS-1;Clade IV)__AFY05576__GPCmut10 (opt1)
aggagaguccgcucagccagguugcagaagcggcuuagcguguguccuaaucuucucucugcguguagguaggccugugccgcaaacaagcuuaccaugggccagaucgugaccuucuuccaggaggucccccacgugaucgaggaggugaugaacaucguccugaucgcccucagcgugcuggccgugcugaaggggcucuacaacuucgcgaccugcggccuggucgggcuggugaccuuccuccugcugugcggccgcuccugcaccaccagccucuacaaggggguguacgagcugcagacccuggagcucaacauggagacgcugaacaugugcaugccgcuguccugcaccaagaacaacagccaccacuacaucauggucggcaacgagaccggccucgagcugacccugacgaacaccuccaucaucaaccacaaguucugcaaccucagcgacgcccacaagaagaaccuguacgaccacgcccugauguccaucaucagcaccuuccaccucuccauccccaacuucaaccaguacgaggccaugagcugcgacuucaacgggggcaagaucuccgugcaguacaaccugagccacuccuacgccggggacgcggccaaccacugcggcaccguggccaacgggguccugcagacguucaugcggauggccuggggcggcagcuacaucgcgcucgacuccgggcgcggcaacugggacugcaucaugaccagcuaccaguaccugaucauccagaacaccaccugggaggaccacugccaguucucccggcccagccccaucggguaccugggccuccugucccagcgcacgcgggacaucuacaucagccgccggcugcucggcaccuucaccuggacccugagcgacuccgagggggaggacacgccgggcggguacugccugacccgcuggaugcucaucgaggccgagcugaagugcuucggcaacaccgccguggccaagugcaacgagaagcacgacgaggaguucugcgacaugcugcggcuguucgacuucugcaagcaggccauccagcgccugaaggcggaggcccagaugagcauccagcugaucaacaaggccgugaacgcccucaucaacgaccagcugaucaugaagaaccaccuccgggacaucauggggauccccuacugcaacuacuccaaguacugguaccucaaccacaccacgaccggccgcaccagccugcccaagugcuggcuggucuccaacggcagcuaccucaacgagacccacuucuccgacgacaucgagcagcaggccgacaacaugaucacggagaugcugcagaaggaguacauggagcggcaggggaagacgccccugggccugguggaccucuucguguucagcaccuccuucuaccugaucagcaucuuccugcaccucgucaagaucccgacccaccgccacaucguggggaaguccugccccaagccccaccggcugaaccacaugggcaucugcagcugcgggcuguacaagcagcccggcgugccggucaaguggaagcgcugaggacuagucccuguucccagagcccacuuuuuuuucuuuuuuugaaauaaaauagccugucuuucagaucucaaaggcucuuuucagagccaccaaaaaaaaaaaaaaaaaaaaaaaaaaaaaaaaaaaaaaaaaaaaaaaaaaaaaaaaaaaaaaaaagaauu

SEQ ID NO: 37121 - RNA, 1736 nt, Artificial Sequence
  mRNA product Design a-2 (hSL-A64-N5) comprising derived and/or modified sequence from LASV(LM765-SLE-2012;Clade IV)__AIT17814__GPCmut10 (opt1)
aggagaguccgcucagccagguugcagaagcggcuuagcguguguccuaaucuucucucugcguguagguaggccugugccgcaaacaagcuuaccaugggccagaucgugaccuucuuccaggaggucccccacgugaucgaggaggugaugaacaucguccugaucgcccucagcauccuggccgugcugaaggggcucuacaacuucgcgaccugcggccugguggggcuggucacguuccuccugcugugcggccgcuccugcaccaccagccucuacaaggggguguacgagcugcagacccuggagcucaacauggagacgcugaacaugugcaugccgcuguccugcaccaagaacaacagccaccacuacaucauggugggcaacgagaccggccucgagcugacccugacgaacaccuccaucaucgaccacaaguucugcaaccucagcgacgcccaccggaagaaccuguacgaccacgcccugauguccaucaucagcaccuuccaccucuccauccccaacuucaaccaguacgaggccaugagcugcgacuucaacgggggcaagaucuccguccaguacaaccugagccacuccuacgccaaggacgcggccgaccacugcgggaccguggccaacggcgugcugcagacguucaugcgcauggccuggggcgggagcuacaucgcgcucgacuccggccgggggcgcugggacugcaucaugaccagcuaccaguaccugaucauccagaacaccaccugggaggaccacugccaguucucccggcccagccccaucggcuaccuggggcuccugucccagcgcacgcgggacaucuacaucagccgccggcugcucggcaccuucaccuggacccugagcgacuccgagggcaaggacacgcccgggggcuacugccugacccgcuggaugcucaucgaggccgagcugaagugcuucgggaacaccgccgucgccaagugcaacgagaagcacgacgaggaguucugcgacaugcugcggcuguucgacuucugcaagcaggccauccagcgccugaaggcggaggcccagaugagcauccagcugaucaacaaggccgugaacgcccucaucaacgaccagcugaucaugaagaaccaccuccgggacaucaugggcauccccuacugcaacuacuccaaguacugguaccucaaccacaccacgaccgggaagaccagccugcccaagugcuggcugguguccaacggcagcuaccucaacgagacccacuucuccgacgacaucgagcagcaggccgacaacaugaucacggagaugcugcagaaggaguacauggagcgccagggcaagaccccgcuggggcuggucgaccucuucguguucagcaccuccuucuaccugaucagcaucuuccugcaccucgugaagaucccgacccaccggcacaucgucggcaagcccugccccaagccccaccgccugaaccacauggggaucugcuccugcggccuguacaagcagccgggggugcccgugaaguggaagcggugaggacuagucccuguucccagagcccacuuuuuuuucuuuuuuugaaauaaaauagccugucuuucagaucucaaaggcucuuuucagagccaccaaaaaaaaaaaaaaaaaaaaaaaaaaaaaaaaaaaaaaaaaaaaaaaaaaaaaaaaaaaaaaaaagaauu

SEQ ID NO: 37122 - RNA, 1736 nt, Artificial Sequence
  mRNA product Design a-2 (hSL-A64-N5) comprising derived and/or modified sequence from LASV(LM776-SLE-2012;Clade IV)__AIT17824__GPCmut10 (opt1)
aggagaguccgcucagccagguugcagaagcggcuuagcguguguccuaaucuucucucugcguguagguaggccugugccgcaaacaagcuuaccaugggccagaucgugaccuucuuccaggaggucccccacgugaucgaggaggugaugaacaucguccugaucgcccucagcauccuggccgugcugaaggggcucuacaacuucgcgaccugcggccugguggggcuggucaccuuccuccugcugugcggccgcuccugcaccaccagcguguacaaggggguguacgagcuccagacccuggagcugaacauggagacgcucaacaugugcaugccgcuguccugcaccaagaacaacagccaccacuacaucauggucggcaacgagaccggccuggagcucacccugacgaacaccuccaucaucaaccacaaguucugcaaccugagcgacgcccacaagaagaaccucuacgaccacgcccugauguccaucaucagcaccuuccaccuguccauccccaacuucaaccaguacgaggccaugagcugcgacuucaacgggggcaagaucuccgugcaguacaaccucagccacuccuacgccggggacgcggccaaccacugcggcaccguggccaacgggguccugcagacguucaugcggauggccuggggcggcagcuacaucgcgcuggacuccgggcacggcaagugggacugcaucaugaccagcuaccaguaccucaucauccagaacaccaccugggaggaccacugccaguucucccgccccagccccaucggguaccugggccugcucucccagcggacgcgcgacaucuacaucagccggcgccugcugggcaccuucaccuggacccucagcgacuccgaggggaaggacacgccgggcggguacugccugacccgguggaugcugaucgaggccgagcucaagugcuucggcaacaccgccguggccaagugcaacgagaagcacgacgaggaguucugcgacaugcugcgccuguucgacuucugcaagcaggccauccagcggcucaaggcggaggcccagaugagcauccagcugaucaacaaggccgugaacgcccugaucaacgaccagcucaucaugaagaaccaccuccgcgacaucauggggauccccuacugcaacuacuccaaguacugguaccugaaccacaccacgaccggcaagaccagccugcccaagugcuggcuggucuccaacggcagcuaccugaacgagacccacuucuccgacgacaucgagcagcaggccgacaacaugaucacggagaugcuccagaaggaguacauggagcggcaggggaagacgccccugggccugguggaccuguucguguucagcaccuccuucuaccucaucagcaucuuccugcaccuggucaagaucccgacccaccgccacaucguggggaaguccugccccaagccccaccggcucaaccacaugggcaucugcagcugcgggcuguacaagcagcccggcgugccgguccgcuggaagcggugaggacuagucccuguucccagagcccacuuuuuuuucuuuuuuugaaauaaaauagccugucuuucagaucucaaaggcucuuuucagagccaccaaaaaaaaaaaaaaaaaaaaaaaaaaaaaaaaaaaaaaaaaaaaaaaaaaaaaaaaaaaaaaaaagaauu

SEQ ID NO: 37123 - RNA, 1736 nt, Artificial Sequence
  mRNA product Design a-2 (hSL-A64-N5) comprising derived and/or modified sequence from LASV(Mad39;Clade IV)__ANH09722__GPCmut10 (opt1)
aggagaguccgcucagccagguugcagaagcggcuuagcguguguccuaaucuucucucugcguguagguaggccugugccgcaaacaagcuuaccaugggccagaucgugaccuucuuccaggaggucccccacgugaucgaggaggugaugaacaucguccugaucgcccucagcauccuggccgugcugaaggggcucuacaacguggcgaccugcggccugaucgggcuggucacguuccuccugcugugcggccgcuccugcaccaccacccucuacaaggggguguacgagcugcaggcccuggagcucaacauggagacgcugaacaugugcaugccgcugagcugcaccaagaacaacucccaccacuacauccgggugggcaacgagaccggccucgagcugacccugacgaacaccagccucaucaaccacaaguucugcaaccuguccgacgcccacaagaagaaccuguacgaccacgcccucaugagcaucaucuccaccuuccaccugagcauccccaacuucaaccaguacgaggccauguccugcgacuucaacgacgggaagaucagcguccaguacaaccugucccacaccuacgcgggcgacacggccaaccacugcgggaccguggccaacggcgugcuccagaccuucaugcgcauggccuggggcgggagcuacaucgcgcuggacuccggccgcgggggcugggacugcaucaugaccagcuaccaguaccugaucauccagaacacgaccugggaggaccacugccaguucucccggcccagccccaucggguaccucggccugcugucccagcggacccgcgacaucuacaucagccggcgccuccugggcaccuucacguggacccuguccgacagcgaggggaaggacaccccgggcggguacugccucacccgguggaugcugaucgaggccgagcugaagugcuucggcaacacggccgucgccaagugcaacgagaagcacgacgaggaguucugcgacaugcuccgccuguucgacuucugcaagcaggccauccagcggcugaaggcggaggcccagaugagcauccagcucaucaacaaggccgugaacgcccugaucaacgaccagcugaucaugaagaaccaccuccgcgacaucauggggauccccuacugcaacuacuccaaguacugguaccugaaccacaccgugaccggcaagaccagccugcccaagugcuggcucgucuccaacggcagcuaccugaacgagacgcacuucuccgacgacaucgagcagcaggccgacaacaugaucaccgagaugcugcagaaggaguacauggagcggcaggggaagacgccccugggccucguggaccuguucguguucagcaccuccuucuaccugaucagcaucuuccuccaccuggucaagaucccgacccaccgccacgugguggggaagcccugccccaagccccaccggcugaaccacaugggcaucugcuccugcggguucuacaagcagccgggcguccccgugcgcuggaagcggugaggacuagucccuguucccagagcccacuuuuuuuucuuuuuuugaaauaaaauagccugucuuucagaucucaaaggcucuuuucagagccaccaaaaaaaaaaaaaaaaaaaaaaaaaaaaaaaaaaaaaaaaaaaaaaaaaaaaaaaaaaaaaaaaagaauu

SEQ ID NO: 37124 - RNA, 1736 nt, Artificial Sequence
  mRNA product Design a-2 (hSL-A64-N5) comprising derived and/or modified sequence from LASV(Z0947-SLE-2011;Clade IV)__AIT17840__GPCmut10 (opt1)
aggagaguccgcucagccagguugcagaagcggcuuagcguguguccuaaucuucucucugcguguagguaggccugugccgcaaacaagcuuaccaugggccagaucgugaccuucuuccaggaggucccccacgugaucgaggaggugaugaacaucguccugaucgcccucagcauccuggccgugcugaaggggcucuacaacuucgcgaccugcggccugguggggcuggucacguuccuccugcugugcggccgcuccugcaccaucagccucuacaaggggguguacgagcugcagacccuggagcucaacauggagacccugaacaugugcaugccgcuguccugcacgaagaacaacagccaccacuacaucauggugggcaacgagaccggccucgagcugacccugaccaacacguccaucaucaaccacaaguucugcaaccucagcgacgcccacaagaagaaccuguacgaccacgcccugauguccaucaucagcaccuuccaccucuccauccccaacuucaaccaguacgaggccaugagcugcgacuucaacgggggcaagaucuccguccaguacaaccugagccacuccuacgccggggacgcggccaaccacugcggcaccguggccaacggggugcugcagaccuucaugcggauggccuggggcggcagcuacaucgcgcucgacuccgggcgcgaccggugggacugcaucaugacgagcuaccaguaccugaucauccagaacaccaccugggaggaccacugccaguucucccgccccagccccaucggcuaccuggggcuccugucccagcggacccgcgacaucuacaucagccggcgccugcucggcacguucaccuggacccugagcgacuccgagggcaaggacacccccgggggcuacugccugacgcgguggaugcucaucgaggccgagcugaagugcuucgggaacaccgccgucgccaagugcaacgagaagcacgacgaggaguucugcgacaugcugcgccucuucgacuucugcaagcaggccauccagcggcugaaggcggaggcccagaugagcauccagcugaucaacaaggccgugaacgcccucaucaacgaccagcugaucaugaagaaccaccuccgcgacaucaugggcaucccguacugcaacuacuccaaguacugguaccugaaccacaccaccacggggaagaccagccugcccaagugcuggcugguguccaacggcagcuaccucaacgagacccacuucuccgacgacaucgagcagcaggccgacaacaugaucaccgagaugcugcagaaggaguacauggagcggcagggcaagacgccccuggggcuggucgaccucuucguguucagcaccuccuucuaccugaucagcaucuuccugcaccucgugaagaucccgacccaccgccacaucgucggcaagcccugccccaagccccaccggcugaaccacauggggaucugcuccugcggccuguacaagcagccgggggugcccgugaaguggaagcgcugaggacuagucccuguucccagagcccacuuuuuuuucuuuuuuugaaauaaaauagccugucuuucagaucucaaaggcucuuuucagagccaccaaaaaaaaaaaaaaaaaaaaaaaaaaaaaaaaaaaaaaaaaaaaaaaaaaaaaaaaaaaaaaaaagaauu

SEQ ID NO: 37125 - RNA, 1736 nt, Artificial Sequence
  mRNA product Design a-2 (hSL-A64-N5) comprising derived and/or modified sequence from LASV(Josiah;Clade IV)__NP_694870__GPCmut10 (opt4)
aggagaguccgcucagccagguugcagaagcggcuuagcguguguccuaaucuucucucugcguguagguaggccugugccgcaaacaagcuuaccaugggccagaucgugaccuucuuccaggaggugccccacgugaucgaggaggugaugaacaucgugcugaucgcccugagcgugcuggccgugcugaagggccuguacaacuucgccaccugcggccuggugggccuggugaccuuccugcugcugugcggcagaagcugcaccaccagccuguacaagggcguguacgagcugcagacccuggagcugaacauggagacccugaacaugugcaugccccugagcugcaccaagaacaacagccaccacuacaucauggugggcaacgagaccggccuggagcugacccugaccaacaccagcaucaucaaccacaaguucugcaaccugagcgacgcccacaagaagaaccuguacgaccacgcccugaugagcaucaucagcaccuuccaccugagcauccccaacuucaaccaguacgaggccaugagcugcgacuucaacggcggcaagaucagcgugcaguacaaccugagccacagcuacgccggcgacgccgccaaccacugcggcaccguggccaacggcgugcugcagaccuucaugagaauggccuggggcggcagcuacaucgcccuggacagcggcagaggcaacugggacugcaucaugaccagcuaccaguaccugaucauccagaacaccaccugggaggaccacugccaguucagcagacccagccccaucggcuaccugggccugcugagccagagaaccagagacaucuacaucagcagaagacugcugggcaccuucaccuggacccugagcgacagcgagggcaaggacacccccggcggcuacugccugaccagauggaugcugaucgaggccgagcugaagugcuucggcaacaccgccguggccaagugcaacgagaagcacgacgaggaguucugcgacaugcugagacuguucgacuucugcaagcaggccauccagagacugaaggccgaggcccagaugagcauccagcugaucaacaaggccgugaacgcccugaucaacgaccagcugaucaugaagaaccaccugagagacaucaugggcauccccuacugcaacuacagcaaguacugguaccugaaccacaccaccaccggcagaaccagccugcccaagugcuggcuggugagcaacggcagcuaccugaacgagacccacuucagcgacgacaucgagcagcaggccgacaacaugaucaccgagaugcugcagaaggaguacauggagagacagggcaagaccccccugggccugguggaccuguucguguucagcaccagcuucuaccugaucagcaucuuccugcaccuggugaagauccccacccacagacacaucgugggcaagagcugccccaagccccacagacugaaccacaugggcaucugcagcugcggccuguacaagcagcccggcgugcccgugaaguggaagagaugaggacuagucccuguucccagagcccacuuuuuuuucuuuuuuugaaauaaaauagccugucuuucagaucucaaaggcucuuuucagagccaccaaaaaaaaaaaaaaaaaaaaaaaaaaaaaaaaaaaaaaaaaaaaaaaaaaaaaaaaaaaaaaaaagaauu

SEQ ID NO: 37126 - RNA, 1733 nt, Artificial Sequence
  mRNA product Design a-2 (hSL-A64-N5) comprising derived and/or modified sequence from LASV(LP;Clade I)__AAF86701__GPCmut10 (opt4)
aggagaguccgcucagccagguugcagaagcggcuuagcguguguccuaaucuucucucugcguguagguaggccugugccgcaaacaagcuuaccaugggccagaucaucaccuucuuccaggaggugccccacgugaucgaggaggugaugaacaucgugcugaucgcccugagccugcuggccauccugaagggccuguacaacaucgccaccugcggcaucaucggccugguggccuuccuguuccugugcggcaagagcugcagccugacccugaagggcggcuacgagcugcagacccuggagcugaacauggagacccugaacaugugcaugccccugagcugcaccaagaacagcagccaccacuacaucagagugggcaacgagaccggccuggagcugacccugaccaacaccagcaucaucaaccacaaguucugcaaccugagcgacgcccacaagaagaaccuguacgaccacgcccugaugagcaucaucagcaccuuccaccugagcauccccaacuucaaccaguacgaggccaugagcugcgacuucaacggcggcaagaucagcgugcaguacaaccugagccacagcuacgccggcgacgccgccgagcacugcggcaccguggccaacggcgugcugcagaccuucaugagaauggccuggggcggcagauacaucgcccuggacagcggcaagggcaacugggacugcaucaugaccagcuaccaguaccugaucauccagaacaccaccugggaggaccacugccaguucagcagacccagccccaucggcuaccugggccugcugagccagagaaccagagacaucuacaucagcagaagacugcugggcaccuucaccuggacccugagcgacagcgagggcaacgagacccccggcggcuacugccugaccagauggaugcugaucgaggccgagcugaagugcuucggcaacaccgccguggccaagugcaacgagaagcacgacgaggaguucugcgacaugcugagacuguucgacuucugcaagcaggccaucagaagacugaaggccgaggcccagaugagcauccagcugaucaacaaggccgugaacgcccugaucaacgaccagcugaucaugaagaaccaccugagagacaucaugggcauccccuacugcaacuacagcaaguacugguaccugaaccacaccagcagcggcagaaccagccugcccaagugcuggcugaucagcaacggcagcuaccugaacgagacccaguucagcgacgacaucgagcagcaggccgacaacaugaucaccgagaugcugcagaaggaguacaucgagagacagggcaagaccccccugggccugguggacaucuucaucuucagcaccagcuucuaccugaucagcaucuuccugcaccugaucaagauccccacccacagacacaucgugggcaagcccugccccaagccccacagacugaaccacaugggcgugugcagcugcggccuguacaagcaccccggcgugcccaccaaguggaagagaugaggacuagucccuguucccagagcccacuuuuuuuucuuuuuuugaaauaaaauagccugucuuucagaucucaaaggcucuuuucagagccaccaaaaaaaaaaaaaaaaaaaaaaaaaaaaaaaaaaaaaaaaaaaaaaaaaaaaaaaaaaaaaaaaagaauu

SEQ ID NO: 37127 - RNA, 1733 nt, Artificial Sequence
  mRNA product Design a-2 (hSL-A64-N5) comprising derived and/or modified sequence from LASV(803213;Clade II)__AAF86703__GPCmut10 (opt4)
aggagaguccgcucagccagguugcagaagcggcuuagcguguguccuaaucuucucucugcguguagguaggccugugccgcaaacaagcuuaccaugggccagaucaucaccuucuuccaggaggugccccacgugaucgaggaggugaugaacaucgugcugaucgcccugagccugcuggccauccugaagggcaucuacaacguggccaccugcggccuguucggccugaucagcuuccugcugcugugcggcagaagcugcagcgugaccuacaagggcguguacgagcugcagacccuggagcugaacauggccaaccugaacaugugcaugccccugagcugcaccaagaacaacagccaccacuacaucauggugggcaacgagaccggccuggagcugacccugaccaacaccagcaucaucaaccacaaguucugcaaccugagcgacgcccacaagaagaaccuguacgaccacgcccugaugagcaucaucagcaccuuccaccugagcauccccaacuucaaccaguacgaggccaugagcugcgacuucaacggcggcaagaucagcgugcaguacaaccugagccacagcuucgccguggacgccgccaaccacugcggcaccaucgccaacggcgugcugcagaccuucaugagaauggccuggggcggcagcuacaucgcccuggacagcggcaagggcaacugggacugcaucaugaccagcuaccaguaccugaucauccagaacaccaccugggaggaccacugccaguucagcagacccagccccaucggcuaccugggccugcugagccagagaaccagagacaucuacaucagcagaagacugcugggcaccuucaccuggacccugagcgacagcgagggcaacgaggcccccggcggcuacugccugaccagauggaugcugaucgaggccgagcugaagugcuucggcaacaccgccguggccaagugcaacgagaagcacgacgaggaguucugcgacaugcugagacuguucgacuucugcaagcaggccaucaagagacugaagaccgaggcccagaugagcauccagcugaucaacaaggccgugaacgcccugaucaacgaccagcugaucaugaagaaccaccugagagacaucaugggcauccccuacugcaacuacagcagauacugguaccugaaccacaccgugaccggcaagaccagccugcccagaugcuggcuggugagcaacggcagcuaccugaacgagacccacuucagcgacgacaucgagcagcaggccgacaacaugaucaccgagaugcugcagaaggaguacauggacagacagggcaagaccccccugggccugguggaccuguucguguucagcaccagcuucuaccugaucagcaucuuccugcaccuggugaagauccccacccacagacacaucgugggcaagcccugccccaagccccacagacugaaccacaugggcaucugcagcugcggccuguacaagcaccccggcgugcccgugaaguggaagagaugaggacuagucccuguucccagagcccacuuuuuuuucuuuuuuugaaauaaaauagccugucuuucagaucucaaaggcucuuuucagagccaccaaaaaaaaaaaaaaaaaaaaaaaaaaaaaaaaaaaaaaaaaaaaaaaaaaaaaaaaaaaaaaaaagaauu

SEQ ID NO: 37128 - RNA, 1733 nt, Artificial Sequence
  mRNA product Design a-2 (hSL-A64-N5) comprising derived and/or modified sequence from LASV(GA391;Clade III)__CAA36645__GPCmut10 (opt4)
aggagaguccgcucagccagguugcagaagcggcuuagcguguguccuaaucuucucucugcguguagguaggccugugccgcaaacaagcuuaccaugggccagaucgugaccuucuuccaggaggugccccacgugaucgaggaggugaugaacaucgugcugaucgcccugagcauccuggccauccugaagggccuguacaacguggccaccugcggccugaucggccuggugaccuuccugcugcugagcggcagaagcugcagccugaucuacaagggcaccuacgagcugcagacccuggagcugaacauggagacccugaacaugugcaugccccugagcugcaccaagaacaacagccaccacuacaucagagugggcaacgagaccggccuggagcugacccugaccaacaccagcauccugaaccacaaguucugcaaccugagcgacgcccacaagagaaaccuguacgaccacagccugaugagcaucaucagcaccuuccaccugagcauccccaacuucaaccaguacgaggccaugagcugcgacuucaacggcggcaagaucaccgugcaguacaaccugagccacagcuucgccguggacgccgccggccacugcggcacccuggccaacggcgugcugcagaccuucaugagaauggccuggggcggcagcuacaucgcccuggacagcggcagaggcaacugggacugcaucaugaccagcuaccaguaccugaucauccagaacaccaccugggacgaccacugccaguucagcagacccagccccaucggcuaccugggccugcugagccagagaaccagagacaucuacaucagcagaagacugcugggcaccuucaccuggacccugagcgacagcgagggcaacgagacccccggcggcuacugccugaccagauggaugcugaucgaggccgagcugaagugcuucggcaacaccgccguggccaagugcaacgagaagcacgacgaggaguucugcgacaugcugagacuguucgacuucugcaagcaggccaucagaagacugaagaccgaggcccagaugagcauccagcugaucaacaaggccgugaacgcccugaucaacgaccagcugaucaugaagaaccaccugagagacaucaugggcauccccuacugcaacuacagcagauacugguaccugaaccacaccagcaccggcaagaccagccugcccagaugcuggcugaucagcaacggcagcuaccugaacgagaccaaguucagcgacgacaucgagcagcaggccgacaacaugaucaccgagaugcugcagaaggaguacaucgacagacagggcaagaccccccugggccugguggaccuguucguguucagcaccagcuucuaccugaucagcaucuuccugcaccuggugaagauccccacccacagacacaucgugggcaagcccugccccaagccccacagacugaaccacaugggcaucugcagcugcggccuguacaagcagcccggcgugcccgugagauggaagagaugaggacuagucccuguucccagagcccacuuuuuuuucuuuuuuugaaauaaaauagccugucuuucagaucucaaaggcucuuuucagagccaccaaaaaaaaaaaaaaaaaaaaaaaaaaaaaaaaaaaaaaaaaaaaaaaaaaaaaaaaaaaaaaaaagaauu

SEQ ID NO: 37129 - RNA, 1736 nt, Artificial Sequence
  mRNA product Design a-2 (hSL-A64-N5) comprising derived and/or modified sequence from LASV(AV;Clade V)__CCA30314__GPCmut10 (opt4)
aggagaguccgcucagccagguugcagaagcggcuuagcguguguccuaaucuucucucugcguguagguaggccugugccgcaaacaagcuuaccaugggccagaucgugaccuucuuccaggaggugccccacgugaucgaggaggugaugaacaucgugcugaucgcccugagcauccuggccgugcugaagggccuguacaacaucgccaccugcggccugaucggccugaucaccuuccugcugcugugcggcagaagcugcagcagcaaccuguacaagggcguguacgagcugcagagccuggaccugaacauggagacccugaacaugugcaugccccugagcugcaccaagaacaacagccaccacuacaucagagugggcaacgacaccggccuggagcugacccugaccaacaccagcauccugaaccacaaguucugcaaccugagcgacgcccacaagaaggaccuguacgaccacgcccugaugagcaucaucagcaccuuccaccugagcauccccaacuucaaccaguacgaggccaugagcugcgacuucaacggcggcaagaucagcgugcaguacaaccugagccacagcuacgccaucgacgccgccaaccacugcggcaccguggccaacggcauccugcagaccuucaugagaauggccuggggcggcagcuacaucgcccuggacagcggcagaggcaacugggacugcaucaugaccagcuaccaguaccugaucauccagaacaccaccugggagaaccacugccaguucagcagacccagccccaucggcuaccugggccugcugagccagagaaccagagacaucuacaucagcagaagacugcugggcaccuucaccuggacccugagcgacagcgagggcaacgccacccccggcggcuacugccugaccagauggaugcugaucgaggccgagcugaagugcuucggcaacaccgccguggccaagugcaacgagaagcacgacgaggaguucugcgacaugcugagacuguucgacuucugcaagcaggccaucagcagacugaagagcgaggcccagaugagcauccagcugaucaacaaggccgugaacgcccugaucaacgaccagcugaucaugaagaaccaccugagagacaucaugggcauccccuacugcaacuacagcaaguacugguaccugaaccacaccaucaccggcaagaccagccugcccaagugcuggcuggugagcaacggcagcuaccugaacgagacccacuucagcgacgacaucgagcagcaggccgacaacaugaucaccgagaugcugcagaaggaguacauggagagacagggcaagaccccccugggccugguggaccuguucguguucagcaccagcuucuaccugaucagcaucuuccugagacuggugaagauccccacccacagacacaucgugggcaagcccugccccaagccccacagacugaaccacaugggcaucugcagcugcggccuguacaagcagcccggcgugcccgugagauggaagagaugaggacuagucccuguucccagagcccacuuuuuuuucuuuuuuugaaauaaaauagccugucuuucagaucucaaaggcucuuuucagagccaccaaaaaaaaaaaaaaaaaaaaaaaaaaaaaaaaaaaaaaaaaaaaaaaaaaaaaaaaaaaaaaaaagaauu

SEQ ID NO: 37130 - RNA, 1733 nt, Artificial Sequence
  mRNA product Design a-2 (hSL-A64-N5) comprising derived and/or modified sequence from LASV(Togo/2016/7082;Clade VI)__AMR44577__GPCmut10 (opt4)
aggagaguccgcucagccagguugcagaagcggcuuagcguguguccuaaucuucucucugcguguagguaggccugugccgcaaacaagcuuaccaugggccagaucaucaccuucuuccaggaggugccccacgugaucgaggaggugaugaacaucgugcugaucgcccugagccugcuggccauccugaagggcguguacaacguggccaccugcggcaucaucggccuggugaccuuccuguuccugugcggcagaagcugcagccugaucuacaagggcagcuacgagcugcagacccuggagcugaacauggagacccugaacaugugcaugccccugagcugcaccaagaacagcagccaccacuacaucagagugggcaacgagaccggccuggagcugacccugaccaacaccagcaucaucaaccacaaguucugcaaccugagcgacgcccacaagagaaaccuguacgaccacgcccugaugagcauccugagcaccuuccaccugagcauccccaacuucaaccaguacgaggccaugagcugcgacuucaacggcggcaagaucagcgugcaguacaaccugagccacgccuacgccguggacgccgccgagcacugcggcaccguggccaacggcgugcugcagaccuucaugagaauggccuggggcggcagcuacaucgcccuggacagcggcagaggcaacugggacugcaucaugaccagcuaccaguaccugaucauccagaacaccaccugggaggaccacugccaguucagcagacccagccccaucggcuaccugggccugcugagccagagaaccagagacaucuacaucagcagaagacugcugggcaccuucaccuggacccugagcgacagcgagggcaacgagacccccggcggcuacugccugaccagauggaugcugaucgaggccgagcugaagugcuucggcaacaccgccguggccaagugcaacgagaagcacgacgaggaguucugcgacaugcugagacuguucgacuucugcaagcaggccauccagagacugaagagcgaggcccagaugagcauccagcugaucaacaaggccgugaacgcccugaucaacgaccagcugaucaugaagaaccaccugagagacaugaugggcauccccuacugcaacuacagcaaguacugguaccugaaccacaccagcagcggcagaaccagccugcccaagugcuggcuggugagcaacggcagcuaccugaacgagacccacuucagcgacgacaucgagcagcaggccgacaacaugaucaccgagaugcugcagaaggaguacaucgacagacagggcaagaccccccugggccugguggaccuguucguguucagcaccagcuucuaccugaucagcaucuuccugcaccugaucaagauccccacccacagacacaucgugggcaagcccugccccaagccccacagacugaaccacaugggcaucugcagcugcggccuguacaagcagcccggcgugcccaccagauggaagagaugaggacuagucccuguucccagagcccacuuuuuuuucuuuuuuugaaauaaaauagccugucuuucagaucucaaaggcucuuuucagagccaccaaaaaaaaaaaaaaaaaaaaaaaaaaaaaaaaaaaaaaaaaaaaaaaaaaaaaaaaaaaaaaaaagaauu

SEQ ID NO: 37131 - RNA, 1733 nt, Artificial Sequence
  mRNA product Design a-2 (hSL-A64-N5) comprising derived and/or modified sequence from LASV(KAK-428;Clade n.d. (VII))__ANH09740__GPCmut10 (opt4)
aggagaguccgcucagccagguugcagaagcggcuuagcguguguccuaaucuucucucugcguguagguaggccugugccgcaaacaagcuuaccaugggccagaucgugaccuucuuccaggaggugccccacgugaucgaggaggugaugaacaucgugcugaucgcccugagccugcuggccauccugaagggccuguacaacuucgccaccugcggcgugaucggccugaucaccuuccugcugcugugcggcagaagcugcagcgccaccuacaagggccaguacgagcugcagacccuggagcugaacauggagagccugaacaugugcaugccccugagcugcaccaagaacaacagccaccacuacaucagagccggcaacaacaccggccuggagcugacccugaccaacaccagcaucaucagccacaaguucugcaaccugagcgacgcccacaagaagaaccuguacgaccacacccugaugagcaucaucaccaccuuccaccugagcauccccaacuucaaccaguacgaggccaugagcugcgacuucaacggcggcaagaucagcauccaguacaaccugagccacagcuacgccggcgacgccgcccagcacugcggcaccguggccaacggcgugcugcagaccuucaugagaauggccuggggcggcagcuaccuggcccuggacagcggcagaagaggcugggacugcaucaucagcagcuaccaguaccugaucauccagaacaccaccugggacgaccacugccaguucagcagacccagccccaucggcuaccugggcuucgugagccagaagaccagagacaucuacaucagcagaagacugcugggcaccuucaccuggacccugagcgacagcgagggccacgacaugcccggcggcuacugccugaccagauggaugcugaucgaggccgaccugaagugcuucggcaacaccgccguggccaagugcaacgagaagcacgacgaggaguucugcgacauguggagacuguucgacuucugcaagcaggccauccagagacugaaggccgaggcccagaugaacauccagcugaucaacaaggccgugaacgcccugaucaacgaccagcugaugaugaagaaccaccugagagacaucaugggcauccccuacugcaacuacagcaaguucugguaccugaacaacaccaccaccggcagaaccagccugcccagaugcuggcugaucagcaacggcagcuaccugaacgagacccacuucagcgacgacaucgagcagcaggccgacaacaugaucaccgagaugcugcagaaggaguacauggacagacagggcaagaccccccugggccugguggaccuguucguguucagcaccagcuucuaccugaucaccaucuuccugcaccuggugaagauccccacccacagacacaucgugggcaagcccugccccaagccccacagacugaaccacaugggcaucugcagcugcggccuguacaagcagcccggcgugcccgugagauggaagagaugaggacuagucccuguucccagagcccacuuuuuuuucuuuuuuugaaauaaaauagccugucuuucagaucucaaaggcucuuuucagagccaccaaaaaaaaaaaaaaaaaaaaaaaaaaaaaaaaaaaaaaaaaaaaaaaaaaaaaaaaaaaaaaaaagaauu

SEQ ID NO: 37132 - RNA, 1733 nt, Artificial Sequence; identical to SEQ ID NO: 37126
  mRNA product Design a-2 (hSL-A64-N5) comprising derived and/or modified sequence from LASV(Pinneo-NIG-1969;Clade I)__AIT17836__GPCmut10 (opt4)

SEQ ID NO: 37133 - RNA, 1733 nt, Artificial Sequence
  mRNA product Design a-2 (hSL-A64-N5) comprising derived and/or modified sequence from LASV(ISTH0009-NIG-2011;Clade II)__AIT17404__GPCmut10 (opt4)
aggagaguccgcucagccagguugcagaagcggcuuagcguguguccuaaucuucucucugcguguagguaggccugugccgcaaacaagcuuaccaugggccagaucaucaccuucuuccaggaggugccccacgugaucgaggaggugaugaacaucgugcugaucgcccugagccugcuggccauccugaagggcaucuacaacguggccaccugcggccuguucggccuggugagcuuccugcugcugugcggcagaagcugcagcaccaccuacaagggcguguacgagcugcagacccuggagcuggacauggccagccugaacaugugcaugccccugagcugcaccaagaacaacagccaccacuacaucauggugggcaacgagaccggccuggagcugacccugaccaacaccagcaucaucaaccacaaguucugcaaccugagcgacgcccacaagaagaaccuguacgaccacgcccugaugagcaucaucagcaccuuccaccugagcauccccaacuucaaccaguacgaggccaugagcugcgacuucaacggcggcaagaucagcgugcaguacaaccugagccacgccuacgccguggacgccgccaaccacugcggcaccaucgccaacggcgugcugcagaccuucaugagaauggccuggggcggcagcuacaucgcccuggacagcggcaagggcagcugggacugcaucaugaccagcuaccaguaccugaucauccagaacaccaccugggaggaccacugccaguucagcagacccagccccaucggcuaccugggccugcugagccagagaaccagagacaucuacaucagcagaagacugcugggcaccuucaccuggacccugagcgacagcgagggcaacgagacccccggcggcuacugccugaccagauggaugcugaucgaggccgagcugaagugcuucggcaacaccgccguggccaagugcaacgagaagcacgacgaggaguucugcgacaugcugagacuguucgacuucugcaagcaggccaucagaagacugaagaccgaggcccagaugagcauccagcugaucaacaaggccgugaacgcccugaucaacgaccagcugaucaugaagaaccaccugagagacaucaugggcauccccuacugcaacuacagcaaguacugguaccugaaccacaccgugaccggcaagaccagccugcccagaugcuggcuggugagcaacggcagcuaccugaacgagacccacuucagcgacgacaucgagcagcaggccgacaacaugaucaccgagcugcugcagaaggaguacauggacagacagggcaagaccccccugggccugguggaccuguucguguucagcaccagcuucuaccugaucagcaucuuccugcaccugaucaagauccccacccacagacacaucaccggcaagcccugccccaagccccacagacugaaccacaugggcaucugcagcugcggccuguacaagcaccccggcgugcccgugaaguggaagagaugaggacuagucccuguucccagagcccacuuuuuuuucuuuuuuugaaauaaaauagccugucuuucagaucucaaaggcucuuuucagagccaccaaaaaaaaaaaaaaaaaaaaaaaaaaaaaaaaaaaaaaaaaaaaaaaaaaaaaaaaaaaaaaaaagaauu

SEQ ID NO: 37134 - RNA, 1733 nt, Artificial Sequence
  mRNA product Design a-2 (hSL-A64-N5) comprising derived and/or modified sequence from LASV(ISTH2010-NIG-2012;Clade II)__AIT17482__GPCmut10 (opt4)
aggagaguccgcucagccagguugcagaagcggcuuagcguguguccuaaucuucucucugcguguagguaggccugugccgcaaacaagcuuaccaugggccagaucaucaccuucuuccaggaggugccccacgugaucgaggaggugaugaacaucgugcugaucgcccugagccugcuggccauccugaagggcaucuacaacguggccaccugcggccuguucggccuggugagcuuccugcugcugugcggcagaagcugcagcaccaccuacaagggcguguacgagcugcagacccuggagcuggacauggccagccugaacaugugcaugccccugagcugcaccaagaacaacagccaccacuacaucauggugggcaacgagaccggccuggagcugacccugaccaacaccagcaucaucaaccacaaguucugcaaccugagcgacgcccacaagaagaaccuguacgaccacgcccugaugagcaucaucagcaccuuccaccugagcauccccaacuucaaccaguacgaggccaugagcugcgacuucaacggcggcaagaucagcgugcaguacaaccugagccacgccuacgccguggacgccgccaaccacugcggcaccaucgccaacggcgugcugcagaccuucaugagaauggccuggggcggcagcuacaucgcccuggacagcggcaagggcagcugggacugcaucaugaccagcuaccaguaccugaucauccagaacaucaccugggaggaccacugccaguucagcagacccagccccaucggcuaccugggccugcugagccagagaaccagagacaucuacaucagcagaagacugcugggcaccuucaccuggacccugagcgacagcgagggcaacgagacccccggcggcuacugccugaccagauggaugcugaucgaggccgagcugaagugcuucggcaacaccgccguggccaagugcaacgagaagcacgacgaggaguucugcgacaugcugagacuguucgacuucugcaagcaggccaucagaagacugaagaccgaggcccagaugagcauccagcugaucaacaaggccgugaacgcccugaucaacgaccagcugaucaugaagaaccaccugagagacaucaugggcauccccuacugcaacuacagcaaguacugguaccugaaccacaccgugaccggcaagaccagccugcccagaugcuggcuggugagcaacggcagcuaccugaacgagacccacuucagcgacgacaucgagcagcaggccgacaacaugaucaccgagcugcugcagaaggaguacaucgacagacagggcaagaccccccugggccugguggaccuguucguguucagcaccagcuucuaccugaucagcaucuuccugcaccuggugaagauccccacccacagacacguggugggcaagcccugccccaagccccacagacugaaccacaugggcaucugcagcugcggccuguacaagcaccccggcgugcccgugaaguggaagagaugaggacuagucccuguucccagagcccacuuuuuuuucuuuuuuugaaauaaaauagccugucuuucagaucucaaaggcucuuuucagagccaccaaaaaaaaaaaaaaaaaaaaaaaaaaaaaaaaaaaaaaaaaaaaaaaaaaaaaaaaaaaaaaaaagaauu

SEQ ID NO: 37135 - RNA, 1733 nt, Artificial Sequence
  mRNA product Design a-2 (hSL-A64-N5) comprising derived and/or modified sequence from LASV(Lassa virus/H.sapiens-wt/NGA/2015/ISTH_0543;Clade II)__AVO03639__GPCmut10 (opt4)
aggagaguccgcucagccagguugcagaagcggcuuagcguguguccuaaucuucucucugcguguagguaggccugugccgcaaacaagcuuaccaugggccagaucaucaccuucuuccaggaggugccccacgugaucgaggaggugaugaacaucgugcugaucgcccugagccugcuggccauccugaagggcaucuacaacguggccaccugcggccuguucggccuggugagcuuccugcugcugugcggcagaagcugcagcaccaccuacaagggcguguacgagcugcagacccuggagcuggacauggccaaccugaacaugugcaugccccugagcugcaccaagaacaacagccaccacuacaucauggugggcaacgagaccggccuggagcugacccugaccaacaccagcaucaucaaccacaaguucugcaaccugagcgacgcccacaagaagaaccuguacgaccacgcccugaugagcaucaucagcaccuuccaccugagcauccccaacuucaaccaguacgaggccaugagcugcgacuucaacggcggcaagaucagcgugcaguacaaccugagccacaccuacgccguggacgccgccaaccacugcggcaccaucgccaacggcgugcugcagaccuucaugagaauggccuggggcggcagcuacaucgcccuggacagcggcaagggcagcugggacugcaucaugaccagcuaccaguaccuggugauccagaacaccaccugggaggaccacugccaguucagcagacccagccccaucggcuaccugggccugcugagccagagaaccagagacaucuacaucagcagaagacugcugggcaccuucaccuggacccugagcgacagcgagggcaacgagacccccggcggcuacugccugaccagauggaugcugaucgaggccgagcugaagugcuucggcaacaccgccguggccaagugcaacgagaagcacgacgaggaguucugcgacaugcugagacuguucgacuucugcaagcaggccaucagaagacugaagaccgaggcccagaugagcauccagcugaucaacaaggccgugaacgcccugaucaacgaccagcugaucaugaagaaccaccugagagacaucaugggcauccccuacugcaacuacagcaaguacugguaccugaaccacaccgugaccggcaagaccagccugcccagaugcuggcuggugagcaacggcagcuaccugaacgagacccacuucagcgacgacaucgagcagcaggccgacaacaugaucaccgagcugcugcagaaggaguacaucgacagacagggcaagaccccccugggccugguggaccuguucguguucagcaccagcuucuaccugaucagcaucuuccugcaccuggugaagauccccacccacagacacaucaccggcaagcccugccccaagccccacagacugaaccacaugggcaucugcagcugcggccuguacaagcaccccggcgugcccgugaaguggaagagaugaggacuagucccuguucccagagcccacuuuuuuuucuuuuuuugaaauaaaauagccugucuuucagaucucaaaggcucuuuucagagccaccaaaaaaaaaaaaaaaaaaaaaaaaaaaaaaaaaaaaaaaaaaaaaaaaaaaaaaaaaaaaaaaaagaauu

SEQ ID NO: 37136 - RNA, 1733 nt, Artificial Sequence
  mRNA product Design a-2 (hSL-A64-N5) comprising derived and/or modified sequence from LASV(Lassa virus/H.sapiens-wt/NGA/2016/ISTH_0009;Clade II)__AVO03571__GPCmut10 (opt4)
aggagaguccgcucagccagguugcagaagcggcuuagcguguguccuaaucuucucucugcguguagguaggccugugccgcaaacaagcuuaccaugggccagaucaucaccuucuuccaggaggugccccacgugaucgaggaggugaugaacaucgugcugaucgcccugagccugcuggccauccugaagggcaucuacaacguggccaccugcggccugcugggccuggugagcuuccugcugcugugcggcagaagcugcagcaccaccuacaagggcguguacgagcugcagacccuggagcuggacauggccagccugaacaugugcaugccccugagcugcaccaagaacaacagccaccacuacaucauggugggcaacgagaccggccuggagcugacccugaccaacaccagcaucaucaaccacaaguucugcaaccugagcgacgcccacaagaagaaccuguacgaccacgcccugaugagcaucaucagcaccuuccaccugagcauccccaacuucaaccaguacgaggccaugagcugcgacuucaacggcggcagaaucagcgugcaguacaaccugagccacagcuacgccguggacgccgccaaccacugcggcaccaucgccaacggcgugcugcagaccuucaugagaauggccuggggcggcagcuacaucgcccuggacagcggcaagggcagcugggacugcaucaugaccagcuaccaguaccugaucauccagaacaccaccugggaggaccacugccaguucagcagacccagccccaucggcuaccugggccugcugagccagagaaccagagacaucuacaucagcagaagacugcugggcaccuucaccuggacccugagcgacagcgagggcaacgagacccccggcggcuacugccugaccagauggaugcugaucgaggccgagcugaagugcuucggcaacaccgccguggccaagugcaacgagaagcacgacgaggaguucugcgacaugcugagacuguucgacuucugcaagcaggccaucagaagacugaagaccgaggcccagaugagcauccagcugaucaacaaggccgugaacgcccugaucaacgaccagcugaucaugaagaaccaccugagagacaucaugggcauccccuacugcaacuacagcaaguacugguaccugaaccacaccgugaccggcaagaccagccugcccagaugcuggcuggugagcaacggcagcuaccugaacgagacccacuucagcgacgacaucgagcagcaggccgacaacaugaucaccgagcugcugcagaaggaguacaucgacagacagggcaagaccccccugggccugguggaccuguucguguucagcaccagcuucuaccugaucagcaucuuccugcaccuggugaagauccccacccacagacacaucaccggcaagcccugccccaagccccacagacugaaccacaugggcaucugcagcugcggccuguacaaccaccccggcgugcccgugaaguggaagagaugaggacuagucccuguucccagagcccacuuuuuuuucuuuuuuugaaauaaaauagccugucuuucagaucucaaaggcucuuuucagagccaccaaaaaaaaaaaaaaaaaaaaaaaaaaaaaaaaaaaaaaaaaaaaaaaaaaaaaaaaaaaaaaaaagaauu

SEQ ID NO: 37137 - RNA, 1733 nt, Artificial Sequence
  mRNA product Design a-2 (hSL-A64-N5) comprising derived and/or modified sequence from LASV(Lassa virus/H.sapiens-wt/NGA/2016/ISTH_0017;Clade II)__AVO03567__GPCmut10 (opt4)
aggagaguccgcucagccagguugcagaagcggcuuagcguguguccuaaucuucucucugcguguagguaggccugugccgcaaacaagcuuaccaugggccagaucaucaccuucuuccaggaggugccccacgugaucgaggaggugaugaacaucgugcugaucgcccugagccugcuggccauccugaagggcaucuacaacguggccaccugcggccuguucggccuggugagcuuccugcugcugugcggcagaagcugcagcaccaccuacaagggcguguacgagcugcagacccuggagcuggacauggccagccugaacaugugcaugccccugagcugcaccaagaacaacagccaccacuacaucauggugggcaacgagaccggccuggagcugacccugaccaacaccagcaucaucaaccacaaguucugcaaccugagcgacgcccacaagaagaaccuguacgaccacgcccugaugagcaucaucagcaccuuccaccugagcauccccaacuucaaccaguacgaggccaugagcugcgacuucaacggcggcaagaucagcgugcaguacaaccugagccacaccuacgccaucgacgccgccaaccacugcggcaccaucgccaacggcgugcugcagaccuucaugagaauggccuggggcggcagcuacaucgcccuggacagcggcaagggcagcugggacugcaucaugaccagcuaccaguaccugaucauccagaacaccaccugggaggaccacugccaguucagcagacccagccccaucggcuaccugggccugcugagccagagaaccagagacaucuacaucagcagaagacugcugggcaccuucaccuggacccugagcgacagcgagggcaacgagacccccggcggcuacugccugaccagauggaugcugaucgaggccgagcugaagugcuucggcaacaccgccguggccaagugcaacgagaagcacgacgaggaguucugcgacaugcugagacuguucgacuucugcaagcaggccaucagaagacugaagaccgaggcccagaugagcauccagcugaucaacaaggccgugaacgcccugaucaacgaccagcugaucaugaagaaccaccugagagacaucaugggcauccccuacugcaacuacagcaaguacugguaccugaaccacaccgugaccggcaagaccagccugcccagaugcuggcuggugagcaacggcagcuaccugaacgagacccacuucagcgacgacaucgagcagcaggccgacaacaugaucaccgagcugcugcagaaggaguacauggacagacagggcaagaccccccugggccugguggaccuguucguguucagcaccagcuucuaccugaucagcaucuuccugcaccuggugagaauccccacccacagacacgugaucggcaagcccugccccaagccccacagacugaaccacaugggcaucugcagcugcggccuguacaagcaccccggcgugcccgugaaguggaagagaugaggacuagucccuguucccagagcccacuuuuuuuucuuuuuuugaaauaaaauagccugucuuucagaucucaaaggcucuuuucagagccaccaaaaaaaaaaaaaaaaaaaaaaaaaaaaaaaaaaaaaaaaaaaaaaaaaaaaaaaaaaaaaaaaagaauu

SEQ ID NO: 37138 - RNA, 1733 nt, Artificial Sequence
  mRNA product Design a-2 (hSL-A64-N5) comprising derived and/or modified sequence from LASV(Lassa virus/H.sapiens-wt/NGA/2018/ISTH_0959;Clade II)__AVV65099__GPCmut10 (opt4)
aggagaguccgcucagccagguugcagaagcggcuuagcguguguccuaaucuucucucugcguguagguaggccugugccgcaaacaagcuuaccaugggccagaucaucaccuucuuccaggaggugccccacgugaucgaggaggugaugaacaucgugcugaucgcccugagccugcuggccauccugaagggcaucuacaacguggugaccugcggccuguucggccuggugagcuuccugcugcugugcggcagaagcugcagcaccaccuacaagggcguguacgagcugcagacccuggagcuggacauggccagccugaacaugugcaugccccugagcugcaccaagaacaacagccaccacuacaucauggugggcaacgagaccggccuggagcugacccugaccaacaccagcaucaucaaccacaaguucugcaaccugagcgacgcccacaagaagaaccuguacgaccacgcccugaugagcaucaucagcaccuuccaccugagcauccccaacuucaaccaguacgaggccaugagcugcgacuucaacggcggcaagaucagcgugcaguacaaccugagccacgccuacgccaucgacgccgccaaccacugcggcaccaucgccaacggcgugcugcagaccuucaugagaauggccuggggcggcagcuacaucgcccuggacagcggcaagggcagcugggacugcaucaugaccagcuaccaguaccugaucauccagaacaccaccugggaggaccacugccaguucagcagacccagccccaucggcuaccugggccugcugagccagagaaccagagacaucuacaucagcagaagacugcugggcaccuucaccuggacccugagcgacagcgagggcaacgagacccccggcggcuacugccugaccagauggaugcugaucgaggccgagcugaagugcuucggcaacaccgccguggccaagugcaacgagaagcacgacgaggaguucugcgacaugcugagacuguucgacuucugcaagcaggccaucagaagacugaagaccgaggcccagaugagcauccagcugaucaacaaggccgugaacgcccugaucaacgaccagcugaucaugaagaaccaccugagagacaucaugggcauccccuacugcaacuacagcaaguacugguaccugaaccacaccgugaccggcaagaccagccugcccagaugcuggcuggugagcaacggcagcuaccugaacgagacccacuucagcgacgacaucgagcagcaggccgacaacaugaucaccgagcugcugcagaaggaguacaucgacagacagggcaagaccccccugggccugguggaccuguucguguucagcaccagcuucuaccugaucagcaucuuccugcaccuggugaagauccccacccacagacacgugaucggcaagcccugccccaagccccacagacugaaccacaugggcaucugcagcugcggccuguacaagcaccccggcgugcccgugaaguggaagagaugaggacuagucccuguucccagagcccacuuuuuuuucuuuuuuugaaauaaaauagccugucuuucagaucucaaaggcucuuuucagagccaccaaaaaaaaaaaaaaaaaaaaaaaaaaaaaaaaaaaaaaaaaaaaaaaaaaaaaaaaaaaaaaaaagaauu

SEQ ID NO: 37139 - RNA, 1733 nt, Artificial Sequence
  mRNA product Design a-2 (hSL-A64-N5) comprising derived and/or modified sequence from LASV(LASV003-NIG-2008;Clade II)__AIT17580__GPCmut10 (opt4)
aggagaguccgcucagccagguugcagaagcggcuuagcguguguccuaaucuucucucugcguguagguaggccugugccgcaaacaagcuuaccaugggccagaucaucaccuucuuccaggaggugccccacgugaucgaggaggugaugaacaucgugcugaucgcccugagccugcuggccauccugaagggcaucuacaacguggccaccugcggccuguucggccuggugagcuuccugcugcugugcggcagaagcugcagcaccaccuacaagggcguguacgagcugcagacccuggagcuggacauggccagccugaacaugugcaugccccugagcugcaccaagaacaacagccaccacuacaucauggugggcaacgagaccggccuggagcugacccugaccaacaccagcaucaucaaccacaaguucugcaaccugagcgacgcccacaagaagaaccuguacgaccacgcccugaugagcaucaucagcaccuuccaccugagcauccccaacuucaaccaguacgaggccaugagcugcgacuucaacggcggcaagaucagcgugcaguacaaccugagccacaccuacgccguggacgccgccaaccacugcggcaccaucgccaacggcgugcugcagaccuucaugagaauggccuggggcggcagcuacaucgcccuggacagcggcaagggcagcugggacugcaucaugaccagcuaccaguaccugaucauccagaacaccaccugggaggaccacugccaguucagcagacccagccccaucggcuaccugggccugcugagccagagaaccagagacaucuacaucagcagaagacugcugggcaccuucaccuggacccugagcgacagcgagagcaacgagacccccggcggcuacugccugaccagauggaugcugaucgaggccgagcugaagugcuucggcaacaccgccguggccaagugcaacgagaagcacgacgaggaguucugcgacaugcugagacuguucgacuucugcaagcaggccaucagaagacugaaggccgaggcccagaugagcauccagcugaucaacaaggccgugaacgcccugaucaacgaccagcugaucaugaagaaccaccugagagacaucaugggcauccccuacugcaacuacagcaaguacugguaccugaaccacaccgugaccggcagaaccagccugcccagaugcuggcuggugagcaacggcagcuaccugaacgagacccacuucagcgacgacaucgagcagcaggccgacaacaugaucaccgagcugcugcagaaggaguacauggacagacagggcaagaccccccugggccugguggaccuguucguguucagcaccagcuucuaccugaucagcaucuuccugcaccuggugaagauccccacccacagacacgugaucggcaagcccugccccaagccccacagacugaaccacaugggcaucugcagcugcggccuguacaagcaccccggcgugcccgugaaguggaagagaugaggacuagucccuguucccagagcccacuuuuuuuucuuuuuuugaaauaaaauagccugucuuucagaucucaaaggcucuuuucagagccaccaaaaaaaaaaaaaaaaaaaaaaaaaaaaaaaaaaaaaaaaaaaaaaaaaaaaaaaaaaaaaaaaagaauu

SEQ ID NO: 37140 - RNA, 1733 nt, Artificial Sequence
  mRNA product Design a-2 (hSL-A64-N5) comprising derived and/or modified sequence from LASV(LASV035-NIG-2009;Clade II)__AIT17588__GPCmut10 (opt4)
aggagaguccgcucagccagguugcagaagcggcuuagcguguguccuaaucuucucucugcguguagguaggccugugccgcaaacaagcuuaccaugggccagaucaucaccuucuuccaggaggugccccacgugaucgaggaggugaugaacaucgugcugaucgcccugagccugcuggccauccugaagggcaucuacaacguggccaccugcggccuguucggccuggugagcuuccugcugcugugcggcagaagcugcagcaccaccuacaagggcguguacgagcugcagacccuggagcuggacauggccagccugaacaugugcaugccccugagcugcaccaagaacaacagccaccacuacaucauggugggcaacgagaccggccuggagcugacccugaccaacaccagcaucaucaaccacaaguucugcaaccugagcgacgcccacaagaagaaccuguacgaccacgcccugaugagcaucaucagcaccuuccaccugagcauccccaacuucaaccaguacgaggccaugagcugcgacuucaacggcggcaagaucagcgugcaguacaaccugagccacgccuacgccguggacgccgccaaccacugcggcaccaucgccaacggcgugcugcagaccuucaugagaauggccuggggcggcagcuacaucgcccuggacagcggcaagggcagcugggacugcaucaugaccagcuaccaguaccugaucauccagaacaccaccugggaggaccacugccaguucagcagacccagccccaucggcuaccugggccugcugagccagagaaccagagacaucuacaucagcagaagacugcugggcaccuucaccuggacccugagcgacagcgagggcaacgagacccccggcggcuacugccugaccagauggaugcugaucgaggccgagcugaagugcuucggcaacaccgccguggccaagugcaacgagaagcacgacgaggaguucugcgacaugcugagacuguucgacuucugcaagcaggccaucagaagacugaaggccgaggcccagaugagcauccagcugaucaacaaggccgugaacgcccugaucaacgaccagcugaucaugaagaaccaccugagagacaucaugggcauccccuacugcaacuacagcaaguacugguaccugaaccacaccgugaccggcaagaccagccugcccagaugcuggcuggugagcaacggcagcuaccugaacgagacccacuucagcgacgacaucgagcagcaggccgacaacaugaucaccgagcugcugcagaaggaguacaucgacagacagggcaagaccccccugggccugguggaccuguucguguucagcaccagcuucuaccugaucagcaucuuccugcaccuggugaagauccccacccacagacacgugaucggcaagcccugccccaagccccacagacugaaccacaugggcaucugcagcugcggccuguacaagcaccccggcgugcccgugaaguggaagagaugaggacuagucccuguucccagagcccacuuuuuuuucuuuuuuugaaauaaaauagccugucuuucagaucucaaaggcucuuuucagagccaccaaaaaaaaaaaaaaaaaaaaaaaaaaaaaaaaaaaaaaaaaaaaaaaaaaaaaaaaaaaaaaaaagaauu

SEQ ID NO: 37141 - RNA, 1733 nt, Artificial Sequence
  mRNA product Design a-2 (hSL-A64-N5) comprising derived and/or modified sequence from LASV(LASV1000-NIG-2009;Clade II)__AIT17782__GPCmut10 (opt4)
aggagaguccgcucagccagguugcagaagcggcuuagcguguguccuaaucuucucucugcguguagguaggccugugccgcaaacaagcuuaccaugggccagaucaucaccuucuuccaggaggugccccacgugaucgaggaggugaugaacaucgugcugaucgcccugagccugcuggccauccugaagggcaucuacaacguggccaccugcggccuguucggccuggugagcuuccugcugcugugcggcagaagcugcagcaccaccuacaagggcguguacgagcugcagacccuggagcuggacauggccagccugaacaugugcaugccccugagcugcaccaagaacaacagccaccacuacaucauggugggcaacgagaccggccuggagcugacccugaccaacaccagcaucaucaaccacaaguucugcaaccugagcgacgcccacaagaagaaccuguacgaccacgcccugaugagcaucaucagcaccuuccaccugagcauccccaacuucaaccaguacgaggccaugagcugcgacuucaacggcggcaagaucagcgugcaguacaaccugagccacaccuacgccguggacgccgccaaccacugcggcaccaucgccaacggcgugcugcagaccuucaugagaauggccuggggcggcagcuacaucgcccuggacagcggcaagggcagcugggacugcaucaugaccagcuaccaguaccugaucauccagaacaccaccugggaggaccacugccaguucagcagacccagccccaucggcuaccugggccugcugagccagagaaccagagacaucuacaucagcagaagacugcugggcaccuucaccuggacccugagcgacagcgagggcaacgagacccccggcggcuacugccugaccagauggaugcugaucgaggccgagcugaagugcuucggcaacaccgccguggccaagugcaacgagaagcacgacgaggaguucugcgacaugcugagacuguucgacuucugcaagcaggccaucaagagacugaagaccgaggcccagaugagcauccagcugaucaacaaggccgugaacgcccugaucaacgaccagcugaucaugaagaaccaccugagagacaucaugggcauccccuacugcaacuacagcaaguacugguaccugaaccacaccgugaccggcaagaccagccugcccagaugcuggcuggugagcaacggcagcuaccugaacgagacccacuucagcgacgacaucgagcagcaggccgacaacaugaucaccgagcugcugcagaaggaguacaucgacagacagggcaagaccccccugggccugguggaccuguucguguucagcaccagcuucuaccugaucagcaucuuccugcaccuggugaagauccccacccacagacacguggugggcaagcccugccccaagccccacagacugaaccacaugggcaucugcagcugcggccuguacaagcaccccggcgugcccgugaaguggaagagaugaggacuagucccuguucccagagcccacuuuuuuuucuuuuuuugaaauaaaauagccugucuuucagaucucaaaggcucuuuucagagccaccaaaaaaaaaaaaaaaaaaaaaaaaaaaaaaaaaaaaaaaaaaaaaaaaaaaaaaaaaaaaaaaaagaauu

SEQ ID NO: 37142 - RNA, 1733 nt, Artificial Sequence
  mRNA product Design a-2 (hSL-A64-N5) comprising derived and/or modified sequence from LASV(LASV221-NIG-2010;Clade II)__AIT17624__GPCmut10 (opt4)
aggagaguccgcucagccagguugcagaagcggcuuagcguguguccuaaucuucucucugcguguagguaggccugugccgcaaacaagcuuaccaugggccagaucaucaccuucuuccaggaggugccccacgugaucgaggaggugaugaacaucgugcugaucgcccugagccugcuggccauccugaagggcaucuacaacguggccaccugcggccuguucggccuggugagcuuccugcugcugugcggcagaagcugcagcaccaccuacaagggcguguacgagcugcagacccuggagcuggacauggccagccugaacaugugcaugccccugagcugcaccaagaacaacagccaccacuacaucauggugggcaacgagaccggccuggagcugacccugaccaacaccagcaucaucaaccacaaguucugcaaccugagcgacgcccacaagaagaaccuguacgaccacgcccugaugagcaucaucagcaccuuccaccugagcauccccaacuucaaccaguacgaggccaugagcugcgacuucaacggcggcaagaucagcgugcaguacaaccugagccacaccuacgccaucgacgccgccaaccacugcggcaccaucgccaacggcgugcugcagaccuucaugagaauggccuggggcggcagcuacaucgcccuggacagcggcaagggcagcugggacugcaucaugaccagcuaccaguaccugaucauccagaacaccaccugggaggaccacugccaguucagcagacccagccccaucggcuaccugggccugcugagccagagaaccagagacaucuacaucagcagaagacugcugggcaccuucaccuggacccugagcgacagcgagggcaacgagacccccggcggcuacugccugaccagauggaugcugaucgaggccgagcugaagugcuucggcaacaccgccguggccaagugcaacgagaagcacgacgaggaguucugcgacaugcugagacuguucgacuucugcaagcaggccaucagaagacugaagaccgaggcccagaugagcauccagcugaucaacaaggccgugaacgcccugaucaacgaccagcugaucaugaagaaccaccugagagacaucaugggcauccccuacugcaacuacagcaaguacugguaccugaaccacaccgugaccggcaagaccagccugcccagaugcuggcuggugagcaacggcagcuaccugaacgagacccacuucagcgacgacaucgagcagcaggccgacaacaugaucaccgagaugcugcagaaggaguacauggacagacagggcaagaccccccugggccugguggaccuguucguguucagcaccagcuucuaccugaucagcaucuuccugcaccuggugaagauccccacccacagacacgugaucggcaagcccugccccaagccccacagacugaaccacaugggcaucugcagcugcggccuguacaagcaccccggcgugcccgugaaguggaagagaugaggacuagucccuguucccagagcccacuuuuuuuucuuuuuuugaaauaaaauagccugucuuucagaucucaaaggcucuuuucagagccaccaaaaaaaaaaaaaaaaaaaaaaaaaaaaaaaaaaaaaaaaaaaaaaaaaaaaaaaaaaaaaaaaagaauu

SEQ ID NO: 37143 - RNA, 1733 nt, Artificial Sequence
  mRNA product Design a-2 (hSL-A64-N5) comprising derived and/or modified sequence from LASV(LASV237-NIG-2010;Clade II)__AIT17638__GPCmut10 (opt4)
aggagaguccgcucagccagguugcagaagcggcuuagcguguguccuaaucuucucucugcguguagguaggccugugccgcaaacaagcuuaccaugggccagaucaucaccuucuuccaggaggugccccacgugaucgaggaggugaugaacaucgugcugaucgcccugagccugcuggccauccugaagggcaucuacaacguggccaccugcggccuguucggccuggugagcuuccugcugcugugcggcagaagcugcagcaccaccuacaagggcguguacgagcugcagacccuggagcuggacauggccagccugaacaugugcaugccccugagcugcaccaagaacaacagccaccacuacaucauggugggcaacgagaccggccuggagcugacccugaccaacaccagcaucaucaaccacaaguucugcaaccugagcgacgcccacaagaaggaccuguacgaccacgcccugaugagcaucaucagcaccuuccaccugagcauccccaacuucaaccaguacgaggccaugagcugcgacuucaacggcggcaagaucagcgugcaguacaaccugagccacaccuacgccguggacgccgccaaccacugcggcaccaucgccaacggcgugcugcagaccuucaugagaauggccuggggcggcagcuacaucgcccuggacagcggcaagggcagcugggacugcaucaugaccagcuaccaguaccugaucauccagaacaccaccugggaggaccacugccaguucagcagacccagccccaucggcuaccugggccugcugagccagagaaccagagacaucuacaucagcagaagacugcugggcaccuucaccuggacccugagcgacagcgagggcaacgagacccccggcggcuacugccugaccagauggaugcugaucgaggccgagcugaagugcuucggcaacaccgccguggccaagugcaacgagaagcacgacgaggaguucugcgacaugcugagacuguucgacuucugcaagcaggccaucagaagacugaagaccgaggcccagaugagcauccagcugaucaacaaggccgugaacgcccugaucaacgaccagcugaucaugaagaaccaccugagagacaucaugggcauccccuacugcaacuacagcaaguacugguaccugaaccacaccgugaccggcaagaccagccugcccagaugcuggcuggugagcaacggcagcuaccugaacgagacccacuucagcgacgacaucgagcagcaggccgacaacaugaucaccgagcugcugcagaaggaguacauggacagacagggcaagaccccccugggccugguggaccuguucguguucagcaccagcuucuaccugaucagcaucuuccugcaccugaucaagauccccacccacagacacaucaccggcaagcccugccccaagccccacagacugaaccacaugggcaucugcagcugcggccuguacaagcaccccggcgugcccgugaaguggaagagaugaggacuagucccuguucccagagcccacuuuuuuuucuuuuuuugaaauaaaauagccugucuuucagaucucaaaggcucuuuucagagccaccaaaaaaaaaaaaaaaaaaaaaaaaaaaaaaaaaaaaaaaaaaaaaaaaaaaaaaaaaaaaaaaaagaauu

SEQ ID NO: 37144 - RNA, 1733 nt, Artificial Sequence
  mRNA product Design a-2 (hSL-A64-N5) comprising derived and/or modified sequence from LASV(LASV253-NIG-2011;Clade II)__AIT17670__GPCmut10 (opt4)
aggagaguccgcucagccagguugcagaagcggcuuagcguguguccuaaucuucucucugcguguagguaggccugugccgcaaacaagcuuaccaugggccagaucaucaccuucuuccaggaggugccccacgugaucgaggaggugaugaacaucgugcugaucgcccugagccugcuggccauccugaagggcaucuacaacguggccaccugcggccuguucggccuggugagcuuccugcugcugugcggcagaagcugcagcaccaccuacaagggcguguacgagcugcagacccuggagcuggacauggccagccugaacaugugcaugccccugagcugcaccaagaacaacagccaccacuacaucauggugggcaacgagaccggccuggagcugacccugaccaacaccagcaucaucaaccacaaguucugcaaccugagcgacgcccacaagaagaaccuguacgaccacgcccugaugagcaucaucagcaccuuccaccugagcauccccaacuucaaccaguacgaggccaugagcugcgacuucaacggcggcaagaucagcgugcaguacaaccugagccacaccuacgccguggacgccgccaaccacugcggcaccaucgccaacggcgugcugcagaccuucaugagaauggccuggggcggcagcuacaucgcccuggacagcggcaagggcagcugggacugcaucaugaccagcuaccaguaccugaucauccagaacaccaccugggaggaccacugccaguucagcagacccagccccaucggcuaccugggccugcugagccagagaaccagagacaucuacaucagcagaagacugcugggcaccuucaccuggacccugagcgacagcgagggcaacgagacccccggcggcuacugccugaccagauggaugcugaucgaggccgagcugaagugcuucggcaacaccgccguggccaagugcaacgagaagcacgacgaggaguucugcgacaugcugagacuguucgacuucugcaagcaggccaucagaagacugaaggccgaggcccagaugagcauccagcugaucaacaaggccgugaacgcccugaucaacgaccagcugaucaugaagaaccaccugagagacaucaugggcauccccuacugcaacuacagcaaguacugguaccugaaccacaccgugaccggcagaaccagccugcccagaugcuggcuggugagcaacggcagcuaccugaacgagacccacuucagcgacgacaucgagcagcaggccgacaacaugaucaccgagcugcugcagaaggaguacaucgacagacagggcaagaccccccugggccugguggaccuguucguguucagcaccagcuucuaccugaucagcaucuuccugcaccuggugaagauccccacccacagacacaucaucggcaagcccugccccaagccccacagacugaaccacaugggcaucugcagcugcggccuguacaagcaccccggcgugcccgugaaguggaagagaugaggacuagucccuguucccagagcccacuuuuuuuucuuuuuuugaaauaaaauagccugucuuucagaucucaaaggcucuuuucagagccaccaaaaaaaaaaaaaaaaaaaaaaaaaaaaaaaaaaaaaaaaaaaaaaaaaaaaaaaaaaaaaaaaagaauu

SEQ ID NO: 37145 - RNA, 1733 nt, Artificial Sequence
  mRNA product Design a-2 (hSL-A64-N5) comprising derived and/or modified sequence from LASV(LASV254-NIG-2011;Clade II)__AIT17674__GPCmut10 (opt4)
aggagaguccgcucagccagguugcagaagcggcuuagcguguguccuaaucuucucucugcguguagguaggccugugccgcaaacaagcuuaccaugggccagaucaucaccuucuuccaggaggugccccacgugaucgaggaggugaugaacaucgugcugaucgcccugagccugcuggccauccugaagggcaucuacaacguggccaccugcggccuguucggccuggugagcuuccugcugcugugcggcagaagcugcagcaccaccuacaagggcguguacgagcugcagacccuggagcuggacaugaccaaccugaacaugugcaugccccugagcugcaccaagaacaacagccaccacuacaucauggugggcaacgagaccggccuggagcugacccugaccaacaccagcaucaucaaccacaaguucugcaaccugagcgacgcccacaagaagaaccuguacaaccacgcccugaugagcaucaucagcaccuuccaccugagcauccccaacuucaaccaguacgaggccaugagcugcgacuucaacggcggcaagaucagcgugcaguacaaccugagccacagcuacgccguggacgccgccaaccacugcggcaccaucgccaacggcgugcugcagaccuucaugagaauggccuggggcggcagcuacaucgcccuggacagcggcaagggcaacugggacugcaucaugaccagcuaccaguaccugaucauccagaacaccaccugggaggaccacugccaguucagcagacccagccccaucggcuaccugggccugcugagccagagaaccagagacaucuacaucagcagaagacugcugggcaccuucaccuggacccugagcgacagcgagggcaacgagacccccggcggcuacugccugaccagauggaugcugaucgaggccgagcugaagugcuucggcaacaccgccguggccaagugcaacgagaagcacgacgaggaguucugcgacaugcugagacuguucgacuucugcaagcaggccaucagaagacugaagaccgaggcccaggccaacauccagcugaucaacaaggccgugaacgcccugaucaacgaccagcugaucaugaagaaccaccugagagacaucaugggcauccccuacugcaacuacagcaaguacugguaccugaaccacaccgugaccggcaagaccagccugcccagaugcuggcuggugagcaacggcagcuaccugaacgagacccacuucagcgacgacaucgagcagcaggccgacaacaugaucaccgagcugcugcagaaggaguacauggacagacagggcaagaccccccugggccugguggaccuguucguguucagcaccagcuucuaccugaucagcaucuuccugcaccuggugaagauccccacccacagacacgugaucggcaagcccugccccaagccccacagacugaaccacaugggcaucugcagcugcggccuguacaagcaccccggcgugcccgugaaguggaagagaugaggacuagucccuguucccagagcccacuuuuuuuucuuuuuuugaaauaaaauagccugucuuucagaucucaaaggcucuuuucagagccaccaaaaaaaaaaaaaaaaaaaaaaaaaaaaaaaaaaaaaaaaaaaaaaaaaaaaaaaaaaaaaaaaagaauu

SEQ ID NO: 37146 - RNA, 1733 nt, Artificial Sequence
  mRNA product Design a-2 (hSL-A64-N5) comprising derived and/or modified sequence from LASV(Nig08-A19;Clade III)__ADU56618__GPCmut10 (opt4)
aggagaguccgcucagccagguugcagaagcggcuuagcguguguccuaaucuucucucugcguguagguaggccugugccgcaaacaagcuuaccaugggccagaucgugaccuucuuccaggaggugccccacgugaucgaggaggugaugaacaucgugcugaucgcccugagcauccuggccauccugaagggccuguacaacaucgccaccugcggccugaucggccuggugaccuuccugcugcugagcggcagaagcugcagcaugaccuacaagggcguguacgagcugcagacccuggagcugaacaugaacacccugaacaugugcaugccccugagcugcaccaagaacaacagccaccacuacaucauggugggcaacgagaccggccuggagcugacccugaccaacaccagccugcugcaccacaaguucugcaaccugagcgacgcccacaagaagaaccuguacgaccacacccugaugagcaucaucagcaccuuccaccugagcauccccaacuucaaccaguacgaggccaugagcugcgacuucaacggcggcaagaucaccgugcaguacaaccugagccacagcuacgccaucgacgccgccaaccacugcggcaccguggccaacggcgugcugcagaccuucaugagaauggccuggggcggcagcuacaucgcccuggacagcggcagaggcaagugggacugcaucaugaccagcuaccaguaccugaucauccagaacaccaccugggaggaccacugccaguucagcagacccagccccaucggcuaccugggccugcugagccagagaaccagagacaucuacaucagcagaagacugcugggcaccuucaccuggacccugagcgacagcgagggcaacgagacccccggcggcuacugccugaccagauggaugcugaucgaggccgagcugaagugcuucggcaacaccgccguggccaagugcaacgagaagcacgacgaggaguucugcgacaugcugagacuguucgacuucugcaagcaggccaucagaagacugaaggccgaggcccagaugagcauccagcugaucaacaaggccgugaacgcccugaucaacgaccagcugaucaugaagaaccaccugagagacaucaugggcauccccuacugcaacuacagcaaguacugguaccugaaccacaccagcaccggcagaaccagccugcccagaugcuggcuggugagcaacggcagcuaccugaacgagacccacuucagcgacgacaucgagcagcaggccgacaacaugaucaccgagaugcugcagaaggaguaccuggacagacagggcaagaccccccugggccugguggaccuguucguguucagcaccagcuucuaccugaucagcaucuuccugcaccuggugaagauccccacccacagacacaucgugggcaagcccugccccaagccccacagacugaaccacaugggcaucugcagcugcggccuguacaagcagcccggcgugcccgugagauggaagagaugaggacuagucccuguucccagagcccacuuuuuuuucuuuuuuugaaauaaaauagccugucuuucagaucucaaaggcucuuuucagagccaccaaaaaaaaaaaaaaaaaaaaaaaaaaaaaaaaaaaaaaaaaaaaaaaaaaaaaaaaaaaaaaaaagaauu

SEQ ID NO: 37147 - RNA, 1736 nt, Artificial Sequence
  mRNA product Design a-2 (hSL-A64-N5) comprising derived and/or modified sequence from LASV(G1180-SLE-2010;Clade IV)__AIT17168__GPCmut10 (opt4)
aggagaguccgcucagccagguugcagaagcggcuuagcguguguccuaaucuucucucugcguguagguaggccugugccgcaaacaagcuuaccaugggccagaucgugaccuucuuccaggaggugccccacgugaucgaggaggugaugaacaucgugcugaucgcccugagcauccuggccgugcugaagggccuguacaacuucgccaccugcggccuggugggccugcugaccuuccugcugcugugcggcagaagcugcaccgccagcagauacaagggcguguacgagcugcagacccuggagcugaacauggagacccugaacaugugcaugccccugagcugcaccaagaacaacagccaccacuacaucauggugggcaacgagaccggccuggagcugacccugaccaacaccagcaucaucaaccacaaguucugcaaccugagcgacgcccacaagaagaaccuguacgaccacgcccugaugagcaucaucagcaccuuccaccugagcauccccaacuucaaccaguacgaggccaugagcugcgacuucaacggcggcaagaucagcgugcaguacaaccugagccacagcuacgccggcgacgccgccaaccacugcggcaccguggccaacggcgugcugcagaccuucaugagaauggccuggggcggcagcuacaucgcccuggacagcggccacggcagcugggacugcaucaugaccagcuaccaguaccugaucauccagaacaccaccugggaggaccacugccaguucagcagacccagccccaucggcuaccugggccugcugagccagagaaccagagacaucuacaucagcagaagacugcugggcaccuucaccuggacccugagcgacagcgagggcaaggacacccccggcggcuacugccugaccagauggaugcugaucgaggccgagcugaagugcuucggcaacaccgccguggccaagugcaacgagaagcacgacgaggaguucugcgacaugcugagacuguucgacuucugcaagcaggccauccagagacugaaggccgaggcccagaugagcauccagcugaucaacaaggccgugaacgcccugaucaacgaccagcugaucaugaagaaccaccugagagacaucaugggcauccccuacugcaacuacagcaaguacugguaccugaaccacaccaccaccggcaagaccagccugcccaagugcuggcuggugagcaacggcagcuaccugaacgagacccacuucagcgacgacaucgagcagcaggccgacaacaugaucaccgagaugcugcagaaggaguacauggagagacagggcaagaccccccugggccugguggaccuguucguguucagcaccagcuucuaccugaucagcaucuuccugcaccuggugaagauccccacccacagacacaucgugggcaagagcugccccaagccccacagacugaaccacaugggcaucugcagcugcggccuguacaagcagcccggcgugcccgugaaguggaagagaugaggacuagucccuguucccagagcccacuuuuuuuucuuuuuuugaaauaaaauagccugucuuucagaucucaaaggcucuuuucagagccaccaaaaaaaaaaaaaaaaaaaaaaaaaaaaaaaaaaaaaaaaaaaaaaaaaaaaaaaaaaaaaaaaagaauu

SEQ ID NO: 37148 - RNA, 1736 nt, Artificial Sequence
  mRNA product Design a-2 (hSL-A64-N5) comprising derived and/or modified sequence from LASV(G1442-SLE-2011;Clade IV)__AIT17180__GPCmut10 (opt4)
aggagaguccgcucagccagguugcagaagcggcuuagcguguguccuaaucuucucucugcguguagguaggccugugccgcaaacaagcuuaccaugggccagaucgugaccuucuuccaggaggugccccacgugaucgaggaggugaugaacaucgugcugaucgcccugagcauccuggccgugcugaagggccuguacaacguggccaccugcggccugaucggccuggugaccuuccugcugcugugcggcagaagcugcaccaccacccuguacaagggcguguacgagcugcagacccuggagcugaacauggagacccugaacaugugcaugccccugagcugcaccaagaacaacagccaccacuacaucagagugggcaacgagaccggccuggagcugacccugaccaacaccagcaucaucaaccacaaguucugcaaccugagcgacgcccacaagaagaaccuguacgaccacgcccugaugagcaucaucagcaccuuccaccugagcauccccaacuucaaccaguacgaggccaugagcugcgacuucaacggcggcaagaucagcgugcaguacaaccugagccacagcuacgccggcgacgccgccaaccacugcggcaccguggccaacggcgugcugcagaccuucaugagaauggccuggggcggcagcuacaucgcccuggacagcggcagaggcaacugggacugcaucaugaccagcuaccaguaccugaucauccagaacaccaccugggacgaccacugccaguucagcagacccagccccaucggcuaccugggccugcugagccagagaaccagagacguguacaucagcagaagacugcugggcaccuucaccuggacccugagcgacagcgagggcaaggacacccccggcggcuacugccugaccagauggaugcugaucgaggccgagcugaagugcuucggcaacaccgccguggccaagugcaacgagaagcacgacgaggaguucugcgacaugcugagacuguucgacuucugcaagcaggccauccagagacugaaggccgaggcccagaugagcauccagcugaucaacaaggccgugaacgcccugaucaacgaccagcugaucaugaagaaccaccugagagacaucaugggcauccccuacugcaacuacagcaaguacugguaccugaacaacaccgccaccggcaagaccagccugcccaagugcuggcugaucagcaacggcagcuaccugaacgagacccacuucagcgacgacaucgagcaggaggccgacaacaugaucaccgagaugcugcagaaggaguacauggagagacagggcaagaccccccugggccugguggaccuguucguguucagcaccagcuucuaccugaucagcaucuuccugcaccuggugaagauccccacccacagacacaucgugggcaagagcugccccaagccccacagacugaaccacaugggcaucugcagcugcggccuguacaagcagcccggcgugcccgugagauggaagagaugaggacuagucccuguucccagagcccacuuuuuuuucuuuuuuugaaauaaaauagccugucuuucagaucucaaaggcucuuuucagagccaccaaaaaaaaaaaaaaaaaaaaaaaaaaaaaaaaaaaaaaaaaaaaaaaaaaaaaaaaaaaaaaaaagaauu

SEQ ID NO: 37149 - RNA, 1736 nt, Artificial Sequence
  mRNA product Design a-2 (hSL-A64-N5) comprising derived and/or modified sequence from LASV(G3010-SLE-2013;Clade IV)__AIT17344__GPCmut10 (opt4)
aggagaguccgcucagccagguugcagaagcggcuuagcguguguccuaaucuucucucugcguguagguaggccugugccgcaaacaagcuuaccaugggccagaucgugaccuucuuccaggaggugccccacgugaucgaggaggugaugaacaucgugcugaucgcccugagcauccuggccgugcugaagggccuguacaacuucgccaccugcggccuggugggccuggugaccuuccugcugcugugcggcagaagcugcaccaccagccuguacaagggcguguacgagcugcagacccuggagcugaacauggagacccugaacaugugcaugccccugagcugcaccaagaacaacagccaccacuacaucauggugggcaacgagaccggccuggagcugacccugaccaacaccagcaucaucaaccacaaguucugcaaccugagcgacgcccacaagaagaaccuguacaaccacgcccugaugagcaucaucagcaccuuccaccugagcauccccaacuucaaccaguacgaggccaugagcugcgacuucaacggcggcaagaucagcgugcaguacaaccugagccacagcuacgccggcgacgccgccagccacugcggcaccguggccaacggcgugcugcagaccuucaugagaauggccuggggcggcagcuacaucgcccuggacagcggcuacggcaagugggacugcaucaugaccagcuaccaguaccugaucauccagaacaccaccugggaggaccacugccaguucagcagacccagccccaucggcuaccugggccugcugagccagagaaccagagacaucuacaucagcagaagacugcugggcaccuucaccuggacccugagcgacagcgagggcaaggacacccccggcggcuacugccugaccagauggaugcugaucgaggccgagcugaagugcuucggcaacaccgccguggccaagugcaacgagaagcacgacgaggaguucugcgacaugcugagacuguucgacuucugcaagcaggccauccagagacugaagaccgaggcccagaugagcauccagcugaucaacaaggccgugaacgcccugaucaacgaccagcugaucaugaagaaccaccugagagacaucaugggcauccccuacugcaacuacagcaaguacugguaccugaaccacaccaccaccggcaagaccagccugcccaagugcuggcuggugagcaacggcagcuaccugaacgagacccacuucagcgacgacaucgagcagcaggccgacaacaugaucaccgagaugcugcagaaggaguacauggagagacagggcaagaccccccugggccugguggaccuguucguguucagcaccagcuucuaccugaucagcaucuuccugcaccuggugaagauccccacccacagacacaucgugggcaagagcugccccaagccccacagacugaaccacaugggcaucugcagcugcggccuguacaagcagcccggcgugcccgugagauggaagagaugaggacuagucccuguucccagagcccacuuuuuuuucuuuuuuugaaauaaaauagccugucuuucagaucucaaaggcucuuuucagagccaccaaaaaaaaaaaaaaaaaaaaaaaaaaaaaaaaaaaaaaaaaaaaaaaaaaaaaaaaaaaaaaaaagaauu

SEQ ID NO: 37150 - RNA, 1736 nt, Artificial Sequence
  mRNA product Design a-2 (hSL-A64-N5) comprising derived and/or modified sequence from LASV(G502-SLE-2009;Clade IV)__AIT17126__GPCmut10 (opt4)
aggagaguccgcucagccagguugcagaagcggcuuagcguguguccuaaucuucucucugcguguagguaggccugugccgcaaacaagcuuaccaugggccagaucgugaccuucuuccaggaggugccccacgugaucgaggaggugaugaacaucgugcugaucgcccugagcauccuggccgugcugaagggccuguacaacuucgccaccugcggccuggugggccugcugaccuuccugcugcugugcggcagaagcugcaccaccggccuguacaagggcguguacgagcugcagacccuggagcugaacauggagacccugaacaugugcaugccccugagcugcaccaagaacaacagccaccacuacaucauggugggcaacgagaccggccuggagcugacccugaccaacaccagcaucaucaaccacaaguucugcaaccugagcgacgcccacaagaagaaccuguacgaccacgcccugaugagcaucaucagcaccuuccaccugagcauccccaacuucaaccaguacgaggccaugagcugcgacuucaacggcggcaagaucagcgugcaguacaaccugagccacagcuacgccggcgacgccgccgaccacugcggcaccguggccaacggcgugcugcagaccuucaugagaauggccuggggcggcagcuacaucgcccuggacagcggcagaggcagaugggacugcaucaugaccagcuaccaguaccugaucauccagaacaccaccugggaggaccacugccaguucagcagacccagccccaucggcuaccugggccugcugagccagagaaccagagacaucuacaucagcagaagacugcugggcaccuucaccuggacccugagcgacagcgagggcaaggacacccccggcggcuacugccugaccagauggaugcugaucgaggccgagcugaagugcuucggcaacaccgccguggccaagugcaacgagaagcacgacgaggaguucugcgacaugcugagacuguucgacuucugcaagcaggccauccagagacugaaggccgaggcccagaugagcauccagcugaucaacaaggccgugaacgcccugaucaacgaccagcuggugaugaagaaccaccugagagacaucaugggcauccccuacugcaacuacagcagauacugguaccugaaccacaccaccaccggcagaaccagccugcccaagugcuggcuggugagcaacggcagcuaccugaacgagacccacuucagcgacgacaucgagcagcaggccgacaacaugaucaccgagaugcugcagaaggaguacauggagagacagggcaagaccccccugggccugguggaccuguucguguucagcaccagcuucuaccugaucagcaucuuccugcaccuggugaagauccccacccacagacacaucgugggcaagagcugccccaagccccacagacugaaccacaugggcaucugcagcugcggccuguacaagcagcccggcgugcccgugaaguggaagagaugaggacuagucccuguucccagagcccacuuuuuuuucuuuuuuugaaauaaaauagccugucuuucagaucucaaaggcucuuuucagagccaccaaaaaaaaaaaaaaaaaaaaaaaaaaaaaaaaaaaaaaaaaaaaaaaaaaaaaaaaaaaaaaaaagaauu

SEQ ID NO: 37151 - RNA, 1736 nt, Artificial Sequence
  mRNA product Design a-2 (hSL-A64-N5) comprising derived and/or modified sequence from LASV(G733-SLE-2010;Clade IV)__AIT17154__GPCmut10 (opt4)
aggagaguccgcucagccagguugcagaagcggcuuagcguguguccuaaucuucucucugcguguagguaggccugugccgcaaacaagcuuaccaugggccagaucgugaccuucuuccaggaggugccccacgugaucgaggaggugaugaacaucgugcugaucgcccugagcauccuggccgugcugaagggccuguacaacuucgccaccugcggcaucgugggccuggugagcuuccugcugcugugcggcagaagcugcaccaccagccuguacaagggcguguacgagcugcagacccuggagcugaacauggagacccugaacaugugcaugccccugagcugcaccaagaacaacagccaccacuacaucauggugggcaacgagaccggccuggagcugacccugaccaacaccagcaucaucaaccacaaguucugcaaccugagcgacgcccacaagaagaaccuguacgaccacgcccugaugagcaucaucagcaccuuccaccugagcauccccaacuucaaccaguacgaggccaugagcugcgacuucaacggcggcaagaucagcgugcaguacaaccugagccacagcuacgccggcgacgccgccaaccacugcggcaccaucgccaacggcgugcugcagaccuucaugagaauggccuggggcggcagcuacaucgcccuggacagcggcagagacagaugggacugcaucaugaccagcuaccaguaccugaucauccagaacaccaccugggaggaccacugccaguucagcagacccagccccaucggcuaccugggccugcugagccagagaaccagagacaucuacaucagcagaagacugcugggcaccuucaccuggacccugagcgacagcgagggcaaggacacccccggcggcuacugccugaccagauggaugcugaucgaggccgagcugaagugcuucggcaacaccgccguggccaagugcaacgagaagcacgacgaggaguucugcgacaugcugagacuguucgacuucugcaagcaggccauccagagacugaaggccgaggcccagaugagcauccagcugaucaacaaggccgugaacgcccugaucaacgaccagcugaucaugaagaaccaccugagagacaucaugggcauccccuacugcaacuacagcaaguacugguaccugaaccacaccaccaccggcaagaccagccugcccaagugcuggcuggugagcaacggcagcuaccugaacgagacccacuucagcgacgacaucgagcagcaggccgacaacaugaucaccgagaugcugcagaaggaguacauggagagacagggcaagaccccccugggccugguggaccuguucguguucagcaccagcuucuaccugaucagcaucuuccugcaccuggugaagauccccacccacagacacguggugggcaagagcugccccaagccccacagacugaaccacaugggcaucugcagcugcggccuguacggccagcccggcgugcccgugaaguggaagagaugaggacuagucccuguucccagagcccacuuuuuuuucuuuuuuugaaauaaaauagccugucuuucagaucucaaaggcucuuuucagagccaccaaaaaaaaaaaaaaaaaaaaaaaaaaaaaaaaaaaaaaaaaaaaaaaaaaaaaaaaaaaaaaaaagaauu

SEQ ID NO: 37152 - RNA, 1736 nt, Artificial Sequence
  mRNA product Design a-2 (hSL-A64-N5) comprising derived and/or modified sequence from MOPV/LASV reassortant(IGS-1;Clade IV)__AFY05576__GPCmut10 (opt4)
aggagaguccgcucagccagguugcagaagcggcuuagcguguguccuaaucuucucucugcguguagguaggccugugccgcaaacaagcuuaccaugggccagaucgugaccuucuuccaggaggugccccacgugaucgaggaggugaugaacaucgugcugaucgcccugagcgugcuggccgugcugaagggccuguacaacuucgccaccugcggccuggugggccuggugaccuuccugcugcugugcggcagaagcugcaccaccagccuguacaagggcguguacgagcugcagacccuggagcugaacauggagacccugaacaugugcaugccccugagcugcaccaagaacaacagccaccacuacaucauggugggcaacgagaccggccuggagcugacccugaccaacaccagcaucaucaaccacaaguucugcaaccugagcgacgcccacaagaagaaccuguacgaccacgcccugaugagcaucaucagcaccuuccaccugagcauccccaacuucaaccaguacgaggccaugagcugcgacuucaacggcggcaagaucagcgugcaguacaaccugagccacagcuacgccggcgacgccgccaaccacugcggcaccguggccaacggcgugcugcagaccuucaugagaauggccuggggcggcagcuacaucgcccuggacagcggcagaggcaacugggacugcaucaugaccagcuaccaguaccugaucauccagaacaccaccugggaggaccacugccaguucagcagacccagccccaucggcuaccugggccugcugagccagagaaccagagacaucuacaucagcagaagacugcugggcaccuucaccuggacccugagcgacagcgagggcgaggacacccccggcggcuacugccugaccagauggaugcugaucgaggccgagcugaagugcuucggcaacaccgccguggccaagugcaacgagaagcacgacgaggaguucugcgacaugcugagacuguucgacuucugcaagcaggccauccagagacugaaggccgaggcccagaugagcauccagcugaucaacaaggccgugaacgcccugaucaacgaccagcugaucaugaagaaccaccugagagacaucaugggcauccccuacugcaacuacagcaaguacugguaccugaaccacaccaccaccggcagaaccagccugcccaagugcuggcuggugagcaacggcagcuaccugaacgagacccacuucagcgacgacaucgagcagcaggccgacaacaugaucaccgagaugcugcagaaggaguacauggagagacagggcaagaccccccugggccugguggaccuguucguguucagcaccagcuucuaccugaucagcaucuuccugcaccuggugaagauccccacccacagacacaucgugggcaagagcugccccaagccccacagacugaaccacaugggcaucugcagcugcggccuguacaagcagcccggcgugcccgugaaguggaagagaugaggacuagucccuguucccagagcccacuuuuuuuucuuuuuuugaaauaaaauagccugucuuucagaucucaaaggcucuuuucagagccaccaaaaaaaaaaaaaaaaaaaaaaaaaaaaaaaaaaaaaaaaaaaaaaaaaaaaaaaaaaaaaaaaagaauu

SEQ ID NO: 37153 - RNA, 1736 nt, Artificial Sequence
  mRNA product Design a-2 (hSL-A64-N5) comprising derived and/or modified sequence from LASV(LM765-SLE-2012;Clade IV)__AIT17814__GPCmut10 (opt4)
aggagaguccgcucagccagguugcagaagcggcuuagcguguguccuaaucuucucucugcguguagguaggccugugccgcaaacaagcuuaccaugggccagaucgugaccuucuuccaggaggugccccacgugaucgaggaggugaugaacaucgugcugaucgcccugagcauccuggccgugcugaagggccuguacaacuucgccaccugcggccuggugggccuggugaccuuccugcugcugugcggcagaagcugcaccaccagccuguacaagggcguguacgagcugcagacccuggagcugaacauggagacccugaacaugugcaugccccugagcugcaccaagaacaacagccaccacuacaucauggugggcaacgagaccggccuggagcugacccugaccaacaccagcaucaucgaccacaaguucugcaaccugagcgacgcccacagaaagaaccuguacgaccacgcccugaugagcaucaucagcaccuuccaccugagcauccccaacuucaaccaguacgaggccaugagcugcgacuucaacggcggcaagaucagcgugcaguacaaccugagccacagcuacgccaaggacgccgccgaccacugcggcaccguggccaacggcgugcugcagaccuucaugagaauggccuggggcggcagcuacaucgcccuggacagcggcagaggcagaugggacugcaucaugaccagcuaccaguaccugaucauccagaacaccaccugggaggaccacugccaguucagcagacccagccccaucggcuaccugggccugcugagccagagaaccagagacaucuacaucagcagaagacugcugggcaccuucaccuggacccugagcgacagcgagggcaaggacacccccggcggcuacugccugaccagauggaugcugaucgaggccgagcugaagugcuucggcaacaccgccguggccaagugcaacgagaagcacgacgaggaguucugcgacaugcugagacuguucgacuucugcaagcaggccauccagagacugaaggccgaggcccagaugagcauccagcugaucaacaaggccgugaacgcccugaucaacgaccagcugaucaugaagaaccaccugagagacaucaugggcauccccuacugcaacuacagcaaguacugguaccugaaccacaccaccaccggcaagaccagccugcccaagugcuggcuggugagcaacggcagcuaccugaacgagacccacuucagcgacgacaucgagcagcaggccgacaacaugaucaccgagaugcugcagaaggaguacauggagagacagggcaagaccccccugggccugguggaccuguucguguucagcaccagcuucuaccugaucagcaucuuccugcaccuggugaagauccccacccacagacacaucgugggcaagcccugccccaagccccacagacugaaccacaugggcaucugcagcugcggccuguacaagcagcccggcgugcccgugaaguggaagagaugaggacuagucccuguucccagagcccacuuuuuuuucuuuuuuugaaauaaaauagccugucuuucagaucucaaaggcucuuuucagagccaccaaaaaaaaaaaaaaaaaaaaaaaaaaaaaaaaaaaaaaaaaaaaaaaaaaaaaaaaaaaaaaaaagaauu

SEQ ID NO: 37154 - RNA, 1736 nt, Artificial Sequence
  mRNA product Design a-2 (hSL-A64-N5) comprising derived and/or modified sequence from LASV(LM776-SLE-2012;Clade IV)__AIT17824__GPCmut10 (opt4)
aggagaguccgcucagccagguugcagaagcggcuuagcguguguccuaaucuucucucugcguguagguaggccugugccgcaaacaagcuuaccaugggccagaucgugaccuucuuccaggaggugccccacgugaucgaggaggugaugaacaucgugcugaucgcccugagcauccuggccgugcugaagggccuguacaacuucgccaccugcggccuggugggccuggugaccuuccugcugcugugcggcagaagcugcaccaccagcguguacaagggcguguacgagcugcagacccuggagcugaacauggagacccugaacaugugcaugccccugagcugcaccaagaacaacagccaccacuacaucauggugggcaacgagaccggccuggagcugacccugaccaacaccagcaucaucaaccacaaguucugcaaccugagcgacgcccacaagaagaaccuguacgaccacgcccugaugagcaucaucagcaccuuccaccugagcauccccaacuucaaccaguacgaggccaugagcugcgacuucaacggcggcaagaucagcgugcaguacaaccugagccacagcuacgccggcgacgccgccaaccacugcggcaccguggccaacggcgugcugcagaccuucaugagaauggccuggggcggcagcuacaucgcccuggacagcggccacggcaagugggacugcaucaugaccagcuaccaguaccugaucauccagaacaccaccugggaggaccacugccaguucagcagacccagccccaucggcuaccugggccugcugagccagagaaccagagacaucuacaucagcagaagacugcugggcaccuucaccuggacccugagcgacagcgagggcaaggacacccccggcggcuacugccugaccagauggaugcugaucgaggccgagcugaagugcuucggcaacaccgccguggccaagugcaacgagaagcacgacgaggaguucugcgacaugcugagacuguucgacuucugcaagcaggccauccagagacugaaggccgaggcccagaugagcauccagcugaucaacaaggccgugaacgcccugaucaacgaccagcugaucaugaagaaccaccugagagacaucaugggcauccccuacugcaacuacagcaaguacugguaccugaaccacaccaccaccggcaagaccagccugcccaagugcuggcuggugagcaacggcagcuaccugaacgagacccacuucagcgacgacaucgagcagcaggccgacaacaugaucaccgagaugcugcagaaggaguacauggagagacagggcaagaccccccugggccugguggaccuguucguguucagcaccagcuucuaccugaucagcaucuuccugcaccuggugaagauccccacccacagacacaucgugggcaagagcugccccaagccccacagacugaaccacaugggcaucugcagcugcggccuguacaagcagcccggcgugcccgugagauggaagagaugaggacuagucccuguucccagagcccacuuuuuuuucuuuuuuugaaauaaaauagccugucuuucagaucucaaaggcucuuuucagagccaccaaaaaaaaaaaaaaaaaaaaaaaaaaaaaaaaaaaaaaaaaaaaaaaaaaaaaaaaaaaaaaaaagaauu

SEQ ID NO: 37155 - RNA, 1736 nt, Artificial Sequence
  mRNA product Design a-2 (hSL-A64-N5) comprising derived and/or modified sequence from LASV(Mad39;Clade IV)__ANH09722__GPCmut10 (opt4)
aggagaguccgcucagccagguugcagaagcggcuuagcguguguccuaaucuucucucugcguguagguaggccugugccgcaaacaagcuuaccaugggccagaucgugaccuucuuccaggaggugccccacgugaucgaggaggugaugaacaucgugcugaucgcccugagcauccuggccgugcugaagggccuguacaacguggccaccugcggccugaucggccuggugaccuuccugcugcugugcggcagaagcugcaccaccacccuguacaagggcguguacgagcugcaggcccuggagcugaacauggagacccugaacaugugcaugccccugagcugcaccaagaacaacagccaccacuacaucagagugggcaacgagaccggccuggagcugacccugaccaacaccagccugaucaaccacaaguucugcaaccugagcgacgcccacaagaagaaccuguacgaccacgcccugaugagcaucaucagcaccuuccaccugagcauccccaacuucaaccaguacgaggccaugagcugcgacuucaacgacggcaagaucagcgugcaguacaaccugagccacaccuacgccggcgacaccgccaaccacugcggcaccguggccaacggcgugcugcagaccuucaugagaauggccuggggcggcagcuacaucgcccuggacagcggcagaggcggcugggacugcaucaugaccagcuaccaguaccugaucauccagaacaccaccugggaggaccacugccaguucagcagacccagccccaucggcuaccugggccugcugagccagagaaccagagacaucuacaucagcagaagacugcugggcaccuucaccuggacccugagcgacagcgagggcaaggacacccccggcggcuacugccugaccagauggaugcugaucgaggccgagcugaagugcuucggcaacaccgccguggccaagugcaacgagaagcacgacgaggaguucugcgacaugcugagacuguucgacuucugcaagcaggccauccagagacugaaggccgaggcccagaugagcauccagcugaucaacaaggccgugaacgcccugaucaacgaccagcugaucaugaagaaccaccugagagacaucaugggcauccccuacugcaacuacagcaaguacugguaccugaaccacaccgugaccggcaagaccagccugcccaagugcuggcuggugagcaacggcagcuaccugaacgagacccacuucagcgacgacaucgagcagcaggccgacaacaugaucaccgagaugcugcagaaggaguacauggagagacagggcaagaccccccugggccugguggaccuguucguguucagcaccagcuucuaccugaucagcaucuuccugcaccuggugaagauccccacccacagacacguggugggcaagcccugccccaagccccacagacugaaccacaugggcaucugcagcugcggcuucuacaagcagcccggcgugcccgugagauggaagagaugaggacuagucccuguucccagagcccacuuuuuuuucuuuuuuugaaauaaaauagccugucuuucagaucucaaaggcucuuuucagagccaccaaaaaaaaaaaaaaaaaaaaaaaaaaaaaaaaaaaaaaaaaaaaaaaaaaaaaaaaaaaaaaaaagaauu

SEQ ID NO: 37156 - RNA, 1736 nt, Artificial Sequence
  mRNA product Design a-2 (hSL-A64-N5) comprising derived and/or modified sequence from LASV(Z0947-SLE-2011;Clade IV)__AIT17840__GPCmut10 (opt4)
aggagaguccgcucagccagguugcagaagcggcuuagcguguguccuaaucuucucucugcguguagguaggccugugccgcaaacaagcuuaccaugggccagaucgugaccuucuuccaggaggugccccacgugaucgaggaggugaugaacaucgugcugaucgcccugagcauccuggccgugcugaagggccuguacaacuucgccaccugcggccuggugggccuggugaccuuccugcugcugugcggcagaagcugcaccaucagccuguacaagggcguguacgagcugcagacccuggagcugaacauggagacccugaacaugugcaugccccugagcugcaccaagaacaacagccaccacuacaucauggugggcaacgagaccggccuggagcugacccugaccaacaccagcaucaucaaccacaaguucugcaaccugagcgacgcccacaagaagaaccuguacgaccacgcccugaugagcaucaucagcaccuuccaccugagcauccccaacuucaaccaguacgaggccaugagcugcgacuucaacggcggcaagaucagcgugcaguacaaccugagccacagcuacgccggcgacgccgccaaccacugcggcaccguggccaacggcgugcugcagaccuucaugagaauggccuggggcggcagcuacaucgcccuggacagcggcagagacagaugggacugcaucaugaccagcuaccaguaccugaucauccagaacaccaccugggaggaccacugccaguucagcagacccagccccaucggcuaccugggccugcugagccagagaaccagagacaucuacaucagcagaagacugcugggcaccuucaccuggacccugagcgacagcgagggcaaggacacccccggcggcuacugccugaccagauggaugcugaucgaggccgagcugaagugcuucggcaacaccgccguggccaagugcaacgagaagcacgacgaggaguucugcgacaugcugagacuguucgacuucugcaagcaggccauccagagacugaaggccgaggcccagaugagcauccagcugaucaacaaggccgugaacgcccugaucaacgaccagcugaucaugaagaaccaccugagagacaucaugggcauccccuacugcaacuacagcaaguacugguaccugaaccacaccaccaccggcaagaccagccugcccaagugcuggcuggugagcaacggcagcuaccugaacgagacccacuucagcgacgacaucgagcagcaggccgacaacaugaucaccgagaugcugcagaaggaguacauggagagacagggcaagaccccccugggccugguggaccuguucguguucagcaccagcuucuaccugaucagcaucuuccugcaccuggugaagauccccacccacagacacaucgugggcaagcccugccccaagccccacagacugaaccacaugggcaucugcagcugcggccuguacaagcagcccggcgugcccgugaaguggaagagaugaggacuagucccuguucccagagcccacuuuuuuuucuuuuuuugaaauaaaauagccugucuuucagaucucaaaggcucuuuucagagccaccaaaaaaaaaaaaaaaaaaaaaaaaaaaaaaaaaaaaaaaaaaaaaaaaaaaaaaaaaaaaaaaaagaauu

SEQ ID NO: 37157 - RNA, 1736 nt, Artificial Sequence
  mRNA product Design a-2 (hSL-A64-N5) comprising derived and/or modified sequence from LASV(Josiah;Clade IV)__NP_694870__GPCmut10 (opt5)
aggagaguccgcucagccagguugcagaagcggcuuagcguguguccuaaucuucucucugcguguagguaggccugugccgcaaacaagcuuaccaugggccagaucgugaccuucuuucaagaggucccccacguuauugaagaggugaugaacaucgugcugauugcccucagcguccuggcugugcuuaaggggcuguacaauuucgccacaugcggacucguuggccuggugacguuucuucugcucugugggagauccugcaccacaucucuguauaaaggagucuacgaacugcagacccucgagcugaacauggaaacacuuaauauguguaugccucugagcugcaccaagaacaauucccaucacuauaucauggugggcaacgagacagggcucgagcugacccuuacgaauaccucuauuaucaaccauaaauucuguaaucugagcgacgcgcacaagaaaaaccucuacgaucaugcucugauguccaucauuucuacauuucaccugagcaucccgaauuucaaccaguaugaagccauguccugcgacuuuaauggaggcaagauuagcguucaguacaaccucucucacuccuaugccggcgaugcugccaaucauugugggaccguggcuaacggaguccugcaaacauucaugcggauggccuggggcgggagcuacaucgcgcuugacucuggacgcggcaacugggauugcauuaugaccuccuaccaguaucugaucauucagaauacgacaugggaggaccacugucaguuuagcagacccucuccuaucggguaccucggacugcuuucccaacggacccgcgauaucuauauuagcagacggcugcucggcacauucaccuggacccuguccgacucugaaggcaaggauacacccgggggauacugccugacgcgcuggaugcucaucgaggccgagcugaaauguuuuggcaacaccgcuguggccaagugcaaugaaaaacaugacgaggaguucugcgauaugcuuagacuguuugacuucuguaagcaggcuauucagcggcucaaagccgaagcgcagaugagcauccaacugauuaacaaggccgugaaugcucuuaucaacgaucagcugaucaugaagaaucaccuccgcgacauuauggggaucccuuauugcaacuacuccaaauauugguaccugaaucacacaaccacaggaagaaccagccugcccaaguguuggcucgucucuaacggcuccuaccugaaugaaacgcauuucagcgacgauauugagcagcaagccgacaacaugaucacagagaugcuucagaaagaauauauggagcggcaggggaagaccccucugggacucguugaucuguuuguguucucuaccagcuuuuaccugauuuccaucuuccuucaccucgugaaaaucccgacacaucgccacauugucggcaagucuugccccaaaccucauagacugaaucacaugggcaucuguagcugcgggcuguauaagcagcccggagugccuguuaaguggaaacggugaggacuagucccuguucccagagcccacuuuuuuuucuuuuuuugaaauaaaauagccugucuuucagaucucaaaggcucuuuucagagccaccaaaaaaaaaaaaaaaaaaaaaaaaaaaaaaaaaaaaaaaaaaaaaaaaaaaaaaaaaaaaaaaaagaauu

SEQ ID NO: 37158 - RNA, 1733 nt, Artificial Sequence
  mRNA product Design a-2 (hSL-A64-N5) comprising derived and/or modified sequence from LASV(LP;Clade I)__AAF86701__GPCmut10 (opt5)
aggagaguccgcucagccagguugcagaagcggcuuagcguguguccuaaucuucucucugcguguagguaggccugugccgcaaacaagcuuaccaugggccagaucauuaccuucuuucaagaggugccccacgucaucgaagagguuaugaacauugugcugaucgcccucagccugcuugcuauucugaaggggcucuacaauaucgccacaugcggaaucauuggccugguggcguuccuuuuucugugugggaaauccugcucucucacgcugaagggaggcuaugaacugcagacccucgagcugaacauggaaacacuuaauauguguaugccucugagcugcaccaaaaacuccucucaucacuacaucagagucgggaaugagacaggacucgagcugacccuuacaaacaccagcauuaucaaucauaaguucuguaaccuguccgacgcucacaaaaagaaucucuaugaucaugcccugaugucuauuaucagcacguuucaccuguccauuccgaacuucaaucaguacgaagccaugagcugcgacuuuaacggcggcaagaucucugugcaguauaaucucucccacagcuacgcuggggaugccgcugagcauuguggaaccguugccaacggcgugcugcaaacauucaugcggauggcguggggagggcgcuauaucgcccuugacucuggcaaagggaauugggauugcauuaugaccuccuaccaguaccugaucauucagaacacaaccugggaagaccacugucaguuuagcagacccucuccuaucggauaucucggccugcuuucccaacggacgcgcgauauuuacaucagcagacggcugcucggcacauucaccuggacacuguccgacucugaggggaacgagacccccggaggcuauugccugacccgcuggaugcucaucgaagcugagcugaaguguuuugggaauacagccgucgcuaaaugcaacgaaaagcaugaugaggaguucugcgacaugcuuagacuguuugauuucuguaaacaggccauucggcgccucaaggcggaagcccagaugagcauccagcugauuaauaaggcugugaacgcccuuaucaaugaccaacugauuaugaaaaaccaccucagagauaucaugggaaucccuuacugcaauuauuccaaguacugguaucugaaccacacgagcucuggccggaccucccugcccaaauguuggcucauuagcaaugggucuuaccugaacgagacacaguucagcgacgacaucgaacagcaagcugauaauaugauuaccgagaugcuucagaaggaauacaucgagcgccagggaaaaacaccucugggccucguugacauuuuuaucuucuccaccucuuuuuaucugauuagcaucuuccugcaucuuaucaagauuccgacgcacagacauaucgugggcaaacccugcccuaagccccaccggcucaaccauaugggggucuguuccugcggacuguacaagcacccuggcgugcccacaaaauggaagcgcugaggacuagucccuguucccagagcccacuuuuuuuucuuuuuuugaaauaaaauagccugucuuucagaucucaaaggcucuuuucagagccaccaaaaaaaaaaaaaaaaaaaaaaaaaaaaaaaaaaaaaaaaaaaaaaaaaaaaaaaaaaaaaaaaagaauu

SEQ ID NO: 37159 - RNA, 1733 nt, Artificial Sequence
  mRNA product Design a-2 (hSL-A64-N5) comprising derived and/or modified sequence from LASV(803213;Clade II)__AAF86703__GPCmut10 (opt5)
aggagaguccgcucagccagguugcagaagcggcuuagcguguguccuaaucuucucucugcguguagguaggccugugccgcaaacaagcuuaccaugggccagaucauuaccuucuuucaagaggugccccacgucaucgaagagguuaugaacauugugcugaucgcccucagccugcuugcuauucugaaggggaucuacaauguggccacaugcggacucuucggccugaucuccuuucuucugcucugugggagaucuugcagcgucacguauaaaggaguguacgaacugcagacccuggagcucaacauggcgaaucugaacauguguaugccucuuuccugcacaaagaauaacucucaucacuauauuaugguuggcaaugaaaccgggcuggagcucacacugaccaacacaagcaucauuaaucauaaauucuguaaccuuuccgacgcucacaagaaaaaucuguacgaucaugcccucaugucuaucauuagcaccuuucaccuguccaucccgaacuucaaucaguaugaggccaugagcugcgacuuuaacggaggcaagauuucugugcaguacaaucugucccacagcuucgcugucgaugccgcuaaccauuguggcacgaucgccaacggggugcuccaaaccuuuaugcggauggcguggggaggcucuuauaucgcccuggacuccgggaagggaaauugggauugcauuaugacaagcuaccaguaccuuaucauucagaacaccacaugggaagaccacugucaguucucucgccccuccccuaucggcuaucuggggcuccugagccaaagaacccgggauauuuacaucucccgcagacuucugggaacguuuacauggacccucucugacagcgagggcaaugaagcucccggcggguauugccugacacgguggaugcugaucgaggccgagcucaaauguuucggaaacaccgcuguugccaagugcaaugaaaaacaugaugaggaauuuugcgacaugcugcgccuuuucgauuucuguaagcaggcgauuaaaagacugaagaccgaggcccagauguccauccagcucauuaacaaggcugugaaugcccugaucaacgaccaacuuauuaugaaaaaucaucugcgggauaucaugggcaucccuuacugcaacuauagccgcuacugguaucucaaucacacagucacggggaagaccucucugcccagauguuggcugguguccaacggaagcuaccucaaugaaacacacuuuucugacgacauugagcagcaggcugauaacaugaucaccgagaugcugcaaaaagaauacauggaccggcagggcaagacaccucuugggcugguggaucucuucgucuuuagcaccuccuucuaucugauuucuaucuuucugcaccuuguuaaaauuccgacgcaucgccacaucgugggaaagcccugcccuaaaccccauagacucaaucacaugggcauuuguagcugcggccuguacaagcacccuggggugcccgucaaguggaaacggugaggacuagucccuguucccagagcccacuuuuuuuucuuuuuuugaaauaaaauagccugucuuucagaucucaaaggcucuuuucagagccaccaaaaaaaaaaaaaaaaaaaaaaaaaaaaaaaaaaaaaaaaaaaaaaaaaaaaaaaaaaaaaaaaagaauu

SEQ ID NO: 37160 - RNA, 1733 nt, Artificial Sequence
  mRNA product Design a-2 (hSL-A64-N5) comprising derived and/or modified sequence from LASV(GA391;Clade III)__CAA36645__GPCmut10 (opt5)
aggagaguccgcucagccagguugcagaagcggcuuagcguguguccuaaucuucucucugcguguagguaggccugugccgcaaacaagcuuaccaugggccagaucgugaccuucuuucaagaggucccccacguuauugaagaggugaugaacaucgugcugauugcccucagcauccuggcuauucuuaaggggcuguacaaugucgccacaugcggacucaucggccuggugacguuccuucugcucuccgggagaucuuguagccugaucuauaaaggaaccuacgaacugcagacacucgagcugaacauggaaacccuuaauaugugcaugccucuguccuguacaaagaacaauucucaucacuauauucggguuggcaacgagaccgggcucgagcugacacuuaccaauacgagcauccugaaccauaaauuuugcaaucucuccgacgcgcacaagcgcaaccuguacgaucauucucugaugagcauuaucuccaccuuccaccucagcauuccgaauuuuaaccaguaugaagcuaugucuugugacuucaauggaggcaaaaucacagugcaguacaaccugucccacagcuuugccgucgaugccgcuggccauugcgggacccuugccaauggagugcugcaaacauucaugagaauggcuuggggcgggucuuauauugcccucgacuccggacggggcaacugggauuguaucaugaccagcuaccaguaccugaucauucagaacacgacaugggacgaucacugccaguuuucucgccccuccccuaucggguaucuuggacugcucagccaaagaacccgggacauuuacaucucccgcagacugcugggcacauucaccuggacccucucugauagcgagggcaaugaaacacccgggggauauugucugacgcgguggaugcuuauugaggcggagcugaagugcuuuggcaacaccgccguugcuaaguguaaugaaaaacaugacgaggaguucugcgauaugcuccgccuguuugacuucugcaagcaggccaucagacggcuuaaaacagaagcucagauguccauccagcugauuaacaaggccgugaaugcgcucaucaacgaucaacugauuaugaaaaaucaucugcgcgacaucauggggauuccuuacuguaacuauagcagauacugguaucucaaucacaccucuacaggaaagaccucccugccccggugcuggcuuaucagcaacggcucuuaccugaaugaaacgaaguucagcgacgauaucgagcagcaggccgacaacaugauuacagagaugcuccaaaaagaauacaucgaucgccaggggaagaccccucugggacuggucgaccuuuuuguguucuccaccucuuuuuaucucauuagcaucuuccugcaccuggugaaaauuccgacacacagacauaucgucggcaagcccuguccuaaaccccaccggcucaaucauaugggcauuugcuccugugggcuguacaagcagccuggaguucccgugagauggaaacgcugaggacuagucccuguucccagagcccacuuuuuuuucuuuuuuugaaauaaaauagccugucuuucagaucucaaaggcucuuuucagagccaccaaaaaaaaaaaaaaaaaaaaaaaaaaaaaaaaaaaaaaaaaaaaaaaaaaaaaaaaaaaaaaaaagaauu

SEQ ID NO: 37161 - RNA, 1736 nt, Artificial Sequence
  mRNA product Design a-2 (hSL-A64-N5) comprising derived and/or modified sequence from LASV(AV;Clade V)__CCA30314__GPCmut10 (opt5)
aggagaguccgcucagccagguugcagaagcggcuuagcguguguccuaaucuucucucugcguguagguaggccugugccgcaaacaagcuuaccaugggccagaucgugaccuucuuucaagaggucccccacguuauugaagaggugaugaacaucgugcugauugcccucagcauccuggcuguccuuaaggggcuguacaauauugccacaugcggacucaucggccugaucacguuccuucugcucugugggagauccugcucuagcaaccuguauaaaggaguguacgaacugcagucccucgaccugaauauggagacccuuaacauguguaugccucugucuugcacaaagaauaacagccaucacuauauucggguuggcaaugauaccgggcucgaacugacacuuaccaacacauccauccugaaucauaaauuuuguaaccucucugacgcgcacaagaaagaucuguacgaccaugcucugaugagcauuaucuccaccuuccaccucagcauuccgaauuuuaaccaguaugaggccaugucuugcgauuucaauggaggcaagaucuccgugcaguacaaccugagccacucuuaugccauugacgcugccaaucauuguggcacggucgcuaacgggauccuucaaaccuuuaugcgcauggccuggggaggcuccuacaucgcgcuggauagcgggagaggaaacugggacugcauuaugacaucuuaccaguaucucaucauucagaauaccacaugggagaaccacugucaguucucccggcccagcccuaucggcuaccuggggcuucugucccaacgcaccagagauauuuauaucucucggcgccuccugggaacguuuacauggacccugagcgacuccgaaggcaaugccacacccggcggguacugccucaccagauggaugcugaucgaggcugaacuuaaguguuucggaaacaccgccguggcuaaaugcaaugagaagcaugaugaggaauuuugcgacaugcugcgccucuucgauuuuuguaaacaggccauuagccggcugaagucugaggcgcagauguccauccagcuuauuaacaaagccguuaaugcucugaucaacgaccaacucauuaugaagaaucaccugagagacaucaugggcaucccuuauugcaacuacagcaaguauugguaccugaaucacacaauuacggggaaaaccucucuccccaaguguuggcuggugagcaacggauccuaccuuaaugaaacacauuucucugaugacaucgagcagcaggccgauaacaugauuaccgaaaugcugcaaaaagaguauauggagcggcagggcaagacaccucucgggcuggucgaccuguucguguuuagcaccuccuucuaccuuaucagcauuuuucuccgccuggugaaaaucccgacgcacagacauauugucggaaagcccugcccuaaaccccaccggcugaaucauaugggcaucuguucuugcggccucuauaagcagccugggguucccgugcgcuggaagagaugaggacuagucccuguucccagagcccacuuuuuuuucuuuuuuugaaauaaaauagccugucuuucagaucucaaaggcucuuuucagagccaccaaaaaaaaaaaaaaaaaaaaaaaaaaaaaaaaaaaaaaaaaaaaaaaaaaaaaaaaaaaaaaaaagaauu

SEQ ID NO: 37162 - RNA, 1733 nt, Artificial Sequence
  mRNA product Design a-2 (hSL-A64-N5) comprising derived and/or modified sequence from LASV(Togo/2016/7082;Clade VI)__AMR44577__GPCmut10 (opt5)
aggagaguccgcucagccagguugcagaagcggcuuagcguguguccuaaucuucucucugcguguagguaggccugugccgcaaacaagcuuaccaugggccagaucauuaccuucuuucaagaggugccccacgucaucgaagagguuaugaacauugugcugaucgcccucagccugcuugcuauucugaaggggguguacaaugucgccacaugcggaaucaucggccucgugacguuccuguuucuuugugggagauccugcucucugauuuauaaaggaagcuacgaacuccagacccuggagcugaacauggaaacacucaauauguguaugccucuguccugcaccaagaacucuagccaucacuauauccggguuggcaaugagacagggcuugagcugacccucacaaacaccuccauuaucaaucauaaauucuguaaccugucugacgcgcacaagcgcaaucuuuacgaucaugcucugaugagcauucucuccacguuucaccugagcaucccgaacuucaaucaguaugaagccaugucuugcgacuuuaacggaggcaaaauuuccgugcaguacaaucugagccacgccuaugcugucgaugccgcugagcauuguggcaccguggccaacgggguucuccaaacauucaugagaauggcguggggaggcucuuacaucgcccuggacuccgggcggggaaauugggauugcaucaugaccagcuaccaguaucuuauuauccagaacacaaccugggaagaccacugucaguuuucucgccccuccccuauuggcuaccuggggcuccugagccaaagaacgcgggauaucuauauuucccgcagacuucugggaacauucaccuggacacucucugacagcgagggcaacgagacccccggcggguacugccugacccgguggaugcugaucgaagcugagcucaaguguuuuggaaauacagccguggcuaagugcaacgaaaaacaugaugaggaguucugcgacaugcugcgccuuuuugauuucuguaagcaggccauccagagacugaaauccgaagcgcagaugagcauucaacucaucaauaaggccgucaacgcucugauuaaugaccagcuuaucaugaaaaaccaucugcgggauaugaugggcauuccuuauugcaauuacucuaaguauugguaccucaaccacacguccagcgggcgcaccucucugcccaaguguuggcuggugagcaauggauccuaccucaacgagacacacuucucugacgacaucgaacagcaagccgauaauaugaucaccgagaugcugcagaaagaauauauugacagacagggcaagacaccucuugggcugguggaucucuuugucuucagcaccuccuuuuaccugaucagcauuuuccugcaccuuaucaaaauuccgacgcaucggcacaucguuggaaagcccugcccuaaaccccaucgccucaaccacaugggcauuuguucuugcggccuguauaagcagccuggggugcccacaagauggaaacggugaggacuagucccuguucccagagcccacuuuuuuuucuuuuuuugaaauaaaauagccugucuuucagaucucaaaggcucuuuucagagccaccaaaaaaaaaaaaaaaaaaaaaaaaaaaaaaaaaaaaaaaaaaaaaaaaaaaaaaaaaaaaaaaaagaauu

SEQ ID NO: 37163 - RNA, 1733 nt, Artificial Sequence
  mRNA product Design a-2 (hSL-A64-N5) comprising derived and/or modified sequence from LASV(KAK-428;Clade n.d. (VII))__ANH09740__GPCmut10 (opt5)
aggagaguccgcucagccagguugcagaagcggcuuagcguguguccuaaucuucucucugcguguagguaggccugugccgcaaacaagcuuaccaugggccagaucgugaccuucuuucaagaggucccccacguuauugaagaggugaugaacaucgugcugauugcccucagccugcuugcuauccugaaggggcucuacaauuucgccacaugcggagucauuggccugaucacguuucuucugcucugugggagauccugcucugcgaccuauaaaggacaguacgaacugcagacacuggagcucaacauggaaagccugaauauguguaugccucuuuccugcaccaagaacaauucucaucacuauauccgggcuggcaacaauacagggcuggagcucacccugacaaacaccagcauuaucucccauaaauucuguaaucuuucugacgcccacaagaaaaaccuguacgaucauacgcucaugagcauuaucaccacauuucaccuguccauuccgaauuucaaccaguaugaggccaugagcugcgacuuuaauggaggcaagaucucuauucaauacaaccugucccacagcuaugcuggcgaugccgcucagcauugugggaccguggccaauggaguucuccagacauucaugcgcauggcguggggcgggucuuaccuggcccuugacuccggaagacggggcugggauugcaucaucagcucuuaccaguaucugauuauccaaaacaccacgugggacgaucacugucaguuuucccgccccagcccuauuggguaccucggauucgugucccagaagacaagagacaucuauauuucucggcgccugcuuggcaccuuuacauggacccugagcgauuccgaaggccaugacaugcccgggggauacugccucaccagauggaugcugaucgaggcugaucugaaauguuucggcaacacagccgucgcuaagugcaaugaaaaacacgacgaggaguuuugcgauauguggcgccucuucgacuucuguaagcaggccauccaacggcugaaagcggaagcccagaugaacauucagcuuaucaauaaggcugugaacgcccugauuaaugaccaacucaugaugaagaaccaccugagagauaucauggggauuccuuauugcaauuacagcaaauuuugguaucuuaacaauacgaccacaggacggaccucucugccccgcuguuggcucaucuccaacggcagcuaccugaaugagacacauuucucugacgauaucgaacagcaggcugacaacaugauuaccgagaugcugcagaaggaauacauggauagacaagggaaaacgccucucggacugguugaccuuuuuguguucagcacauccuuuuaucugaucaccauuuuccuccaccuggucaagaucccgacccaucggcacauugugggcaaacccugcccuaagccccaucgccugaaucacaugggcaucuguucuugcgggcuuuacaaacagccuggagugcccgucagauggaagcggugaggacuagucccuguucccagagcccacuuuuuuuucuuuuuuugaaauaaaauagccugucuuucagaucucaaaggcucuuuucagagccaccaaaaaaaaaaaaaaaaaaaaaaaaaaaaaaaaaaaaaaaaaaaaaaaaaaaaaaaaaaaaaaaaagaauu

SEQ ID NO: 37164 - RNA, 1733 nt, Artificial Sequence; identical to SEQ ID NO: 37158
  mRNA product Design a-2 (hSL-A64-N5) comprising derived and/or modified sequence from LASV(Pinneo-NIG-1969;Clade I)__AIT17836__GPCmut10 (opt5)

SEQ ID NO: 37165 - RNA, 1733 nt, Artificial Sequence
  mRNA product Design a-2 (hSL-A64-N5) comprising derived and/or modified sequence from LASV(ISTH0009-NIG-2011;Clade II)__AIT17404__GPCmut10 (opt5)
aggagaguccgcucagccagguugcagaagcggcuuagcguguguccuaaucuucucucugcguguagguaggccugugccgcaaacaagcuuaccaugggccagaucauuaccuucuuucaagaggugccccacgucaucgaagagguuaugaacauugugcugaucgcccucagccugcuugcuauucugaaggggaucuacaauguggccacaugcggacucuucggccuggucuccuuucuucugcucugugggagaucuugcagcacgaccuauaaaggaguguacgaacugcagacacuggagcucgacauggcgucccugaacauguguaugccucuuucuugcaccaagaauaacagccaucacuauaucaugguuggcaaugaaacagggcuggagcucacccugacaaacaccuccauuaucaaucauaaauucuguaaccuuucugaugcucacaagaaaaaucuguacgaccaugcccucaugagcauuaucuccacguuucaccugagcauuccgaacuucaaucaguaugaggccaugucuugcgauuuuaacggaggcaagaucuccgugcaguacaaucugagccacgcuuaugccgucgacgcugccaaccauuguggcaccauugcgaauggggugcuccaaacauucaugcggauggccuggggaggcucuuacaucgcucuggauuccgggaagggaagcugggacugcaucaugaccucuuaccaguaucuuauuauccagaacacaaccugggaagaucacugucaguuuucccgccccagcccuauuggcuaccuggggcuccugucccaaagaacgcgggacaucuauauuucucgcagacuucugggaacauucaccuggacacucagcgauuccgagggcaacgaaacccccggcggguacugccugacccgguggaugcugaucgaggccgagcucaaauguuuuggaaauacagcuguugccaagugcaacgaaaaacaugacgaggaguucugcgauaugcugcgccuuuuugacuucuguaagcaggcgaucagacggcugaaaacggaagcccagaugagcauucagcucaucaauaaggcugugaacgcccugauuaaugaucaacuuaucaugaagaaccaucugcgcgacauuaugggcaucccuuauugcaauuacucuaaauauugguaccucaaccacaccgucacagggaagaccucccugcccagauguuggcuggugagcaauggaucuuaccucaacgaaacacacuucagcgacgauaucgagcagcaggcugacaauaugauuaccgagcugcuucaaaaagaauauauggaucggcagggcaagacgccucuggggcucguggaccuguuugucuucuccacaucuuuuuaccugaucagcauuuuccuucaccucaucaaaauuccgacccaucgccacaucaccggaaagcccugcccuaaaccccauagacugaaccacaugggcauuuguuccugcggccuguauaagcacccugggguucccgugaaguggaaacggugaggacuagucccuguucccagagcccacuuuuuuuucuuuuuuugaaauaaaauagccugucuuucagaucucaaaggcucuuuucagagccaccaaaaaaaaaaaaaaaaaaaaaaaaaaaaaaaaaaaaaaaaaaaaaaaaaaaaaaaaaaaaaaaaagaauu

SEQ ID NO: 37166 - RNA, 1733 nt, Artificial Sequence
  mRNA product Design a-2 (hSL-A64-N5) comprising derived and/or modified sequence from LASV(ISTH2010-NIG-2012;Clade II)__AIT17482__GPCmut10 (opt5)
aggagaguccgcucagccagguugcagaagcggcuuagcguguguccuaaucuucucucugcguguagguaggccugugccgcaaacaagcuuaccaugggccagaucauuaccuucuuucaagaggugccccacgucaucgaagagguuaugaacauugugcugaucgcccucagccugcuugcuauucugaaggggaucuacaauguggccacaugcggacucuucggccuggucuccuuucuucugcucugugggagaucuugcagcacgaccuauaaaggaguguacgaacugcagacacuggagcucgacauggcgucccugaacauguguaugccucuuucuugcaccaagaauaacagccaucacuauaucaugguuggcaaugaaacagggcuggagcucacccugacaaacaccuccauuaucaaucauaaauucuguaaccuuucugaugcucacaagaaaaaucuguacgaccaugcccucaugagcauuaucuccacguuucaccugagcauuccgaacuucaaucaguaugaggccaugucuugcgauuuuaacggaggcaagaucuccgugcaguacaaucugagccacgcuuaugccgucgacgcugccaaccauuguggcaccauugcgaauggggugcuccaaacauucaugcggauggccuggggaggcucuuacaucgcucuggauuccgggaagggaagcugggacugcaucaugaccucuuaccaguaucuuauuauccagaacauuacaugggaagaucacugucaguuuucccgccccagcccuaucggcuaccuggggcuccugucccaaagaacccgggacauuuauaucucucgcagacuucugggaacguucacauggacccucagcgauuccgagggcaacgaaacacccggcggguacugccugacccgguggaugcugaucgaggccgagcucaaauguuuuggaaauaccgcuguugccaagugcaacgaaaaacaugacgaggaguucugcgauaugcugcgccuuuuugacuucuguaagcaggcgauuagacggcugaaaacagaagcccagaugagcauccagcucauuaauaaggcugugaacgcccugaucaaugaucaacuuauuaugaagaaccaucugcgcgacaucaugggcaucccuuauugcaauuacucuaaauauugguaccucaaccacacggucaccgggaagacaucccugcccagauguuggcuggugagcaauggaucuuaccucaacgaaacccacuucagcgacgauauugagcagcaggcugacaauaugaucacagagcugcuucaaaaagaauauauugaucggcagggcaagaccccucuggggcucguggaccuguuugucuucuccacgucuuuuuaccugaucagcauuuuccuucaccucguuaaaaucccgacacaucgccacguggugggaaagcccugcccuaaaccccauagacugaaccacaugggcauuuguuccugcggccuguauaagcacccugggguccccgugaaguggaaacggugaggacuagucccuguucccagagcccacuuuuuuuucuuuuuuugaaauaaaauagccugucuuucagaucucaaaggcucuuuucagagccaccaaaaaaaaaaaaaaaaaaaaaaaaaaaaaaaaaaaaaaaaaaaaaaaaaaaaaaaaaaaaaaaaagaauu

SEQ ID NO: 37167 - RNA, 1733 nt, Artificial Sequence
  mRNA product Design a-2 (hSL-A64-N5) comprising derived and/or modified sequence from LASV(Lassa virus/H.sapiens-wt/NGA/2015/ISTH_0543;Clade II)__AVO03639__GPCmut10 (opt5)
aggagaguccgcucagccagguugcagaagcggcuuagcguguguccuaaucuucucucugcguguagguaggccugugccgcaaacaagcuuaccaugggccagaucauuaccuucuuucaagaggugccccacgucaucgaagagguuaugaacauugugcugaucgcccucagccugcuugcuauucugaaggggaucuacaauguggccacaugcggacucuucggccuggucuccuuucuucugcucugugggagaucuugcagcacgaccuauaaaggaguguacgaacugcagacacuggagcucgacauggcgaaccugaauauguguaugccucuuuccugcaccaagaacaauucucaucacuauaucaugguuggcaacgaaacagggcuggagcucacccugacaaauaccagcauuaucaaccauaaauucuguaaucuuuccgaugcucacaagaaaaaccuguacgaccaugcccucaugucuauuaucagcacguuucaccuguccauuccgaauuucaaccaguaugaggccaugagcugcgauuuuaauggaggcaagaucucugugcaguacaaccugucccacaccuaugcugucgacgccgcuaaucauuguggcacaauugccaacggggugcuccaaaccuucaugcggauggcguggggaggcagcuacaucgcccuggauucugggaagggauccugggacugcaucaugacaagcuaccaguaucuuguuauucagaacaccacgugggaagaucacugucaguuuucucgccccuccccuaucggcuaccuggggcuccugagccaaagaacacgggacauuuauaucucccgcagacuucugggaaccuucacauggacccucucugauagcgagggcaaugaaacccccggcggguacugccugacacgguggaugcugauugaggcugagcucaaauguuuuggaaacacggccguggcuaagugcaaugaaaaacaugacgaggaguucugcgauaugcugcgccuuuuugacuucuguaagcaggccaucagacggcugaaaaccgaagcgcagauguccauccagcucauuaacaaggccgucaaugcucugaucaacgaucaacuuauuaugaagaaucaucugcgcgacaucaugggcauuccuuauugcaacuacagcaaauauugguaccucaaucacacagugaccgggaagacaucucugcccagauguuggcugguguccaacggaagcuaccucaaugaaacccacuucucugacgauaucgagcagcaggccgacaacaugaucacggagcugcuucaaaaagaauauauugaucggcagggcaagacaccucuggggcucgucgaccuguuuguuuucagcaccuccuuuuaccugaucucuauuuuccuucaccucgugaaaaucccgacccaucgccacauuacaggaaagcccugcccuaaaccccauagacugaaucacaugggcaucuguagcugcggccuguauaagcacccuggggugcccgucaaguggaaacggugaggacuagucccuguucccagagcccacuuuuuuuucuuuuuuugaaauaaaauagccugucuuucagaucucaaaggcucuuuucagagccaccaaaaaaaaaaaaaaaaaaaaaaaaaaaaaaaaaaaaaaaaaaaaaaaaaaaaaaaaaaaaaaaaagaauu

SEQ ID NO: 37168 - RNA, 1733 nt, Artificial Sequence
  mRNA product Design a-2 (hSL-A64-N5) comprising derived and/or modified sequence from LASV(Lassa virus/H.sapiens-wt/NGA/2016/ISTH_0009;Clade II)__AVO03571__GPCmut10 (opt5)
aggagaguccgcucagccagguugcagaagcggcuuagcguguguccuaaucuucucucugcguguagguaggccugugccgcaaacaagcuuaccaugggccagaucauuaccuucuuucaagaggugccccacgucaucgaagagguuaugaacauugugcugaucgcccucagccugcuugcuauucugaaggggaucuacaauguggccacaugcggacuccugggccuugucuccuuccugcuccugugugggagaucuugcagcacgaccuauaaaggaguguacgaacugcagacacucgagcuggacauggcgucccuuaacauguguaugccucugucuugcaccaagaauaacagccaucacuauaucaugguuggcaaugaaacagggcucgagcugacccuuacaaacaccuccauuaucaaucauaaauuuuguaaccugucugaugcucacaagaaaaaucucuacgaccaugcccugaugagcauuaucuccacguuccaccugagcauuccgaacuuuaaucaguaugaggccaugucuugcgauuucaacggaggccggaucuccgugcaguacaaucucagccacucuuaugcugucgacgccgcuaaccauuguggcaccauugccaauggggugcugcaaacauuuaugcgcauggcguggggaggcuccuacaucgcccuugauagcgggaagggaucuugggacugcaucaugaccuccuaccaguaucugauuauccagaacacaaccugggaagaucacugucaguucagcagacccuccccuauuggcuaccucgggcugcuuucucaacggacgcgcgacaucuauauuagcagacggcugcucggaacauuuaccuggacacuguccgauagcgagggcaacgaaacccccggcggguacugccugacccgcuggaugcucaucgaggcugagcugaaguguuucggaaauacagccguugcuaaaugcaacgaaaagcaugacgaggaauuuugcgauaugcuuagacuguucgacuuuuguaaacaggccauccggcgccucaagacggaggcgcagaugucuauucagcugaucaauaaagccgugaacgcucuuauuaaugaucaacugaucaugaagaaccaccucagagacauuaugggcaucccuuauugcaauuacuccaaguauugguaccugaaccacaccgucacagggaaaaccagccugccccgguguuggcucgugucuaauggaagcuaccugaacgaaacacauuucuccgacgauaucgagcagcaggccgacaauaugauuaccgagcuucugcaaaaggaauauaucgaucgccagggcaaaacgccucucgggcugguggaccuguucgucuuuucuaccagcuucuaccuuauuuccaucuuucuccaccugguuaagauuccgacacauagacacaucaccggaaaacccugcccuaagccccaucggcugaaccacaugggcauuuguagcugcggccucuauaaucacccuggggugcccgugaaauggaagcgcugaggacuagucccuguucccagagcccacuuuuuuuucuuuuuuugaaauaaaauagccugucuuucagaucucaaaggcucuuuucagagccaccaaaaaaaaaaaaaaaaaaaaaaaaaaaaaaaaaaaaaaaaaaaaaaaaaaaaaaaaaaaaaaaaagaauu

SEQ ID NO: 37169 - RNA, 1733 nt, Artificial Sequence
  mRNA product Design a-2 (hSL-A64-N5) comprising derived and/or modified sequence from LASV(Lassa virus/H.sapiens-wt/NGA/2016/ISTH_0017;Clade II)__AVO03567__GPCmut10 (opt5)
aggagaguccgcucagccagguugcagaagcggcuuagcguguguccuaaucuucucucugcguguagguaggccugugccgcaaacaagcuuaccaugggccagaucauuaccuucuuucaagaggugccccacgucaucgaagagguuaugaacauugugcugaucgcccucagccugcuugcuauucugaaggggaucuacaauguggccacaugcggacucuucggccuggucuccuuucuucugcucugugggagaucuugcagcacgaccuauaaaggaguguacgaacugcagacacuggagcucgacauggcgucccugaacauguguaugccucuuucuugcaccaagaauaacagccaucacuauaucaugguuggcaaugaaacagggcuggagcucacccugacaaacaccuccauuaucaaucauaaauucuguaaccuuucugaugcucacaagaaaaaucuguacgaccaugcccucaugagcauuaucuccacguuucaccugagcauuccgaacuucaaucaguaugaggccaugucuugcgauuuuaacggaggcaagaucuccgugcaguacaaucugagccacaccuaugcuauugacgccgcuaaccauuguggcacaaucgccaaugggguccuccaaaccuucaugcggauggcguggggaggcucuuacaucgcccuggauuccgggaagggaagcugggacugcauuaugacaucuuaccaguaucuuaucauucagaacaccacgugggaagaucacugucaguuuucccgccccagcccuaucggcuaccuggggcuccugucccaaagaacacgggacauuuauaucucucgcagacuucugggaaccuucacauggacccucagcgauuccgagggcaacgaaacccccggcggguacugccugacacgguggaugcugaucgaggcugagcucaaauguuuuggaaauacggccguggcuaagugcaacgaaaaacaugacgaggaguucugcgauaugcugcgccuuuuugacuucuguaagcaggccauuagacggcugaaaaccgaagcgcagaugagcauccagcucauuaauaaggccguuaacgcucugaucaaugaucaacuuauuaugaagaaccaucugcgcgacaucaugggcaucccuuauugcaauuacucuaaauauugguaccucaaccacacagugaccgggaagacaucccugcccagauguuggcuggucagcaauggaucuuaccucaacgaaacccacuucagcgacgauauugagcagcaggccgacaauaugaucacggagcugcuucaaaaagaauauauggaucggcagggcaagacaccucuggggcucguggaccuguuuguguucuccaccucuuuuuaccugauuagcaucuuccuucaccucguccgcauuccgacccauagacacguuaucggaaaacccugcccuaagccccaucggcugaaccacaugggcauuuguuccugcggccuguauaaacacccuggggugcccgugaaguggaagcgcugaggacuagucccuguucccagagcccacuuuuuuuucuuuuuuugaaauaaaauagccugucuuucagaucucaaaggcucuuuucagagccaccaaaaaaaaaaaaaaaaaaaaaaaaaaaaaaaaaaaaaaaaaaaaaaaaaaaaaaaaaaaaaaaaagaauu

SEQ ID NO: 37170 - RNA, 1733 nt, Artificial Sequence
  mRNA product Design a-2 (hSL-A64-N5) comprising derived and/or modified sequence from LASV(Lassa virus/H.sapiens-wt/NGA/2018/ISTH_0959;Clade II)__AVV65099__GPCmut10 (opt5)
aggagaguccgcucagccagguugcagaagcggcuuagcguguguccuaaucuucucucugcguguagguaggccugugccgcaaacaagcuuaccaugggccagaucauuaccuucuuucaagaggugccccacgucaucgaagagguuaugaacauugugcugaucgcccucagccugcuugcuauucugaaggggaucuacaauguggucacaugcggacucuucggccugguguccuuucuucugcucugugggagaucuugcagcacgaccuauaaaggaguuuacgaacugcagacacuggagcucgacauggccucccugaacauguguaugccucuuucuugcaccaagaauaacagccaucacuauaucauggugggcaaugaaacagggcuggagcucacccugacaaacaccuccauuaucaaucauaaauucuguaaccuuucugaugcgcacaagaaaaaucuguacgaccaugcucucaugagcauuaucuccacguuucaccugagcauuccgaacuucaaucaguaugaggccaugucuugcgauuuuaacggaggcaagaucuccguccaguacaaucugagccacgccuaugcuauugacgccgcuaaccauuguggcaccaucgccaauggggugcuccaaacauucaugcggauggcguggggaggcucuuacaucgcccuggauuccgggaagggaagcugggacugcauuaugaccucuuaccaguaucuuaucauucagaacacaaccugggaagaucacugucaguuuucccgccccagcccuaucggcuaccuggggcuccugucccaaagaacgcgggacauuuauaucucucgcagacuucugggaacauucaccuggacacucagcgauuccgagggcaacgaaacccccggcggguacugccugacccgguggaugcugaucgaggcugagcucaaauguuuuggaaauacagccguugcuaagugcaacgaaaaacaugacgaggaguucugcgauaugcugcgccuuuuugacuucuguaagcaggccauuagacggcugaaaacggaagcgcagaugagcauccagcucauuaauaaggccgugaacgcucugaucaaugaucaacuuauuaugaagaaccaucugcgcgacaucaugggcaucccuuauugcaauuacucuaaauauugguaccucaaccacaccgucacagggaagaccucccugcccagauguuggcuggugagcaauggaucuuaccucaacgaaacacacuucagcgacgauauugagcagcaggccgacaauaugaucaccgagcugcuucaaaaagaauauauugaucggcagggcaagacgccucuggggcucguggaccuguuugucuucuccacaucuuuuuaccugaucagcauuuuccuucaccucguuaaaaucccgacccaucgccacgugauuggaaagcccugcccuaaaccccauagacugaaccacaugggcaucuguuccugcggccuguauaagcacccuggggugcccgucaaguggaaacggugaggacuagucccuguucccagagcccacuuuuuuuucuuuuuuugaaauaaaauagccugucuuucagaucucaaaggcucuuuucagagccaccaaaaaaaaaaaaaaaaaaaaaaaaaaaaaaaaaaaaaaaaaaaaaaaaaaaaaaaaaaaaaaaaagaauu

SEQ ID NO: 37171 - RNA, 1733 nt, Artificial Sequence
  mRNA product Design a-2 (hSL-A64-N5) comprising derived and/or modified sequence from LASV(LASV003-NIG-2008;Clade II)__AIT17580__GPCmut10 (opt5)
aggagaguccgcucagccagguugcagaagcggcuuagcguguguccuaaucuucucucugcguguagguaggccugugccgcaaacaagcuuaccaugggccagaucauuaccuucuuucaagaggugccccacgucaucgaagagguuaugaacauugugcugaucgcccucagccugcuugcuauucugaaggggaucuacaauguggccacaugcggacucuucggccuggucuccuuucuucugcucugugggagaucuugcagcacgaccuauaaaggaguguacgaacugcagacacuggagcucgacauggcgucccugaacauguguaugccucuuucuugcaccaagaauaacagccaucacuauaucaugguuggcaaugaaacagggcuggagcucacccugacaaacaccuccauuaucaaucauaaauucuguaaccuuucugaugcucacaagaaaaaucuguacgaccaugcccucaugagcauuaucuccacguuucaccugagcauuccgaacuucaaucaguaugaggccaugucuugcgauuuuaacggaggcaagaucuccgugcaguacaaucugagccacaccuaugcugucgacgccgcuaaccauuguggcacaauugccaauggggugcuccaaaccuucaugcggauggcguggggaggcucuuacaucgcccuggauuccgggaagggaagcugggacugcaucaugacaucuuaccaguaucuuauuauccagaacaccacgugggaagaucacugucaguuuucccgccccagcccuauuggcuaccuggggcuccugucccaaagaacacgggacaucuauauuucucgcagacuucugggaaccuucacauggacccucagcgauuccgagagcaacgaaacccccggcggcuacugccugacacgguggaugcugaucgaggcugagcucaaauguuuugggaauacggccguugcuaagugcaacgaaaaacaugacgaggaguucugcgauaugcugcgccuuuuugacuucuguaagcaggccaucagacggcugaaagcggaagcccagaugucuauucagcucaucaauaaggcugugaacgcccugauuaaugaucaacuuaucaugaagaaccaucugcgcgacauuaugggaaucccuuauugcaauuacuccaaauauugguaccucaaccacaccgucacaggcagaaccagccugccccgguguuggcuggugucuaaugggagcuaccucaacgaaacacacuucuccgacgauaucgagcagcaggcugacaauaugauuaccgagcugcuucaaaaggaauauauggaucgccagggaaaaacgccucugggccucguggaccuguuugucuucucuaccagcuuuuaccugaucuccauuuuccuucaccucguuaagaucccgacacauagacacgugauugggaaacccugcccuaagccccaucggcugaaccacaugggaaucuguagcugcggccuguauaaacacccuggcgugcccgucaaguggaagcgcugaggacuagucccuguucccagagcccacuuuuuuuucuuuuuuugaaauaaaauagccugucuuucagaucucaaaggcucuuuucagagccaccaaaaaaaaaaaaaaaaaaaaaaaaaaaaaaaaaaaaaaaaaaaaaaaaaaaaaaaaaaaaaaaaagaauu

SEQ ID NO: 37172 - RNA, 1733 nt, Artificial Sequence
  mRNA product Design a-2 (hSL-A64-N5) comprising derived and/or modified sequence from LASV(LASV035-NIG-2009;Clade II)__AIT17588__GPCmut10 (opt5)
aggagaguccgcucagccagguugcagaagcggcuuagcguguguccuaaucuucucucugcguguagguaggccugugccgcaaacaagcuuaccaugggccagaucauuaccuucuuucaagaggugccccacgucaucgaagagguuaugaacauugugcugaucgcccucagccugcuugcuauucugaaggggaucuacaauguggccacaugcggacucuucggccuggucuccuuucuucugcucugugggagaucuugcagcacgaccuauaaaggaguguacgaacugcagacacuggagcucgacauggcgucccugaacauguguaugccucuuucuugcaccaagaauaacagccaucacuauaucaugguuggcaaugaaacagggcuggagcucacccugacaaacaccuccauuaucaaucauaaauucuguaaccuuucugaugcucacaagaaaaaucuguacgaccaugcccucaugagcauuaucuccacguuucaccugagcauuccgaacuucaaucaguaugaggccaugucuugcgauuuuaacggaggcaagaucuccgugcaguacaaucugagccacgcuuaugccgucgacgcugccaaccauuguggcaccauugcgaauggggugcuccaaacauucaugcggauggccuggggaggcucuuacaucgcucuggauuccgggaagggaagcugggacugcaucaugaccucuuaccaguaucuuauuauccagaacacaaccugggaagaucacugucaguuuucccgccccagcccuauuggcuaccuggggcuccugucccaaagaacgcgggacaucuauauuucucgcagacuucugggaacauucaccuggacacucagcgauuccgagggcaacgaaacccccggcggguacugccugacccgguggaugcugaucgaggccgagcucaaauguuuuggaaauacagcuguugccaagugcaacgaaaaacaugacgaggaguucugcgauaugcugcgccuuuuugacuucuguaagcaggcgaucagacggcugaaagccgaagcucagaugagcauucagcucaucaauaaggccgugaacgcucugauuaaugaucaacuuaucaugaagaaccaucugcgcgacauuaugggcaucccuuauugcaauuacucuaaauauugguaccucaaccacacggucaccgggaagacaucccugcccagauguuggcuggugagcaauggaucuuaccucaacgaaacccacuucagcgacgauaucgagcagcaggccgacaauaugauuacagagcugcuucaaaaagaauauaucgaucggcagggcaagaccccucuggggcucguggaccuguuugucuucuccacgucuuuuuaccugauuagcaucuuccuucaccucguuaaaauuccgacacaucgccacgugaucggaaagcccugcccuaaaccccauagacugaaccacaugggcauuuguuccugcggccuguauaagcacccuggggugcccgucaaguggaaacggugaggacuagucccuguucccagagcccacuuuuuuuucuuuuuuugaaauaaaauagccugucuuucagaucucaaaggcucuuuucagagccaccaaaaaaaaaaaaaaaaaaaaaaaaaaaaaaaaaaaaaaaaaaaaaaaaaaaaaaaaaaaaaaaaagaauu

SEQ ID NO: 37173 - RNA, 1733 nt, Artificial Sequence
  mRNA product Design a-2 (hSL-A64-N5) comprising derived and/or modified sequence from LASV(LASV1000-NIG-2009;Clade II)__AIT17782__GPCmut10 (opt5)
aggagaguccgcucagccagguugcagaagcggcuuagcguguguccuaaucuucucucugcguguagguaggccugugccgcaaacaagcuuaccaugggccagaucauuaccuucuuucaagaggugccccacgucaucgaagagguuaugaacauugugcugaucgcccucagccugcuugcuauucugaaggggaucuacaauguggccacaugcggacucuucggccuggucuccuuucuucugcucugugggagaucuugcagcacgaccuauaaaggaguguacgaacugcagacacuggagcucgacauggcgucccugaacauguguaugccucuuucuugcaccaagaauaacagccaucacuauaucaugguuggcaaugaaacagggcuggagcucacccugacaaacaccuccauuaucaaucauaaauucuguaaccuuucugaugcucacaagaaaaaucuguacgaccaugcccucaugagcauuaucuccacguuucaccugagcauuccgaacuucaaucaguaugaggccaugucuugcgauuuuaacggaggcaagaucuccgugcaguacaaucugagccacaccuaugcugucgacgccgcuaaccauuguggcacaauugccaauggggugcuccaaaccuucaugcggauggcguggggaggcucuuacaucgcccuggauuccgggaagggaagcugggacugcaucaugacaucuuaccaguaucuuauuauccagaacaccacgugggaagaucacugucaguuuucccgccccagcccuauuggcuaccuggggcuccugucccaaagaacacgggacaucuauauuucucgcagacuucugggaaccuucacauggacccucagcgauuccgagggcaacgaaacccccggcggguacugccugacacgguggaugcugaucgaggcugagcucaaauguuuuggaaauacggccguugcuaagugcaacgaaaaacaugacgaggaguucugcgauaugcugcgccuuuuugacuucuguaagcaggccaucaaaagacugaagaccgaagcgcagaugagcauucagcucaucaauaaggccgugaacgcucugauuaaugaucaacuuaucaugaaaaaccaucugcgggacauuaugggcaucccuuauugcaauuacucuaaguauugguaccucaaccacacagucaccgggaaaacaucccugccccgcuguuggcuggugagcaauggaucuuaccucaacgaaacccacuucagcgacgauaucgagcagcaggccgacaauaugauuacggagcugcuucaaaaggaauauaucgauagacagggcaaaacaccucuggggcucguggaccuguuugucuucuccaccucuuuuuaccugauuagcaucuuccuucaccucguuaagauuccgacccaucggcacguggugggaaaacccugcccuaagccccaucgccugaaccacaugggcaucuguuccugcggccuguauaagcacccugggguccccgugaaauggaagagaugaggacuagucccuguucccagagcccacuuuuuuuucuuuuuuugaaauaaaauagccugucuuucagaucucaaaggcucuuuucagagccaccaaaaaaaaaaaaaaaaaaaaaaaaaaaaaaaaaaaaaaaaaaaaaaaaaaaaaaaaaaaaaaaaagaauu

SEQ ID NO: 37174 - RNA, 1733 nt, Artificial Sequence
  mRNA product Design a-2 (hSL-A64-N5) comprising derived and/or modified sequence from LASV(LASV221-NIG-2010;Clade II)__AIT17624__GPCmut10 (opt5)
aggagaguccgcucagccagguugcagaagcggcuuagcguguguccuaaucuucucucugcguguagguaggccugugccgcaaacaagcuuaccaugggccagaucauuaccuucuuucaagaggugccccacgucaucgaagagguuaugaacauugugcugaucgcccucagccugcuugcuauucugaaggggaucuacaauguggccacaugcggacucuucggccuggucuccuuucuucugcucugugggagaucuugcagcacgaccuauaaaggaguguacgaacugcagacacuggagcucgacauggcgucccugaacauguguaugccucuuucuugcaccaagaauaacagccaucacuauaucaugguuggcaaugaaacagggcuggagcucacccugacaaacaccuccauuaucaaucauaaauucuguaaccuuucugaugcucacaagaaaaaucuguacgaccaugcccucaugagcauuaucuccacguuucaccugagcauuccgaacuucaaucaguaugaggccaugucuugcgauuuuaacggaggcaagaucuccgugcaguacaaucugagccacaccuaugcuauugacgccgcuaaccauuguggcacaaucgccaaugggguccuccaaaccuucaugcggauggcguggggaggcucuuacaucgcccuggauuccgggaagggaagcugggacugcauuaugacaucuuaccaguaucuuaucauucagaacaccacgugggaagaucacugucaguuuucccgccccagcccuaucggcuaccuggggcuccugucccaaagaacacgggacauuuauaucucucgcagacuucugggaaccuucacauggacccucagcgauuccgagggcaacgaaacccccggcggguacugccugacacgguggaugcugaucgaggcugagcucaaauguuuuggaaauacggccguggcuaagugcaacgaaaaacaugacgaggaguucugcgauaugcugcgccuuuuugacuucuguaagcaggccauuagacggcugaaaaccgaagcgcagaugagcauccagcucauuaauaaggccguuaacgcucugaucaaugaucaacuuauuaugaagaaccaucugcgcgacaucaugggcaucccuuauugcaauuacucuaaauauugguaccucaaccacacagugaccgggaagacaucccugcccagauguuggcuggucagcaauggaucuuaccucaacgaaacccacuucagcgacgauauugagcagcaggccgacaauaugaucacggagaugcugcaaaaagaauauauggaucggcagggcaagacaccucuugggcugguggaccucuuuguguucuccaccucuuuuuaccugauuagcaucuuccugcaccuugucaaaauuccgacccaucgccacguuaucggaaagcccugcccuaaaccccauagacucaaccacaugggcauuuguuccugcggccuguauaagcacccuggggugcccgugaaguggaaacggugaggacuagucccuguucccagagcccacuuuuuuuucuuuuuuugaaauaaaauagccugucuuucagaucucaaaggcucuuuucagagccaccaaaaaaaaaaaaaaaaaaaaaaaaaaaaaaaaaaaaaaaaaaaaaaaaaaaaaaaaaaaaaaaaagaauu

SEQ ID NO: 37175 - RNA, 1733 nt, Artificial Sequence
  mRNA product Design a-2 (hSL-A64-N5) comprising derived and/or modified sequence from LASV(LASV237-NIG-2010;Clade II)__AIT17638__GPCmut10 (opt5)
aggagaguccgcucagccagguugcagaagcggcuuagcguguguccuaaucuucucucugcguguagguaggccugugccgcaaacaagcuuaccaugggccagaucauuaccuucuuucaagaggugccccacgucaucgaagagguuaugaacauugugcugaucgcccucagccugcuugcuauucugaaggggaucuacaauguggccacaugcggacucuucggccuggucuccuuucuucugcucugugggagaucuugcagcacgaccuauaaaggaguguacgaacugcagacacuggagcucgacauggcgucccugaacauguguaugccucuuucuugcaccaagaauaacagccaucacuauaucaugguuggcaaugaaacagggcuggagcucacccugacaaacaccuccauuaucaaucauaaauucuguaaccuuucugaugcucacaagaaagaccuguacgaucaugcccucaugagcauuaucuccacguuucaccugagcauuccgaauuucaaccaguaugaggccaugucuugcgacuuuaauggaggcaagaucuccgugcaguacaaccugagccacaccuaugcugucgaugccgcuaaucauuguggcacaauugccaacggggugcuccaaaccuucaugcggauggcguggggaggcucuuacaucgcccuggacuccgggaagggaagcugggauugcaucaugacaucuuaccaguaucuuauuauccagaauaccacgugggaagaccacugucaguuuucccgccccagcccuauuggcuaccuggggcuccugucccaaagaacacgggauaucuauauuucucgcagacuucugggaaccuucacauggacccucagcgacuccgagggcaacgaaacccccggcggguacugccugacacgguggaugcugaucgaggcugagcucaaauguuuuggaaacacggccguugcuaagugcaaugaaaaacaugaugaggaguucugcgacaugcugcgccuuuuugauuucuguaagcaggccaucagacggcugaaaaccgaagcgcagaugagcauucagcucaucaacaaggccgugaaugcucugauuaacgaccaacuuaucaugaagaaucaucugcgcgacauuaugggcaucccuuauugcaacuacucuaaauauugguaccucaaucacacagucaccgggaagacaucccugcccagauguuggcuggugagcaacggaucuuaccucaaugaaacccacuucagcgaugacaucgagcagcaggccgauaacaugauuacggagcugcuucaaaaagaauauauggaccggcagggcaagacaccucuggggcucguggaucuguuugucuucuccaccucuuuuuaccugaucagcauuuuccuucaccucaucaaaauuccgacccaucgccacaucacaggaaagcccugcccuaaaccccauagacugaaucacaugggcauuuguuccugcggccuguauaagcacccugggguucccgugaaguggaaacggugaggacuagucccuguucccagagcccacuuuuuuuucuuuuuuugaaauaaaauagccugucuuucagaucucaaaggcucuuuucagagccaccaaaaaaaaaaaaaaaaaaaaaaaaaaaaaaaaaaaaaaaaaaaaaaaaaaaaaaaaaaaaaaaaagaauu

SEQ ID NO: 37176 - RNA, 1733 nt, Artificial Sequence
  mRNA product Design a-2 (hSL-A64-N5) comprising derived and/or modified sequence from LASV(LASV253-NIG-2011;Clade II)__AIT17670__GPCmut10 (opt5)
aggagaguccgcucagccagguugcagaagcggcuuagcguguguccuaaucuucucucugcguguagguaggccugugccgcaaacaagcuuaccaugggccagaucauuaccuucuuucaagaggugccccacgucaucgaagagguuaugaacauugugcugaucgcccucagccugcuugcuauucugaaggggaucuacaauguggccacaugcggacucuucggccuggucuccuuucuucugcucugugggagaucuugcagcacgaccuauaaaggaguguacgaacugcagacacuggagcucgacauggcgucccugaacauguguaugccucuuucuugcaccaagaauaacagccaucacuauaucaugguuggcaaugaaacagggcuggagcucacccugacaaacaccuccauuaucaaucauaaauucuguaaccuuucugaugcucacaagaaaaaucuguacgaccaugcccucaugagcauuaucuccacguuucaccugagcauuccgaacuucaaucaguaugaggccaugucuugcgauuuuaacggaggcaagaucuccgugcaguacaaucugagccacaccuaugcugucgacgccgcuaaccauuguggcacaauugccaauggggugcuccaaaccuucaugcggauggcguggggaggcucuuacaucgcccuggauuccgggaagggaagcugggacugcaucaugacaucuuaccaguaucuuauuauccagaacaccacgugggaagaucacugucaguuuucccgccccagcccuauuggcuaccuggggcuccugucccaaagaacacgggacaucuauauuucucgcagacuucugggaaccuucacauggacccucagcgauuccgagggcaacgaaacccccggcggguacugccugacacgguggaugcugaucgaggcugagcucaaauguuuuggaaauacggccguugcuaagugcaacgaaaaacaugacgaggaguucugcgauaugcugcgccuuuuugacuucuguaagcaggccaucagacggcugaaagcggaagcccagaugagcauucagcucaucaauaaggcugugaacgcccugauuaaugaucaacuuaucaugaagaaccaucugcgcgacauuaugggcaucccuuauugcaauuacucuaaauauugguaccucaaccacaccgucacagggagaaccucccugccccgguguuggcuggugagcaauggaucuuaccucaacgaaacacacuucagcgacgauaucgagcagcaggcugacaauaugauuaccgagcugcuucaaaaggaauauaucgaucgccagggcaaaacgccucuggggcucguggaccuguuugucuucuccacaucuuuuuaccugauuagcaucuuccuucaccucguuaagauuccgacccauagacacaucauuggaaaacccugcccuaagccccaucggcugaaccacaugggcaucuguuccugcggccuguauaaacacccuggggugcccgugaaguggaagcgcugaggacuagucccuguucccagagcccacuuuuuuuucuuuuuuugaaauaaaauagccugucuuucagaucucaaaggcucuuuucagagccaccaaaaaaaaaaaaaaaaaaaaaaaaaaaaaaaaaaaaaaaaaaaaaaaaaaaaaaaaaaaaaaaaagaauu

SEQ ID NO: 37177 - RNA, 1733 nt, Artificial Sequence
  mRNA product Design a-2 (hSL-A64-N5) comprising derived and/or modified sequence from LASV(LASV254-NIG-2011;Clade II)__AIT17674__GPCmut10 (opt5)
aggagaguccgcucagccagguugcagaagcggcuuagcguguguccuaaucuucucucugcguguagguaggccugugccgcaaacaagcuuaccaugggccagaucauuaccuucuuucaagaggugccccacgucaucgaagagguuaugaacauugugcugaucgcccucagccugcuugcuauucugaaggggaucuacaauguggccacaugcggacucuucggccuggucuccuuucuucugcucugugggagaucuugcagcacgaccuauaaaggaguguacgaacugcagacacuggagcucgacaugaccaaccugaauauguguaugccucuuuccugcacaaagaacaauucucaucacuauaucaugguuggcaacgaaaccgggcuggagcucacacugaccaauacgagcauuaucaaccauaaauucuguaaucuuuccgaugcgcacaagaaaaaccuguacaaucaugcucucaugucuauuaucagcaccuuucaccuguccauuccgaacuucaaucaguaugaggccaugagcugcgacuuuaacggaggcaagaucucugugcaguacaaucugucccacagcuaugccgucgaugcugccaaccauuguggcacaauugcuaacggggugcuccaaaccuucaugcggauggccuggggaggcucuuacaucgcgcuggacuccgggaagggaaauugggauugcaucaugacaagcuaccaguaucuuauuauccagaacaccacgugggaagaccacugucaguuuucucgccccuccccuauuggcuaccuggggcuccugagccaaagaacacgggauaucuauauuucccgcagacuucugggaaccuucacauggacccucucugacagcgagggcaaugaaacccccggcggguacugccugacacgguggaugcugaucgaggccgagcucaaauguuuuggaaacacggcuguugccaagugcaaugaaaaacaugaugaggaguucugcgacaugcugcgccuuuuugauuucuguaagcaggcuaucagacggcugaaaaccgaagcccaggcgaacauucagcucaucaauaaggccgugaacgcucugauuaaugaccaacuuaucaugaagaaccaucugcgcgauauuaugggcaucccuuauugcaauuacuccaaauauugguaccucaaccacacagucaccgggaagacaagccugcccagauguuggcuggugucuaauggauccuaccucaacgaaacccacuucagcgacgacaucgagcagcaggccgauaauaugauuacggagcugcuucaaaaagaauauauggaccggcagggcaagacaccucuggggcucguggaucuguuugucuucucuaccagcuuuuaccugaucuccauuuuccuucaccucguuaaaaucccgacccaucgccacgugauuggaaagcccugcccuaaaccccauagacugaaccacaugggcaucuguucuugcggccuguauaagcacccuggggugcccgucaaguggaaacggugaggacuagucccuguucccagagcccacuuuuuuuucuuuuuuugaaauaaaauagccugucuuucagaucucaaaggcucuuuucagagccaccaaaaaaaaaaaaaaaaaaaaaaaaaaaaaaaaaaaaaaaaaaaaaaaaaaaaaaaaaaaaaaaaagaauu

SEQ ID NO: 37178 - RNA, 1733 nt, Artificial Sequence
  mRNA product Design a-2 (hSL-A64-N5) comprising derived and/or modified sequence from LASV(Nig08-A19;Clade III)__ADU56618__GPCmut10 (opt5)
aggagaguccgcucagccagguugcagaagcggcuuagcguguguccuaaucuucucucugcguguagguaggccugugccgcaaacaagcuuaccaugggccagaucgugaccuucuuucaagaggucccccacguuauugaagaggugaugaacaucgugcugauugcccucagcauccuggcuauucuuaaggggcuguacaauaucgccacaugcggacucaucggccuggucacguuccuucugcucuccgggagaucuuguagcaugaccuauaaaggaguguacgaacugcagacacuggagcucaacaugaauacccugaacaugugcaugccucuuuccuguacaaagaauaacucucaucacuauauuaugguuggcaaugaaaccgggcuggagcucacacugaccaacacgagccuucugcaucacaaauuuugcaaucucuccgacgcgcauaagaaaaaccuguacgaucacacccugaugucuaucauuagcacauuccaccucuccaucccgaauuuuaaccaguaugaggcuaugagcugugacuucaauggaggcaagauuaccgugcaguacaaccugucucauuccuaugccaucgaugccgcuaaucacugcggcacagucgccaacggggugcuucaaaccuuuaugcggauggcuuggggaggcagcuacauugcccuggacucugggcgcggaaagugggauuguaucaugacguccuaccaguaucucaucauucagaacacaaccugggaagaccauugccaguucagcagacccucuccuaucggcuaccuggggcuucugucccaacggacacgcgauauuuauaucagcagacggcuccugggaaccuuuaccuggacacuguccgacucugagggcaaugaaacgcccggcggguacugucucacccgcuggaugcugauugaggcggagcuuaaaugcuucggaaacacagccguugcuaaguguaaugaaaaacacgaugaggaauuuugcgacaugcugagacucuucgauuuuugcaagcaggccauccggcgccugaaagcugaggcccagaugagcauccagcuuauuaacaaggcggugaaugcccugaucaacgaccaacucauuaugaagaaucaccugagagauaucaugggcauuccuuauuguaacuacuccaaauauugguaccugaaucauaccagcacagggcggaccucucucccccgcugcuggcuggucuccaacggaagcuaccuuaaugaaacgcacuucucugacgacaucgagcagcaggcugauaacaugaucacagagaugcugcaaaaggaauaucucgacagacagggcaaaaccccucuggggcugguggaucuuuucguguuuagcaccuccuucuaccucauuucuaucuuucugcaucuggucaagauuccgacacaccggcauaucguuggaaaacccuguccuaagccccaccgccucaaucacaugggcauuugcagcuguggccuguauaaacagccuggggugcccgugagauggaagcggugaggacuagucccuguucccagagcccacuuuuuuuucuuuuuuugaaauaaaauagccugucuuucagaucucaaaggcucuuuucagagccaccaaaaaaaaaaaaaaaaaaaaaaaaaaaaaaaaaaaaaaaaaaaaaaaaaaaaaaaaaaaaaaaaagaauu

SEQ ID NO: 37179 - RNA, 1736 nt, Artificial Sequence
  mRNA product Design a-2 (hSL-A64-N5) comprising derived and/or modified sequence from LASV(G1180-SLE-2010;Clade IV)__AIT17168__GPCmut10 (opt5)
aggagaguccgcucagccagguugcagaagcggcuuagcguguguccuaaucuucucucugcguguagguaggccugugccgcaaacaagcuuaccaugggccagaucgugaccuucuuucaagaggucccccacguuauugaagaggugaugaacaucgugcugauugcccucagcauccuggcuguccuuaaggggcuguacaauuucgccacaugcggacucgugggccugcuuacguuucugcuccugugugggagauccugcaccgcgucucgguauaaaggaguuuacgaacugcagacacucgagcugaacauggaaacccuuaauauguguaugccucugagcugcacaaagaacaauucccaucacuauauuauggugggcaacgagaccgggcucgagcugacacuuaccaauacgucuaucaucaaccauaaauucuguaaucugagcgacgcucacaagaaaaaccucuacgaucaugcccugauguccauuaucucuaccuuucaccugagcauuccgaauuucaaccaguaugaagccauguccugcgacuuuaauggaggcaagaucagcguccaguacaaccucucucacuccuaugcuggcgaugccgcuaaucauugugggacaguggccaacggaguucugcaaaccuucaugcgcauggcguggggcgggagcuacauugcccuugacucuggacacggcuccugggauugcaucaugacaagcuaccaguaucugauuauccagaacaccacgugggaggaccauugucaguuuucuagacccuccccuaucggguaccucggacugcuuagccaacggacacgcgauauuuauaucuccagacggcugcucggcaccuucacauggacccugucugacagcgaaggcaaggauacccccgggggauacugccugacacgcuggaugcucauugaggcugagcugaaauguuuuggcaauacggccguggcuaagugcaacgaaaaacacgacgaggaguucugcgauaugcuuagacuguuugacuucuguaagcaggccauccagcggcucaaagcggaagcccagauguccauucaacugaucaauaaggcugucaacgcccuuaucaaugaucagcugauuaugaagaaccaccuccgcgacaucauggggauuccuuauugcaauuacagcaaauauugguaccugaaccauaccacaaccggaaagacaucucugcccaaauguuggcucguguccaauggcagcuaccugaacgaaacccacuucucugacgauaucgagcagcaagcugacaauaugauuacggagaugcuucagaaggaauauauggagagacaggggaaaacaccucugggacucguggaucuguuugucuucagcaccuccuuuuaccugaucucuaucuuccuucaucucguuaagauuccgacccaccggcauaucgugggcaaaagcugccccaagccucaccgccugaaccacaugggcauuuguuccugcgggcuguauaagcagcccggagugccugucaaauggaagagaugaggacuagucccuguucccagagcccacuuuuuuuucuuuuuuugaaauaaaauagccugucuuucagaucucaaaggcucuuuucagagccaccaaaaaaaaaaaaaaaaaaaaaaaaaaaaaaaaaaaaaaaaaaaaaaaaaaaaaaaaaaaaaaaaagaauu

SEQ ID NO: 37180 - RNA, 1736 nt, Artificial Sequence
  mRNA product Design a-2 (hSL-A64-N5) comprising derived and/or modified sequence from LASV(G1442-SLE-2011;Clade IV)__AIT17180__GPCmut10 (opt5)
aggagaguccgcucagccagguugcagaagcggcuuagcguguguccuaaucuucucucugcguguagguaggccugugccgcaaacaagcuuaccaugggccagaucgugaccuucuuucaagaggucccccacguuauugaagaggugaugaacaucgugcugauugcccucagcauccuggcuguccuuaaggggcuguacaauguggccacaugcggacucauuggccugguuacguuccuucugcucugugggagauccugcaccacaacccuguauaaaggaguguacgaacugcagacacucgagcugaacauggaaacccuuaauauguguaugccucugucuugcacaaagaacaauagccaucacuauauccgggucggcaacgagaccgggcucgagcugacgcuuaccaauacauccaucauuaaccauaaauuuuguaaucugucugacgcgcacaagaaaaaccucuacgaucaugcucugaugagcaucauuuccaccuuccaccugucuaucccgaauuuuaaccaguaugaagccaugagcugcgacuucaauggaggcaagauuuccgugcaguacaaccucagccacucuuaugccggcgaugcugccaaucauugugggacaguugcuaacggagugcugcaaaccuuuaugcgcauggccuggggcggguccuacaucgcgcuugacagcggaagaggcaacugggauugcauuaugacgucuuaccaguaucugaucauccagaauacaaccugggacgaucacugucaguucucccggcccagcccuauuggguaccucggacugcuuucucaacgcacaagagacgucuauaucucccggcgccugcucggcaccuuuaccuggacacugagcgauuccgagggcaaggacacgcccgggggauacugccugaccagauggaugcucauugaagccgagcugaaauguuucggcaacacagcuguggccaagugcaaugagaaacaugaugaagaguuuugcgacaugcuucggcuguucgauuuuuguaagcaggcuauccagcgccucaaagccgaagcgcagaugucuauucaacugaucaacaaggccgugaaugcucuuaucaacgaccagcugauuaugaagaaucaccucagagacaucauggggauuccuuauugcaacuacagcaaauauugguaccugaauaacaccgccacaggaaagaccucccugcccaaauguuggcucaucagcaauggcucuuaccugaacgagacgcacuucuccgaugacauugaacaggaggcugauaauaugaucacagagaugcuucaaaaggaauauauggagcggcaggggaaaaccccucugggacucgucgaccuguucguuuuuagcaccucuuucuaccugaucagcauuuuucuucaucucgugaagaucccgacacaccgccauauugugggcaaauccugccccaagccucacagacugaaccauaugggcaucuguucuugcgggcuguauaagcagcccggagucccugugcgguggaaacgcugaggacuagucccuguucccagagcccacuuuuuuuucuuuuuuugaaauaaaauagccugucuuucagaucucaaaggcucuuuucagagccaccaaaaaaaaaaaaaaaaaaaaaaaaaaaaaaaaaaaaaaaaaaaaaaaaaaaaaaaaaaaaaaaaagaauu

SEQ ID NO: 37181 - RNA, 1736 nt, Artificial Sequence
  mRNA product Design a-2 (hSL-A64-N5) comprising derived and/or modified sequence from LASV(G3010-SLE-2013;Clade IV)__AIT17344__GPCmut10 (opt5)
aggagaguccgcucagccagguugcagaagcggcuuagcguguguccuaaucuucucucugcguguagguaggccugugccgcaaacaagcuuaccaugggccagaucgugaccuucuuucaagaggucccccacguuauugaagaggugaugaacaucgugcugauugcccucagcauccuggcuguccuuaaggggcuguacaauuucgccacaugcggacucgugggccugguuacguuucuucugcucugugggagauccugcaccacaucucuguauaaaggaguguacgaacugcagacccucgagcugaacauggaaacacuuaauauguguaugccucugagcugcaccaagaacaauucccaucacuauauuauggucggcaacgagacagggcucgagcugacccuuacgaauaccucuaucaucaaccauaaauucuguaaucugagcgacgcgcacaagaaaaaccucuacaaucaugcucugauguccauuaucucuacauuucaccugagcauuccgaacuucaaucaguaugaagccauguccugcgauuuuaacggaggcaagaucagcgugcaguacaaucucucucacuccuaugccggcgacgcugccagccauugugggaccguugcuaacggagugcugcaaacauucaugcggauggccuggggcgggucuuacauugcgcuugauuccggauacggcaagugggacugcaucaugaccagcuaucaguaccugauuauccagaacacgacaugggaggaucacugucaguuuucucgccccuccccuaucggguaucucggacugcuuagccaaagaacccgggacauuuacaucucccgcagacugcucggcacauucaccuggacccugucugauagcgaaggcaaagacacacccgggggauauugccugacgcgguggaugcucauugaggccgagcugaaguguuuuggcaauaccgcugucgccaaaugcaacgaaaagcaugaugaggaguucugcgacaugcuucgccuguuugauuucuguaaacaggcuauccagagacucaagacagaagcccagauguccauucaacugaucaauaaggcggugaacgcccuuaucaaugaccagcugauuaugaaaaaccaccuccgggauaucauggggauuccuuacugcaauuauagcaaguacugguaccugaaccacaccacaaccggaaaaacgucucugcccaaguguuggcucguguccaauggcagcuaucugaacgaaacacauuucucugacgacaucgagcagcaagcugauaauaugauuaccgagaugcuucagaaagaauacauggagcgccaggggaagaccccucugggacucgucgaccuguuuguuuucagcacauccuuuuaucugaucucuaucuuccuucaccucgugaaaauuccgacccauagacacaucgugggcaagagcugccccaagccucaucggcugaaccacaugggcauuuguuccugcgggcuguacaaacagcccggagucccugugcgcuggaagagaugaggacuagucccuguucccagagcccacuuuuuuuucuuuuuuugaaauaaaauagccugucuuucagaucucaaaggcucuuuucagagccaccaaaaaaaaaaaaaaaaaaaaaaaaaaaaaaaaaaaaaaaaaaaaaaaaaaaaaaaaaaaaaaaaagaauu

SEQ ID NO: 37182 - RNA, 1736 nt, Artificial Sequence
  mRNA product Design a-2 (hSL-A64-N5) comprising derived and/or modified sequence from LASV(G502-SLE-2009;Clade IV)__AIT17126__GPCmut10 (opt5)
aggagaguccgcucagccagguugcagaagcggcuuagcguguguccuaaucuucucucugcguguagguaggccugugccgcaaacaagcuuaccaugggccagaucgugaccuucuuucaagaggucccccacguuauugaagaggugaugaacaucgugcugauugcccucagcauccuggcuguccuuaaggggcuguacaauuucgccacaugcggacucgugggccugcuuacguuucugcuccugugugggagauccugcaccacaggacuguauaaaggcguuuacgaacuccagacccuggagcuuaacauggaaacacugaauauguguaugccucucucuugcaccaagaacaauagccaucacuauauuaugguggggaacgagacaggacuggagcuuacccugacgaauaccuccaucaucaaccauaaauucuguaaucucucugacgcgcacaagaaaaaccuguacgaucaugcucugaugagcauuaucuccacauuucaccucucuauuccgaauuucaaccaguaugaagccaugagcugcgacuuuaauggcggcaagaucuccguccaguacaaccugagccacucuuaugccggggaugcugccgaccauuguggaaccguggcuaauggcguucuucaaacauucaugcggauggccuggggaggguccuacauugcgcuggauagcggccgcgggagaugggacugcaucaugaccucuuaccaguaucucauuauccagaacacgacaugggaggaucacugucaguuuucccggcccagcccuaucggauaccugggccuucugucucaacgcaccagagacauuuauaucucccggcgccuccugggcacauucaccuggacccugagcgauuccgaagggaaggacacacccggaggcuacugccucacgagauggaugcugauugaggccgagcuuaaauguuuugggaacaccgcuguggccaagugcaaugaaaaacaugaugaggaguucugcgacaugcugcggcucuuugauuucuguaagcaggcuauccagcgccugaaagccgaagcgcagaugucuauucaacuuaucaacaaggccgucaaugcucugaucaacgaccagcucgugaugaagaaucaccugagagacauuaugggaaucccuuauugcaacuacagccgguauugguaccugaaucacacaaccacaggccgcaccucccuccccaaauguuggcuggugagcaacgggucuuaccuuaaugaaacgcauuucuccgaugacauugagcagcaagccgauaacaugaucacagagaugcugcagaaggaauauauggagagacagggaaaaaccccucucggccuggucgaccuguuuguuuucagcaccucuuuuuaccuuauuagcaucuuccuccaccuggugaagaucccgacacaucggcacauugugggcaaauccugccccaagccucaucgccugaaucacauggggaucuguucuugcggacucuauaaacagcccggcgucccugugaaguggaagagaugaggacuagucccuguucccagagcccacuuuuuuuucuuuuuuugaaauaaaauagccugucuuucagaucucaaaggcucuuuucagagccaccaaaaaaaaaaaaaaaaaaaaaaaaaaaaaaaaaaaaaaaaaaaaaaaaaaaaaaaaaaaaaaaaagaauu

SEQ ID NO: 37183 - RNA, 1736 nt, Artificial Sequence
  mRNA product Design a-2 (hSL-A64-N5) comprising derived and/or modified sequence from LASV(G733-SLE-2010;Clade IV)__AIT17154__GPCmut10 (opt5)
aggagaguccgcucagccagguugcagaagcggcuuagcguguguccuaaucuucucucugcguguagguaggccugugccgcaaacaagcuuaccaugggccagaucgugaccuucuuucaagaggucccccacguuauugaagaggugaugaacaucgugcugauugcccucagcauccuggcuguccuuaaggggcuguacaauuucgccacaugcggaauugugggccucguuuccuuucugcuucugugugggagaucuugcacgaccagccucuauaaaggaguguacgaacugcagacacuggagcucaacauggaaacccugaauauguguaugccucuuuccugcacaaagaacaauucucaucacuauaucauggucggcaacgagaccgggcuggagcucacacugaccaauacgagcaucauuaaccauaaauucuguaaucuuuccgacgcgcacaagaaaaaccuguacgaucaugcucucaugucuaucauuagcaccuuucaccuguccaucccgaauuucaaccaguaugaagccaugagcugcgacuuuaauggaggcaagauuucugugcaguacaaccugucccacagcuaugccggcgaugcugccaaucauugugggacaaucgcuaacggaguucuccaaaccuucaugcggauggccuggggcgggucuuacauugcgcuggacuccggacgcgauagaugggacugcaucaugacaagcuaccaguaucuuaucauucagaacaccacgugggaggaucacugucaguuuucucggcccuccccuaucggcuaccuggggcuccugagccaacgcacaagagacauuuauaucucccggcgccuucugggaaccuucacauggacccucucugauagcgaaggcaaggacacccccggcggguacugccugacaagauggaugcugauugaggccgagcucaaauguuuuggaaauacggcuguggccaagugcaacgaaaaacaugaugaggaguucugcgacaugcugcggcuuuuugauuucuguaagcaggcuauccagcgccugaaagccgaagcgcagauguccauccaacucauuaauaaggccgucaacgcucugaucaaugaccagcuuauuaugaagaaccaccugagagacaucaugggcauuccuuauugcaauuacagcaaauauugguaccucaaccacaccacaaccgggaagacaucucugcccaaauguuggcugguguccaauggaagcuaccucaacgaaacccauuucucugaugacaucgagcagcaagccgauaauaugaucacggagaugcugcagaaggaauauauggagcggcagggcaaaacaccucuugggcugguggaccucuuugucuucagcaccuccuuuuaccugauuucuaucuuccugcaccuuguuaagauuccgacccaucgccacguggugggaaaaagcugccccaagccucauagacucaaccacaugggcaucuguuccugcggccuguaugggcagcccggagucccugugaaguggaaacggugaggacuagucccuguucccagagcccacuuuuuuuucuuuuuuugaaauaaaauagccugucuuucagaucucaaaggcucuuuucagagccaccaaaaaaaaaaaaaaaaaaaaaaaaaaaaaaaaaaaaaaaaaaaaaaaaaaaaaaaaaaaaaaaaagaauu

SEQ ID NO: 37184 - RNA, 1736 nt, Artificial Sequence
  mRNA product Design a-2 (hSL-A64-N5) comprising derived and/or modified sequence from MOPV/LASV reassortant(IGS-1;Clade IV)__AFY05576__GPCmut10 (opt5)
aggagaguccgcucagccagguugcagaagcggcuuagcguguguccuaaucuucucucugcguguagguaggccugugccgcaaacaagcuuaccaugggccagaucgugaccuucuuucaagaggucccccacguuauugaagaggugaugaacaucgugcugauugcccucagcguccuggcugugcuuaaggggcuguacaauuucgccacaugcggacucguuggccuggugacguuucuucugcucugugggagauccugcaccacaucucuguauaaaggagucuacgaacugcagacccucgagcugaacauggaaacacuuaauauguguaugccucugagcugcaccaagaacaauucccaucacuauaucauggugggcaacgagacagggcucgagcugacccuuacgaauaccucuauuaucaaccauaaauucuguaaucugagcgacgcgcacaagaaaaaccucuacgaucaugcucugauguccaucauuucuacauuucaccugagcaucccgaauuucaaccaguaugaagccauguccugcgacuuuaauggaggcaagauuagcguucaguacaaccucucucacuccuaugccggcgaugcugccaaucauugugggaccguggcuaacggaguccugcaaacauucaugcggauggccuggggcgggagcuacaucgcgcuugacucuggacgcggcaacugggauugcauuaugaccuccuaccaguaucugaucauucagaauacgacaugggaggaccacugucaguuuagcagacccucuccuaucggguaccucggacugcuuucccaacggacccgcgauaucuauauuagcagacggcugcucggcacauucaccuggacccuguccgacucugaaggcgaggauacacccgggggauacugccugacgcgcuggaugcucaucgaggccgaacugaaguguuuuggcaacaccgcuguggccaaaugcaaugagaagcaugacgaagaguucugcgauaugcuuagacuguuugacuucuguaaacaggcuauucagcggcucaaggccgaagcgcagaugagcauccaacugauuaacaaagccgugaaugcucuuaucaacgaucagcugaucaugaagaaucaccuccgcgacauuauggggaucccuuauugcaacuacuccaaguauugguaccugaaucacacaaccacaggaagaaccagccugcccaaauguuggcucgucucuaacggcuccuaccugaaugagacgcauuucagcgacgauauugagcagcaagccgacaacaugaucacagaaaugcuucagaaggaguauauggaacggcaggggaaaaccccucugggacucguugaucuguuuguguucucuaccagcuuuuaccugauuuccaucuuccuucaccucgugaagaucccgacacaucgccacauugucggcaaaucuugccccaagccucauagacugaaucacaugggcaucuguagcugcgggcuguauaaacagcccggagugccuguuaaguggaagcggugaggacuagucccuguucccagagcccacuuuuuuuucuuuuuuugaaauaaaauagccugucuuucagaucucaaaggcucuuuucagagccaccaaaaaaaaaaaaaaaaaaaaaaaaaaaaaaaaaaaaaaaaaaaaaaaaaaaaaaaaaaaaaaaaagaauu

SEQ ID NO: 37185 - RNA, 1736 nt, Artificial Sequence
  mRNA product Design a-2 (hSL-A64-N5) comprising derived and/or modified sequence from LASV(LM765-SLE-2012;Clade IV)__AIT17814__GPCmut10 (opt5)
aggagaguccgcucagccagguugcagaagcggcuuagcguguguccuaaucuucucucugcguguagguaggccugugccgcaaacaagcuuaccaugggccagaucgugaccuucuuucaagaggucccccacguuauugaagaggugaugaacaucgugcugauugcccucagcauccuggcuguccuuaaggggcuguacaauuucgccacaugcggacucgugggccugguuacguuucuucugcucugugggagauccugcaccacaucucuguauaaaggaguguacgaacugcagacccucgagcugaacauggaaacacuuaauauguguaugccucugagcugcaccaagaacaauucccaucacuauauuauggucggcaacgagacagggcucgagcugacccuuacgaauaccucuaucaucgaccauaaauucuguaaccugagcgaugcgcaccggaagaaucucuacgaccaugcucugauguccauuaucucuacauuucaccugagcauuccgaacuucaaucaguaugaagccauguccugcgauuuuaacggaggcaaaaucagcgugcaguacaaucucucucacuccuaugccaaggacgcugccgaucauuguggcaccguugcuaacggggugcugcaaacauucaugcgcauggccuggggaggcagcuacauugcgcuugacucugggagaggacggugggauugcaucaugaccuccuaccaguaucugauuauccagaauacgacaugggaggaccacugucaguuuagccgccccucuccuaucggcuaccucgggcugcuuucccaaagaacccgggauauuuauaucagccgcagacugcucggaacauucaccuggacccuguccgacucugaaggcaaggauacacccggcggguacugccugacgcgguggaugcucauugaggccgagcugaaauguuuuggaaacaccgcugucgccaagugcaacgaaaaacaugacgaggaguucugcgauaugcuucgccuguuugacuucuguaagcaggcuauccagagacucaaagccgaagcgcagaugagcauucaacugaucaauaaggccgugaacgcucuuaucaaugaccagcugauuaugaagaaccaccuccgggauaucaugggcauuccuuauugcaauuacuccaaauauugguaccugaaccacacaaccacagggaagaccagccugcccaaauguuggcucgugucuaauggauccuaccugaacgaaacgcauuucagcgacgauaucgagcagcaagccgacaauaugauuacagagaugcuucagaaggaauauauggagcgccagggcaaaaccccucuggggcucgucgaucuguuuguuuucucuaccagcuuuuaccugaucuccaucuuccuucaccucgugaagauuccgacacauagacacaucgugggaaaacccugcccuaagccccaucggcugaaccacaugggcauuuguucuugcggccuguauaagcagccugggguccccgugaaauggaagcgcugaggacuagucccuguucccagagcccacuuuuuuuucuuuuuuugaaauaaaauagccugucuuucagaucucaaaggcucuuuucagagccaccaaaaaaaaaaaaaaaaaaaaaaaaaaaaaaaaaaaaaaaaaaaaaaaaaaaaaaaaaaaaaaaaagaauu

SEQ ID NO: 37186 - RNA, 1736 nt, Artificial Sequence
  mRNA product Design a-2 (hSL-A64-N5) comprising derived and/or modified sequence from LASV(LM776-SLE-2012;Clade IV)__AIT17824__GPCmut10 (opt5)
aggagaguccgcucagccagguugcagaagcggcuuagcguguguccuaaucuucucucugcguguagguaggccugugccgcaaacaagcuuaccaugggccagaucgugaccuucuuucaagaggucccccacguuauugaagaggugaugaacaucgugcugauugcccucagcauccuggcuguccuuaaggggcuguacaauuucgccacaugcggacucgugggccugguuacguuucuucugcucugugggagauccugcaccacaucuguguauaaaggagucuacgaacugcagacccuggagcucaacauggaaacacugaauauguguaugccucuuagcugcaccaagaacaauucccaucacuauauuauggugggcaacgagacagggcuggagcucacccugacgaauaccucuaucaucaaccauaaauucuguaaucuuagcgacgcgcacaagaaaaaccuguacgaucaugcucucauguccauuaucucuacauuucaccugagcauuccgaauuucaaccaguaugaagccauguccugcgacuuuaauggaggcaagaucagcguucaguacaaccugucucacuccuaugccggcgaugcugccaaucauugugggaccguggcuaacggaguccuccaaacauucaugcggauggccuggggcgggagcuacauugcgcuggacucuggacacggcaagugggauugcaucaugaccuccuaccaguaucuuauuauccagaacacgacaugggaggaccauugucaguuuagccgccccucuccuaucggguaccugggacuccugucccaaagaacccgggauauuuauaucagccgcagacuucugggcacauucaccuggacccucuccgacucugaaggcaaagauacacccgggggauacugccugacgcgguggaugcugauugaggccgagcucaaguguuuuggcaauaccgcuguggccaaaugcaacgaaaagcacgacgaggaguucugcgauaugcugcgccuuuuugacuucuguaaacaggcuauccagagacugaaggccgaagcgcagaugagcauucaacucaucaauaaggccgugaacgcucugaucaaugaucagcuuauuaugaaaaaccaucugcgggacaucauggggauuccuuauugcaauuacuccaaguauugguaccucaaccacacaaccacaggaaaaaccagccugcccaaguguuggcuggucucuaauggcuccuaccucaacgaaacgcacuucagcgacgauaucgagcagcaagccgacaauaugauuacagagaugcugcagaaagaauauauggagcgccaggggaagaccccucuuggacugguugaucucuuuguguucucuaccagcuuuuaccugaucuccaucuuccugcaucuugugaaaauuccgacacacagacauaucgucggcaagucuugccccaagccucaccggcucaaccacaugggcauuuguagcugcgggcuguauaaacagcccggagugccuguucgcuggaagagaugaggacuagucccuguucccagagcccacuuuuuuuucuuuuuuugaaauaaaauagccugucuuucagaucucaaaggcucuuuucagagccaccaaaaaaaaaaaaaaaaaaaaaaaaaaaaaaaaaaaaaaaaaaaaaaaaaaaaaaaaaaaaaaaaagaauu

SEQ ID NO: 37187 - RNA, 1736 nt, Artificial Sequence
  mRNA product Design a-2 (hSL-A64-N5) comprising derived and/or modified sequence from LASV(Mad39;Clade IV)__ANH09722__GPCmut10 (opt5)
aggagaguccgcucagccagguugcagaagcggcuuagcguguguccuaaucuucucucugcguguagguaggccugugccgcaaacaagcuuaccaugggccagaucgugaccuucuuucaagaggucccccacguuauugaagaggugaugaacaucgugcugauugcccucagcauccuggcuguccuuaaggggcuguacaauguggccacaugcggacucauuggccugguuacguuccuucugcucugugggagauccugcaccacaacccuguauaaaggaguguacgaacugcaggcgcucgagcugaacauggaaacacuuaauauguguaugccucugucuugcaccaagaacaauagccaucacuauauccgggucggcaacgagacagggcucgagcugacccuuacgaauaccucccugaucaaccauaaauuuuguaaucucucugacgcucacaagaaaaaccuguacgaucaugcccugaugagcauuaucuccacauuccaccucucuauuccgaauuuuaaccaguaugaagccaugagcugcgacuucaaugauggaaagaucuccgugcaguacaaccugagccacaccuaugcuggcgacacagccaaucauuguggcaccguugcuaacggggugcuucaaacguuuaugcgcauggccuggggaggcucuuacauugcgcuggauuccgggagaggaggcugggacugcaucaugacaagcuaccaguaucucauuauccagaacaccacaugggaggaucacugucaguucucucggcccuccccuaucggguaccugggacuucugagccaacgcaccagagacauuuauaucucucggcgccuccugggcaccuuuacauggacgcuguccgauagcgaaggcaaggacacccccgggggauacugccucacaagauggaugcugauugaggccgagcuuaaauguuucggcaauaccgcugucgccaagugcaacgaaaaacaugaugaggaauuuugcgacaugcugcgccucuucgauuuuuguaagcaggcuauccagcggcugaaagccgaggcgcagauguccauucaacuuaucaauaaggccgugaacgcucugaucaaugaccagcucauuaugaagaaccaccugagagacaucauggggauuccuuauugcaauuacucuaaauauugguaccugaaccacacagugaccggaaagacgagccuccccaaauguuggcuggucuccaauggcagcuaccuuaacgaaacacauuucucugaugacaucgagcagcaagccgauaauaugauuaccgagaugcugcagaaggaauauauggagcggcaggggaaaaccccucucggacugguugaccuguucguguuuuccaccagcuucuaccuuaucucuaucuuucuccaccuggugaagauuccgacacaucgccacgucgugggcaaacccugcccuaagccccauagacugaaccacaugggcaucuguagcugcggguucuauaagcagccuggaguucccgugcgguggaaacgcugaggacuagucccuguucccagagcccacuuuuuuuucuuuuuuugaaauaaaauagccugucuuucagaucucaaaggcucuuuucagagccaccaaaaaaaaaaaaaaaaaaaaaaaaaaaaaaaaaaaaaaaaaaaaaaaaaaaaaaaaaaaaaaaaagaauu

SEQ ID NO: 37188 - RNA, 1736 nt, Artificial Sequence
  mRNA product Design a-2 (hSL-A64-N5) comprising derived and/or modified sequence from LASV(Z0947-SLE-2011;Clade IV)__AIT17840__GPCmut10 (opt5)
aggagaguccgcucagccagguugcagaagcggcuuagcguguguccuaaucuucucucugcguguagguaggccugugccgcaaacaagcuuaccaugggccagaucgugaccuucuuucaagaggucccccacguuauugaagaggugaugaacaucgugcugauugcccucagcauccuggcuguccuuaaggggcuguacaauuucgccacaugcggacucgugggccugguuacguuucuucugcucugugggagauccugcaccauuucucuguauaaaggaguguacgaacugcagacacucgagcugaacauggaaacccuuaauauguguaugccucugagcugcacaaagaacaauucccaucacuauaucauggucggcaacgagaccgggcucgagcugacacuuaccaauacgucuaucauuaaccauaaauucuguaaucugagcgacgcgcacaagaaaaaccucuacgaucaugcucugauguccaucauuucuaccuuucaccugagcaucccgaauuucaaccaguaugaagccauguccugcgacuuuaauggaggcaagauuagcgugcaguacaaccucucucacuccuaugccggcgaugcugccaaucauugugggacaguugcuaacggagugcugcaaaccuucaugcggauggccuggggcgggagcuacaucgcgcuugacucuggacgcgauagaugggacugcauuaugacauccuaccaguaucugaucauccagaacaccacgugggaggaucacugucaguuuagccggcccucuccuauuggcuaccucgggcugcuuucccaacgcacaagagacaucuauauuagccggcgccugcucggaaccuucacauggacccuguccgauucugaaggcaaggacacccccggcggguacugccugacaagauggaugcucaucgaggccgagcugaaauguuuuggaaauacggcugucgccaagugcaacgaaaaacaugaugaggaguucugcgacaugcuucggcuguuugauuucuguaagcaggcuauucagcgccucaaagccgaagcgcagaugagcauccaacugaucaauaaggccgugaacgcucuuauuaaugaccagcugaucaugaagaaccaccucagagacauuaugggcaucccuuauugcaauuacuccaaauauugguaccugaaccacaccacaaccgggaagacaagccugcccaaauguuggcucgugucuaauggauccuaccugaacgaaacccauuucagcgaugacauugagcagcaagccgauaauaugaucacggagaugcuucagaaggaauauauggagcggcagggcaaaacaccucuggggcucgucgaccuguuuguuuucucuaccagcuuuuaccugaucuccauuuuccuucaccucgugaagaucccgacccaucgccacauugugggaaaacccugcccuaagccccauagacugaaccacaugggcaucuguucuugcggccuguauaagcagccugggguccccgugaaauggaagcggugaggacuagucccuguucccagagcccacuuuuuuuucuuuuuuugaaauaaaauagccugucuuucagaucucaaaggcucuuuucagagccaccaaaaaaaaaaaaaaaaaaaaaaaaaaaaaaaaaaaaaaaaaaaaaaaaaaaaaaaaaaaaaaaaagaauu

SEQ ID NO: 37189 - RNA, 1767 nt, Artificial Sequence
  mRNA product Design a-2 (hSL-A100) comprising derived and/or modified sequence from LASV(Josiah;Clade IV)__NP_694870__GPCmut10 (opt1)
aggagaguccgcucagccagguugcagaagcggcuuagcguguguccuaaucuucucucugcguguagguaggccugugccgcaaacaagcuuaccaugggccagaucgugaccuucuuccaggaggucccccacgugaucgaggaggugaugaacaucguccugaucgcccucagcgugcuggccgugcugaaggggcucuacaacuucgcgaccugcggccuggucgggcuggugacguuccuccugcugugcggccgcuccugcaccaccagccucuacaaggggguguacgagcugcagacccuggagcucaacauggagacgcugaacaugugcaugccgcuguccugcaccaagaacaacagccaccacuacaucauggucggcaacgagaccggccucgagcugacgcugaccaacaccuccaucaucaaccacaaguucugcaaccucagcgacgcccacaagaagaaccuguacgaccacgcccugauguccaucaucagcaccuuccaccucuccauccccaacuucaaccaguacgaggccaugagcugcgacuucaacgggggcaagaucuccgugcaguacaaccugagccacuccuacgccggggacgcggccaaccacugcggcacgguggccaacgggguccugcagaccuucaugcggauggccuggggcggcagcuacaucgcgcucgacuccgggcgcggcaacugggacugcaucaugaccagcuaccaguaccugaucauccagaacaccacgugggaggaccacugccaguucucccggcccagccccaucggguaccugggccuccugucccagcgcacccgggacaucuacaucagccgccggcugcucggcaccuucaccuggacgcugagcgacuccgaggggaaggacaccccgggcggguacugccugacccgcuggaugcucaucgaggccgagcugaagugcuucggcaacaccgccguggccaagugcaacgagaagcacgacgaggaguucugcgacaugcugcggcuguucgacuucugcaagcaggccauccagcgccugaaggcggaggcccagaugagcauccagcugaucaacaaggccgugaacgcccucaucaacgaccagcugaucaugaagaaccaccuccgggacaucauggggauccccuacugcaacuacuccaaguacugguaccucaaccacacgaccaccggccgcaccagccugcccaagugcuggcuggucuccaacggcagcuaccucaacgagacgcacuucuccgacgacaucgagcagcaggccgacaacaugaucaccgagaugcugcagaaggaguacauggagcggcaggggaagacgccccugggccucguggaccuguucguguucagcaccuccuucuaccugaucagcaucuuccugcaccucgucaagaucccgacccaccgccacaucguggggaaguccugccccaagccccaccggcugaaccacaugggcaucugcagcugcgggcuguacaagcagcccggcgugccggucaaguggaagcgcugaggacuagucccuguucccagagcccacuuuuuuuucuuuuuuugaaauaaaauagccugucuuucagaucucaaaggcucuuuucagagccaccaaaaaaaaaaaaaaaaaaaaaaaaaaaaaaaaaaaaaaaaaaaaaaaaaaaaaaaaaaaaaaaaaaaaaaaaaaaaaaaaaaaaaaaaaaaaaaaaaaaaa

SEQ ID NO: 37190 - RNA, 1764 nt, Artificial Sequence
  mRNA product Design a-2 (hSL-A100) comprising derived and/or modified sequence from LASV(LP;Clade I)__AAF86701__GPCmut10 (opt1)
aggagaguccgcucagccagguugcagaagcggcuuagcguguguccuaaucuucucucugcguguagguaggccugugccgcaaacaagcuuaccaugggccagaucaucaccuucuuccaggaggugccccacgucaucgaggaggugaugaacaucgugcugaucgcccucagccugcuggccauccucaaggggcuguacaacaucgcgaccugcggcaucaucgggcuggucgccuuccucuuccugugcggcaaguccugcagccugacgcucaagggcggguacgagcugcagacccuggagcucaacauggagacccugaacaugugcaugccgcuguccugcacgaagaacagcucccaccacuacauccgcgugggcaacgagaccgggcucgagcugacccugaccaacacgagcaucaucaaccacaaguucugcaaccucuccgacgcccacaagaagaaccuguacgaccacgcccugaugagcaucaucuccaccuuccaccucagcauccccaacuucaaccaguacgaggccauguccugcgacuucaacggcgggaagaucagcgugcaguacaaccugucccacagcuacgcgggcgacgccgccgagcacugcgggaccgucgccaacggcgugcugcagaccuucaugcggauggcguggggcgggcgcuacaucgcccucgacuccggcaaggggaacugggacugcaucaugacgagcuaccaguaccugaucauccagaacaccaccugggaggaccacugccaguucucccggcccagccccaucggcuaccugggccuccugucccagcgcacccgggacaucuacaucagccgccggcugcucgggacguucaccuggacccugagcgacuccgagggcaacgagacccccgggggcuacugccugacgcgcuggaugcucaucgaggccgagcugaagugcuucgggaacaccgccguggccaagugcaacgagaagcacgacgaggaguucugcgacaugcugcggcuguucgacuucugcaagcaggcgauccgccggcugaaggccgaggcccagaugagcauccagcugaucaacaaggccgucaacgcccucaucaacgaccagcugaucaugaagaaccaccuccgcgacaucaugggcauccccuacugcaacuacuccaaguacugguaccucaaccacaccagcuccggccggaccagccugcccaagugcuggcugaucuccaacgggagcuaccucaacgagacgcaguucuccgacgacaucgagcagcaggcggacaacaugaucaccgagaugcugcagaaggaguacaucgagcgccagggcaagaccccgcuggggcucguggacaucuucaucuucagcaccuccuucuaccugaucagcaucuuccugcaccugaucaagaucccgacgcaccggcacaucgugggcaagcccugccccaagccccaccgccucaaccacaugggggucugcuccugcggccuguacaagcacccgggcgugcccaccaaguggaagcggugaggacuagucccuguucccagagcccacuuuuuuuucuuuuuuugaaauaaaauagccugucuuucagaucucaaaggcucuuuucagagccaccaaaaaaaaaaaaaaaaaaaaaaaaaaaaaaaaaaaaaaaaaaaaaaaaaaaaaaaaaaaaaaaaaaaaaaaaaaaaaaaaaaaaaaaaaaaaaaaaaaaaa

SEQ ID NO: 37191 - RNA, 1764 nt, Artificial Sequence
  mRNA product Design a-2 (hSL-A100) comprising derived and/or modified sequence from LASV(803213;Clade II)__AAF86703__GPCmut10 (opt1)
aggagaguccgcucagccagguugcagaagcggcuuagcguguguccuaaucuucucucugcguguagguaggccugugccgcaaacaagcuuaccaugggccagaucaucaccuucuuccaggaggugccccacgucaucgaggaggugaugaacaucgugcugaucgcccucagccugcuggccauccucaaggggaucuacaacgucgcgaccugcggccuguucgggcugaucuccuuccuccugcugugcggccgcagcugcuccgugacguacaaggggguguacgagcuccagacccuggagcugaacauggccaaccucaacaugugcaugccgcugagcugcaccaagaacaacucccaccacuacaucauggucggcaacgagacgggccuggagcucacccugaccaacaccagcaucaucaaccacaaguucugcaaccuguccgacgcccacaagaagaaccucuacgaccacgcccugaugagcaucaucuccacguuccaccugagcauccccaacuucaaccaguacgaggccauguccugcgacuucaacgggggcaagaucagcgugcaguacaaccucucccacagcuucgcgguggacgccgccaaccacugcgggaccaucgccaacggcguccugcagaccuucaugcggauggcguggggcggguccuacaucgcccuggacagcggcaaggggaacugggacugcaucaugaccuccuaccaguaccucaucauccagaacacgaccugggaggaccacugccaguucagccgccccucccccaucggcuaccuggggcugcucagccagcggacccgcgacaucuacaucagccggcgccugcugggcaccuucacguggacccucuccgacagcgagggcaacgaggcccccgggggcuacugccugacccgguggaugcugaucgaggccgagcucaagugcuucgggaacaccgccguggcgaagugcaacgagaagcacgacgaggaguucugcgacaugcugcgccuguucgacuucugcaagcaggccaucaagcggcucaagacggaggcccagauguccauccagcugaucaacaaggccgugaacgcccugaucaacgaccagcucaucaugaagaaccaccuccgcgacaucaugggcauccccuacugcaacuacagccgguacugguaccugaaccacaccgucaccgggaagaccucccugccccgcugcuggcuggugagcaacggcuccuaccugaacgagacgcacuucagcgacgacaucgagcagcaggcggacaacaugaucaccgagaugcuccagaaggaguacauggaccggcagggcaagaccccgcuggggcugguggaccucuucgucuucuccaccagcuucuaccugaucuccaucuuccugcaccuggugaagaucccgacgcaccgccacaucgugggcaagcccugccccaagccccaccggcucaaccacauggggaucugcagcugcggccuguacaagcacccggggguccccgugaaguggaagcgcugaggacuagucccuguucccagagcccacuuuuuuuucuuuuuuugaaauaaaauagccugucuuucagaucucaaaggcucuuuucagagccaccaaaaaaaaaaaaaaaaaaaaaaaaaaaaaaaaaaaaaaaaaaaaaaaaaaaaaaaaaaaaaaaaaaaaaaaaaaaaaaaaaaaaaaaaaaaaaaaaaaaaa

SEQ ID NO: 37192 - RNA, 1764 nt, Artificial Sequence
  mRNA product Design a-2 (hSL-A100) comprising derived and/or modified sequence from LASV(GA391;Clade III)__CAA36645__GPCmut10 (opt1)
aggagaguccgcucagccagguugcagaagcggcuuagcguguguccuaaucuucucucugcguguagguaggccugugccgcaaacaagcuuaccaugggccagaucgugaccuucuuccaggaggucccccacgugaucgaggaggugaugaacaucguccugaucgcccucagcauccuggccauccugaaggggcucuacaacguggcgaccugcggccugaucgggcuggugacguuccuccugcuguccggccgcagcugcucccucaucuacaaggggaccuacgagcugcagacccuggagcucaacauggagacccugaacaugugcaugccgcugagcugcaccaagaacaacucccaccacuacauccgggucggcaacgagaccggccucgagcugacccugacgaacaccagcauccucaaccacaaguucugcaaccuguccgacgcccacaagcgcaaccuguacgaccacagccucauguccaucaucagcaccuuccaccuguccauccccaacuucaaccaguacgaggccaugagcugcgacuucaacgggggcaagaucaccgugcaguacaaccugucccacagcuucgccguggacgccgcggggcacugcggcacgcucgccaacgggguccugcagaccuucaugcggauggccuggggcggcuccuacaucgcccuggacagcgggcgcggcaacugggacugcaucaugaccuccuaccaguaccucaucauccagaacaccacgugggacgaccacugccaguucagccggcccucccccaucggguaccugggccugcucagccagcgcacccgggacaucuacaucagccgccggcugcugggcaccuucaccuggacgcucuccgacagcgaggggaacgagaccccgggcggguacugccugacccgcuggaugcugaucgaggcggagcucaagugcuucggcaacaccgccguggccaagugcaacgagaagcacgacgaggaguucugcgacaugcugcggcuguucgacuucugcaagcaggccauccgccggcucaagacggaggcccagauguccauccagcugaucaacaaggcggugaacgcccugaucaacgaccagcucaucaugaagaaccaccuccgcgacaucauggggauccccuacugcaacuacagccgguacugguaccugaaccacaccuccaccggcaagaccagccugccccgcugcuggcugaucuccaacggcagcuaccugaacgagacgaaguucuccgacgacaucgagcagcaggccgacaacaugaucaccgagaugcuccagaaggaguacaucgaccggcaggggaagacgccccugggccuggucgaccuguucguguucagcaccuccuucuaccucaucagcaucuuccugcaccuggugaagaucccgacccaccgccacaucgucgggaagcccugccccaagccccaccggcucaaccacaugggcaucugcuccugcgggcuguacaagcagccgggcgugcccgugcgcuggaagcggugaggacuagucccuguucccagagcccacuuuuuuuucuuuuuuugaaauaaaauagccugucuuucagaucucaaaggcucuuuucagagccaccaaaaaaaaaaaaaaaaaaaaaaaaaaaaaaaaaaaaaaaaaaaaaaaaaaaaaaaaaaaaaaaaaaaaaaaaaaaaaaaaaaaaaaaaaaaaaaaaaaaaa

SEQ ID NO: 37193 - RNA, 1767 nt, Artificial Sequence
  mRNA product Design a-2 (hSL-A100) comprising derived and/or modified sequence from LASV(AV;Clade V)__CCA30314__GPCmut10 (opt1)
aggagaguccgcucagccagguugcagaagcggcuuagcguguguccuaaucuucucucugcguguagguaggccugugccgcaaacaagcuuaccaugggccagaucgugaccuucuuccaggaggucccccacgugaucgaggaggugaugaacaucguccugaucgcccucagcauccuggccgugcugaaggggcucuacaacaucgcgaccugcggccugaucgggcugaucacguuccuccugcugugcggccgcuccugcagcuccaaccucuacaaggggguguacgagcugcagagccuggaccucaacauggagacccugaacaugugcaugccgcuguccugcaccaagaacaacagccaccacuacauccgggucggcaacgacacgggccucgagcugacccugaccaacaccuccauccucaaccacaaguucugcaaccugagcgacgcccacaagaaggaccuguacgaccacgcccucauguccaucaucagcacguuccaccuguccauccccaacuucaaccaguacgaggccaugagcugcgacuucaacgggggcaagaucuccgugcaguacaaccugagccacuccuacgccaucgacgcggccaaccacugcgggaccguggccaacggcauccuccagaccuucaugcgcauggccuggggcgggagcuacaucgcgcuggacuccggccgggggaacugggacugcaucaugaccagcuaccaguaccugaucauccagaacacgaccugggagaaccacugccaguucucccgccccagccccaucggcuaccucgggcugcugagccagcggacccgcgacaucuacaucucccggcgccuccugggcaccuucacguggacccugagcgacuccgagggcaacgccacccccgggggcuacugccucacccgguggaugcugaucgaggccgagcugaagugcuucgggaacacggccgucgccaagugcaacgagaagcacgacgaggaguucugcgacaugcuccgccuguucgacuucugcaagcaggcgaucagccggcugaaguccgaggcccagaugagcauccagcucaucaacaaggccgugaacgcccugaucaacgaccagcugaucaugaagaaccaccuccgcgacaucaugggcauccccuacugcaacuacuccaaguacugguaccugaaccacaccaucaccgggaagaccagccugcccaagugcuggcucguguccaacggcagcuaccugaacgagacgcacuucuccgacgacaucgagcagcaggccgacaacaugaucaccgagaugcugcagaaggaguacauggagcggcagggcaagaccccgcucgggcuggucgaccuguucguguucagcaccuccuucuaccugaucagcaucuuccuccgccuggugaagaucccgacgcaccggcacaucgucggcaagcccugccccaagccccaccgccugaaccacauggggaucugcuccugcggccucuacaagcagccgggggugcccgugcgguggaagcgcugaggacuagucccuguucccagagcccacuuuuuuuucuuuuuuugaaauaaaauagccugucuuucagaucucaaaggcucuuuucagagccaccaaaaaaaaaaaaaaaaaaaaaaaaaaaaaaaaaaaaaaaaaaaaaaaaaaaaaaaaaaaaaaaaaaaaaaaaaaaaaaaaaaaaaaaaaaaaaaaaaaaaa

SEQ ID NO: 37194 - RNA, 1764 nt, Artificial Sequence
  mRNA product Design a-2 (hSL-A100) comprising derived and/or modified sequence from LASV(Togo/2016/7082;Clade VI)__AMR44577__GPCmut10 (opt1)
aggagaguccgcucagccagguugcagaagcggcuuagcguguguccuaaucuucucucugcguguagguaggccugugccgcaaacaagcuuaccaugggccagaucaucaccuucuuccaggaggugccccacgucaucgaggaggugaugaacaucgugcugaucgcccucagccugcuggccauccucaagggggucuacaacguggcgaccugcggcaucaucgggcuggugacguuccuguuccucugcggccgcuccugcagccugaucuacaagggguccuacgagcugcagacccucgagcugaacauggagacccugaacaugugcaugccgcucagcugcacgaagaacuccagccaccacuacauccgggucggcaacgagaccggccuggagcugacccucaccaacacguccaucaucaaccacaaguucugcaaccugagcgacgcccacaagcgcaaccuguacgaccacgcccucauguccauccugagcaccuuccaccuguccauccccaacuucaaccaguacgaggccaugagcugcgacuucaacgggggcaagaucuccgugcaguacaaccucagccacgccuacgcgguggacgccgccgagcacugcgggaccgucgccaacggcgugcugcagaccuucaugcggauggcguggggcggguccuacaucgcccuggacagcggccgcgggaacugggacugcaucaugacguccuaccaguaccucaucauccagaacaccaccugggaggaccacugccaguucagccggcccucccccaucggcuaccuggggcugcucagccagcgcacccgggacaucuacaucagccgccggcugcugggcacguucaccuggacccucuccgacagcgagggcaacgagacccccgggggcuacugccugacgcgcuggaugcugaucgaggccgagcucaagugcuucgggaacaccgccguggccaagugcaacgagaagcacgacgaggaguucugcgacaugcugcggcuguucgacuucugcaagcaggcgauccagcgccucaaguccgaggcccagaugagcauccagcugaucaacaaggccgucaacgcccugaucaacgaccagcucaucaugaagaaccaccuccgggacaugaugggcauccccuacugcaacuacuccaaguacugguaccugaaccacaccagcuccgggcgcaccagccugcccaagugcuggcugguguccaacggcagcuaccugaacgagacgcacuucuccgacgacaucgagcagcaggccgacaacaugaucaccgagaugcuccagaaggaguacaucgaccggcagggcaagaccccgcuggggcugguggaccucuucgucuucagcaccuccuucuaccugaucagcaucuuccugcaccugaucaagaucccgacgcaccgccacaucgugggcaagcccugccccaagccccaccggcucaaccacauggggaucugcuccugcggccuguacaagcagccgggggugcccacccgcuggaagcggugaggacuagucccuguucccagagcccacuuuuuuuucuuuuuuugaaauaaaauagccugucuuucagaucucaaaggcucuuuucagagccaccaaaaaaaaaaaaaaaaaaaaaaaaaaaaaaaaaaaaaaaaaaaaaaaaaaaaaaaaaaaaaaaaaaaaaaaaaaaaaaaaaaaaaaaaaaaaaaaaaaaaa

SEQ ID NO: 37195 - RNA, 1764 nt, Artificial Sequence
  mRNA product Design a-2 (hSL-A100) comprising derived and/or modified sequence from LASV(KAK-428;Clade n.d. (VII))__ANH09740__GPCmut10 (opt1)
aggagaguccgcucagccagguugcagaagcggcuuagcguguguccuaaucuucucucugcguguagguaggccugugccgcaaacaagcuuaccaugggccagaucgugaccuucuuccaggaggucccccacgugaucgaggaggugaugaacaucguccugaucgcccucagccugcuggccauccucaaggggcuguacaacuucgcgaccugcggcgugaucgggcugaucacguuccuccugcugugcggccgcuccugcagcgccaccuacaaggggcaguacgagcuccagacccuggagcugaacauggagucccucaacaugugcaugccgcugagcugcacgaagaacaacucccaccacuacauccgggccggcaacaacaccggccuggagcucacccugaccaacacgagcaucaucucccacaaguucugcaaccugagcgacgcccacaagaagaaccucuacgaccacacccugauguccaucaucaccaccuuccaccugagcauccccaacuucaaccaguacgaggccauguccugcgacuucaacgggggcaagaucagcauccaguacaaccucucccacagcuacgcgggggacgccgcccagcacugcggcacgguggccaacgggguccugcagaccuucaugcgcauggcguggggcggcuccuaccuggcccucgacagcgggcggcgcggcugggacugcaucaucuccagcuaccaguaccugaucauccagaacaccaccugggacgaccacugccaguucucccggcccagccccaucggguaccugggcuucgugagccagaagacgcgcgacaucuacaucucccggcgccuccugggcaccuucaccuggacccugagcgacuccgaggggcacgacaugccgggcggguacugccucacgcgguggaugcugaucgaggccgaccugaagugcuucggcaacaccgccguggccaagugcaacgagaagcacgacgaggaguucugcgacauguggcgccucuucgacuucugcaagcaggcgauccagcggcugaaggccgaggcccagaugaacauccagcugaucaacaaggccgucaacgcccucaucaacgaccagcugaugaugaagaaccaccuccgcgacaucauggggauccccuacugcaacuacagcaaguucugguaccugaacaacaccaccacgggccggaccucccugccccgcugcuggcugaucagcaacggcuccuaccucaacgagacccacuucagcgacgacaucgagcagcaggcggacaacaugaucaccgagaugcugcagaaggaguacauggaccggcaggggaagacgccccugggccucguggaccuguucguguucuccaccagcuucuaccugaucaccaucuuccuccaccuggucaagaucccgacccaccgccacaucguggggaagcccugccccaagccccaccggcugaaccacaugggcaucugcuccugcgggcuguacaagcagccgggcgugcccguccgcuggaagcggugaggacuagucccuguucccagagcccacuuuuuuuucuuuuuuugaaauaaaauagccugucuuucagaucucaaaggcucuuuucagagccaccaaaaaaaaaaaaaaaaaaaaaaaaaaaaaaaaaaaaaaaaaaaaaaaaaaaaaaaaaaaaaaaaaaaaaaaaaaaaaaaaaaaaaaaaaaaaaaaaaaaaa

SEQ ID NO: 37196 - RNA, 1764 nt, Artificial Sequence; identical to SEQ ID NO: 37190
  mRNA product Design a-2 (hSL-A100) comprising derived and/or modified sequence from LASV(Pinneo-NIG-1969;Clade I)__AIT17836__GPCmut10 (opt1)

SEQ ID NO: 37197 - RNA, 1764 nt, Artificial Sequence
  mRNA product Design a-2 (hSL-A100) comprising derived and/or modified sequence from LASV(ISTH0009-NIG-2011;Clade II)__AIT17404__GPCmut10 (opt1)
aggagaguccgcucagccagguugcagaagcggcuuagcguguguccuaaucuucucucugcguguagguaggccugugccgcaaacaagcuuaccaugggccagaucaucaccuucuuccaggaggugccccacgucaucgaggaggugaugaacaucgugcugaucgcccucagccugcuggccauccucaaggggaucuacaacgucgcgaccugcggccuguucgggcugguguccuuccuccugcugugcggccgcagcugcuccacgaccuacaaggggguguacgagcuccagacccuggagcuggacauggccagccucaacaugugcaugccgcuguccugcacgaagaacaacagccaccacuacaucauggucggcaacgagaccggccuggagcucacccugaccaacacguccaucaucaaccacaaguucugcaaccugagcgacgcccacaagaagaaccucuacgaccacgcccugauguccaucaucagcaccuuccaccuguccauccccaacuucaaccaguacgaggccaugagcugcgacuucaacgggggcaagaucuccgugcaguacaaccucagccacgcguacgccguggacgccgccaaccacugcgggaccaucgcgaacggcguccugcagaccuucaugcggauggccuggggcggguccuacaucgcccuggacagcggcaagggguccugggacugcaucaugacgagcuaccaguaccucaucauccagaacaccaccugggaggaccacugccaguucucccgccccagccccaucggcuaccuggggcugcucagccagcggacccgcgacaucuacaucucccggcgccugcugggcacguucaccuggacccucagcgacuccgagggcaacgagacccccgggggcuacugccugacgcgguggaugcugaucgaggccgagcucaagugcuucgggaacaccgccguggcgaagugcaacgagaagcacgacgaggaguucugcgacaugcugcgccuguucgacuucugcaagcaggccauccggcgccucaagaccgaggcccagaugagcauccagcugaucaacaaggccgugaacgcccugaucaacgaccagcucaucaugaagaaccaccuccgggacaucaugggcaucccguacugcaacuacuccaaguacugguaccugaaccacaccgucacggggaagaccagccugccccgcugcuggcugguguccaacggcagcuaccugaacgagacccacuucuccgacgacaucgagcagcaggcggacaacaugaucaccgagcuccugcagaaggaguacauggaccggcagggcaagacgccccuggggcucguggaccuguucgucuucagcaccuccuucuaccugaucagcaucuuccugcaccucaucaagaucccgacccaccgccacaucaccggcaagcccugccccaagccccaccggcugaaccacauggggaucugcuccugcggccuguacaagcacccgggggugcccgugaaguggaagcgcugaggacuagucccuguucccagagcccacuuuuuuuucuuuuuuugaaauaaaauagccugucuuucagaucucaaaggcucuuuucagagccaccaaaaaaaaaaaaaaaaaaaaaaaaaaaaaaaaaaaaaaaaaaaaaaaaaaaaaaaaaaaaaaaaaaaaaaaaaaaaaaaaaaaaaaaaaaaaaaaaaaaaa

SEQ ID NO: 37198 - RNA, 1764 nt, Artificial Sequence
  mRNA product Design a-2 (hSL-A100) comprising derived and/or modified sequence from LASV(ISTH2010-NIG-2012;Clade II)__AIT17482__GPCmut10 (opt1)
aggagaguccgcucagccagguugcagaagcggcuuagcguguguccuaaucuucucucugcguguagguaggccugugccgcaaacaagcuuaccaugggccagaucaucaccuucuuccaggaggugccccacgucaucgaggaggugaugaacaucgugcugaucgcccucagccugcuggccauccucaaggggaucuacaacgucgcgaccugcggccuguucgggcugguguccuuccuccugcugugcggccgcagcugcuccacgaccuacaaggggguguacgagcuccagacccuggagcuggacauggccagccucaacaugugcaugccgcuguccugcacgaagaacaacagccaccacuacaucauggucggcaacgagaccggccuggagcucacccugaccaacacguccaucaucaaccacaaguucugcaaccugagcgacgcccacaagaagaaccucuacgaccacgcccugauguccaucaucagcaccuuccaccuguccauccccaacuucaaccaguacgaggccaugagcugcgacuucaacgggggcaagaucuccgugcaguacaaccucagccacgcguacgccguggacgccgccaaccacugcgggaccaucgcgaacggcguccugcagaccuucaugcggauggccuggggcggguccuacaucgcccuggacagcggcaagggguccugggacugcaucaugacgagcuaccaguaccucaucauccagaacaucaccugggaggaccacugccaguucucccgccccagccccaucggcuaccuggggcugcucagccagcggacccgcgacaucuacaucucccggcgccugcugggcaccuucacguggacccucagcgacuccgagggcaacgagacccccgggggcuacugccugacccgguggaugcugaucgaggccgagcucaagugcuucgggaacacggccguggcgaagugcaacgagaagcacgacgaggaguucugcgacaugcugcgccuguucgacuucugcaagcaggccauccggcgccucaagaccgaggcccagaugagcauccagcugaucaacaaggccgugaacgcccugaucaacgaccagcucaucaugaagaaccaccuccgggacaucaugggcauccccuacugcaacuacuccaaguacugguaccugaaccacaccgucaccgggaagacgagccugccccgcugcuggcugguguccaacggcagcuaccugaacgagacccacuucuccgacgacaucgagcagcaggcggacaacaugaucaccgagcuccugcagaaggaguacaucgaccggcagggcaagaccccgcuggggcucguggaccuguucgucuucagcacguccuucuaccugaucagcaucuuccugcaccucgugaagaucccgacccaccgccacguggucggcaagcccugccccaagccccaccggcugaaccacauggggaucugcuccugcggccuguacaagcacccgggggugcccgugaaguggaagcgcugaggacuagucccuguucccagagcccacuuuuuuuucuuuuuuugaaauaaaauagccugucuuucagaucucaaaggcucuuuucagagccaccaaaaaaaaaaaaaaaaaaaaaaaaaaaaaaaaaaaaaaaaaaaaaaaaaaaaaaaaaaaaaaaaaaaaaaaaaaaaaaaaaaaaaaaaaaaaaaaaaaaaa

SEQ ID NO: 37199 - RNA, 1764 nt, Artificial Sequence
  mRNA product Design a-2 (hSL-A100) comprising derived and/or modified sequence from LASV(Lassa virus/H.sapiens-wt/NGA/2015/ISTH_0543;Clade II)__AVO03639__GPCmut10 (opt1)
aggagaguccgcucagccagguugcagaagcggcuuagcguguguccuaaucuucucucugcguguagguaggccugugccgcaaacaagcuuaccaugggccagaucaucaccuucuuccaggaggugccccacgucaucgaggaggugaugaacaucgugcugaucgcccucagccugcuggccauccucaaggggaucuacaacgucgcgaccugcggccuguucgggcugguguccuuccuccugcugugcggccgcagcugcuccacgaccuacaaggggguguacgagcuccagacccuggagcuggacauggccaaccucaacaugugcaugccgcugagcugcacgaagaacaacucccaccacuacaucauggucggcaacgagaccggccuggagcucacccugaccaacacgagcaucaucaaccacaaguucugcaaccuguccgacgcccacaagaagaaccucuacgaccacgcccugaugagcaucaucuccaccuuccaccugagcauccccaacuucaaccaguacgaggccauguccugcgacuucaacgggggcaagaucagcgugcaguacaaccucucccacaccuacgcgguggacgccgccaaccacugcgggaccaucgccaacggcguccugcagacguucaugcggauggcguggggcgggagcuacaucgcccuggacuccggcaaggggagcugggacugcaucaugaccuccuaccaguaccucgugauccagaacaccaccugggaggaccacugccaguucagccgccccucccccaucggcuaccuggggcugcucagccagcggacgcgcgacaucuacaucagccggcgccugcugggcaccuucaccuggacccucuccgacagcgagggcaacgagacgcccgggggcuacugccugacccgguggaugcugaucgaggccgagcucaagugcuucgggaacaccgccguggccaagugcaacgagaagcacgacgaggaguucugcgacaugcugcgccuguucgacuucugcaagcaggcgauccggcgccucaagaccgaggcccagauguccauccagcugaucaacaaggccgucaacgcccugaucaacgaccagcucaucaugaagaaccaccuccgggacaucaugggcauccccuacugcaacuacagcaaguacugguaccugaaccacacggugaccgggaagaccucccugccccgcugcuggcuggugagcaacggcuccuaccugaacgagacccacuucagcgacgacaucgagcagcaggccgacaacaugaucacggagcuccugcagaaggaguacaucgaccggcagggcaagaccccgcuggggcucgucgaccuguucguguucuccaccagcuucuaccugaucuccaucuuccugcaccucgugaagaucccgacccaccgccacaucacgggcaagcccugccccaagccccaccggcugaaccacauggggaucugcagcugcggccuguacaagcacccggggguccccgugaaguggaagcgcugaggacuagucccuguucccagagcccacuuuuuuuucuuuuuuugaaauaaaauagccugucuuucagaucucaaaggcucuuuucagagccaccaaaaaaaaaaaaaaaaaaaaaaaaaaaaaaaaaaaaaaaaaaaaaaaaaaaaaaaaaaaaaaaaaaaaaaaaaaaaaaaaaaaaaaaaaaaaaaaaaaaaa

SEQ ID NO: 37200 - RNA, 1764 nt, Artificial Sequence
  mRNA product Design a-2 (hSL-A100) comprising derived and/or modified sequence from LASV(Lassa virus/H.sapiens-wt/NGA/2016/ISTH_0009;Clade II)__AVO03571__GPCmut10 (opt1)
aggagaguccgcucagccagguugcagaagcggcuuagcguguguccuaaucuucucucugcguguagguaggccugugccgcaaacaagcuuaccaugggccagaucaucaccuucuuccaggaggugccccacgucaucgaggaggugaugaacaucgugcugaucgcccucagccugcuggccauccucaaggggaucuacaacgucgcgaccugcggccugcuggggcucguguccuuccugcugcucugcggccgcagcugcuccacgaccuacaaggggguguacgagcugcagacccuggagcucgacauggccagccugaacaugugcaugccgcuguccugcacgaagaacaacagccaccacuacaucauggucggcaacgagaccggccucgagcugacccugaccaacacguccaucaucaaccacaaguucugcaaccucagcgacgcccacaagaagaaccuguacgaccacgcccugauguccaucaucagcaccuuccaccucuccauccccaacuucaaccaguacgaggccaugagcugcgacuucaacgggggccggaucuccgugcaguacaaccugagccacuccuacgcgguggacgccgccaaccacugcgggaccaucgccaacggcguccugcagaccuucaugcgcauggcguggggcgggagcuacaucgcccucgacuccggcaaggggagcugggacugcaucaugacguccuaccaguaccugaucauccagaacaccaccugggaggaccacugccaguucagccggcccagccccaucggcuaccuggggcuccugucccagcgcacccgggacaucuacaucagccgccggcugcucggcacguucaccuggacccuguccgacagcgagggcaacgagacccccgggggcuacugccugacgcgcuggaugcucaucgaggccgagcugaagugcuucgggaacaccgccguggccaagugcaacgagaagcacgacgaggaguucugcgacaugcugcggcuguucgacuucugcaagcaggcgauccgccggcugaagaccgaggcccagauguccauccagcugaucaacaaggccgugaacgcccucaucaacgaccagcugaucaugaagaaccaccuccgcgacaucaugggcaucccguacugcaacuacagcaaguacugguaccucaaccacaccgucacggggaagaccucccugccccggugcuggcuggugagcaacggcuccuaccucaacgagacccacuucagcgacgacaucgagcagcaggccgacaacaugaucaccgagcugcugcagaaggaguacaucgaccgccagggcaagacgccccucgggcugguggaccuguucgucuucuccaccagcuucuaccugaucuccaucuuccuccaccuggugaagaucccgacccaccggcacaucaccggcaagcccugccccaagccccaccgccugaaccacauggggaucugcagcugcggccucuacaaccacccgggggugcccgucaaguggaagcggugaggacuagucccuguucccagagcccacuuuuuuuucuuuuuuugaaauaaaauagccugucuuucagaucucaaaggcucuuuucagagccaccaaaaaaaaaaaaaaaaaaaaaaaaaaaaaaaaaaaaaaaaaaaaaaaaaaaaaaaaaaaaaaaaaaaaaaaaaaaaaaaaaaaaaaaaaaaaaaaaaaaaa

SEQ ID NO: 37201 - RNA, 1764 nt, Artificial Sequence
  mRNA product Design a-2 (hSL-A100) comprising derived and/or modified sequence from LASV(Lassa virus/H.sapiens-wt/NGA/2016/ISTH_0017;Clade II)__AVO03567__GPCmut10 (opt1)
aggagaguccgcucagccagguugcagaagcggcuuagcguguguccuaaucuucucucugcguguagguaggccugugccgcaaacaagcuuaccaugggccagaucaucaccuucuuccaggaggugccccacgucaucgaggaggugaugaacaucgugcugaucgcccucagccugcuggccauccucaaggggaucuacaacgucgcgaccugcggccuguucgggcugguguccuuccuccugcugugcggccgcagcugcuccacgaccuacaaggggguguacgagcuccagacccuggagcuggacauggccagccucaacaugugcaugccgcuguccugcacgaagaacaacagccaccacuacaucauggucggcaacgagaccggccuggagcucacccugaccaacacguccaucaucaaccacaaguucugcaaccugagcgacgcccacaagaagaaccucuacgaccacgcccugauguccaucaucagcaccuuccaccuguccauccccaacuucaaccaguacgaggccaugagcugcgacuucaacgggggcaagaucuccgugcaguacaaccucagccacaccuacgcgaucgacgccgccaaccacugcgggaccaucgccaacggcgugcugcagacguucaugcggauggcguggggcggguccuacaucgcccuggacagcggcaagggguccugggacugcaucaugaccagcuaccaguaccucaucauccagaacaccaccugggaggaccacugccaguucucccgccccagccccaucggcuaccuggggcugcucagccagcggacgcgcgacaucuacaucucccggcgccugcugggcaccuucaccuggacccucagcgacuccgagggcaacgagacgcccgggggcuacugccugacccgguggaugcugaucgaggccgagcucaagugcuucgggaacaccgccgucgccaagugcaacgagaagcacgacgaggaguucugcgacaugcugcgccuguucgacuucugcaagcaggcgauccggcgccucaagaccgaggcccagaugagcauccagcugaucaacaaggccgugaacgcccugaucaacgaccagcucaucaugaagaaccaccuccgggacaucaugggcauccccuacugcaacuacuccaaguacugguaccugaaccacacggugaccgggaagaccagccugccccgcugcuggcuggucuccaacggcagcuaccugaacgagacccacuucuccgacgacaucgagcagcaggccgacaacaugaucacggagcuccugcagaaggaguacauggaccggcagggcaagaccccgcuggggcucguggaccuguucguguucagcaccuccuucuaccugaucagcaucuuccugcaccucguccgcaucccgacccaccggcacgugaucggcaagcccugccccaagccccaccgccugaaccacauggggaucugcuccugcggccuguacaagcacccgggggugcccgucaaguggaagcggugaggacuagucccuguucccagagcccacuuuuuuuucuuuuuuugaaauaaaauagccugucuuucagaucucaaaggcucuuuucagagccaccaaaaaaaaaaaaaaaaaaaaaaaaaaaaaaaaaaaaaaaaaaaaaaaaaaaaaaaaaaaaaaaaaaaaaaaaaaaaaaaaaaaaaaaaaaaaaaaaaaaaa

SEQ ID NO: 37202 - RNA, 1764 nt, Artificial Sequence
  mRNA product Design a-2 (hSL-A100) comprising derived and/or modified sequence from LASV(Lassa virus/H.sapiens-wt/NGA/2018/ISTH_0959;Clade II)__AVV65099__GPCmut10 (opt1)
aggagaguccgcucagccagguugcagaagcggcuuagcguguguccuaaucuucucucugcguguagguaggccugugccgcaaacaagcuuaccaugggccagaucaucaccuucuuccaggaggugccccacgucaucgaggaggugaugaacaucgugcugaucgcccucagccugcuggccauccucaaggggaucuacaacgucgugaccugcggccuguucgggcugguguccuuccuccugcugugcggccgcagcugcuccacgaccuacaagggggucuacgagcuccagacccuggagcuggacauggcgagccucaacaugugcaugccgcuguccugcacgaagaacaacagccaccacuacaucauggugggcaacgagaccggccuggagcucacccugaccaacacguccaucaucaaccacaaguucugcaaccugagcgacgcccacaagaagaaccucuacgaccacgcccugauguccaucaucagcaccuuccaccuguccauccccaacuucaaccaguacgaggccaugagcugcgacuucaacgggggcaagaucuccgugcaguacaaccucagccacgccuacgcgaucgacgccgccaaccacugcgggaccaucgccaacggcguccugcagaccuucaugcggauggcguggggcggguccuacaucgcccuggacagcggcaagggguccugggacugcaucaugacgagcuaccaguaccucaucauccagaacaccaccugggaggaccacugccaguucucccgccccagccccaucggcuaccuggggcugcucagccagcggacccgcgacaucuacaucucccggcgccugcugggcacguucaccuggacccucagcgacuccgagggcaacgagacccccgggggcuacugccugacgcgguggaugcugaucgaggccgagcucaagugcuucgggaacaccgccguggccaagugcaacgagaagcacgacgaggaguucugcgacaugcugcgccuguucgacuucugcaagcaggcgauccggcgccucaagaccgaggcccagaugagcauccagcugaucaacaaggccgugaacgcccugaucaacgaccagcucaucaugaagaaccaccuccgggacaucaugggcaucccguacugcaacuacuccaaguacugguaccugaaccacaccgucacggggaagaccagccugccccgcugcuggcugguguccaacggcagcuaccugaacgagacccacuucuccgacgacaucgagcagcaggccgacaacaugaucaccgagcuccugcagaaggaguacaucgaccggcagggcaagacgccccuggggcucguggaccuguucgucuucagcaccuccuucuaccugaucagcaucuuccugcaccucgugaagaucccgacccaccgccacgugaucggcaagcccugccccaagccccaccggcugaaccacauggggaucugcuccugcggccuguacaagcacccggggguccccgugaaguggaagcgcugaggacuagucccuguucccagagcccacuuuuuuuucuuuuuuugaaauaaaauagccugucuuucagaucucaaaggcucuuuucagagccaccaaaaaaaaaaaaaaaaaaaaaaaaaaaaaaaaaaaaaaaaaaaaaaaaaaaaaaaaaaaaaaaaaaaaaaaaaaaaaaaaaaaaaaaaaaaaaaaaaaaaa

SEQ ID NO: 37203 - RNA, 1764 nt, Artificial Sequence
  mRNA product Design a-2 (hSL-A100) comprising derived and/or modified sequence from LASV(LASV003-NIG-2008;Clade II)__AIT17580__GPCmut10 (opt1)
aggagaguccgcucagccagguugcagaagcggcuuagcguguguccuaaucuucucucugcguguagguaggccugugccgcaaacaagcuuaccaugggccagaucaucaccuucuuccaggaggugccccacgucaucgaggaggugaugaacaucgugcugaucgcccucagccugcuggccauccucaaggggaucuacaacgucgcgaccugcggccuguucgggcugguguccuuccuccugcugugcggccgcagcugcuccacgaccuacaaggggguguacgagcuccagacccuggagcuggacauggccagccucaacaugugcaugccgcuguccugcacgaagaacaacagccaccacuacaucauggucggcaacgagaccggccuggagcucacccugaccaacacguccaucaucaaccacaaguucugcaaccugagcgacgcccacaagaagaaccucuacgaccacgcccugauguccaucaucagcaccuuccaccuguccauccccaacuucaaccaguacgaggccaugagcugcgacuucaacgggggcaagaucuccgugcaguacaaccucagccacaccuacgcgguggacgccgccaaccacugcgggaccaucgccaacggcguccugcagacguucaugcggauggcguggggcggguccuacaucgcccuggacagcggcaagggguccugggacugcaucaugaccagcuaccaguaccucaucauccagaacaccaccugggaggaccacugccaguucucccgccccagccccaucggcuaccuggggcugcucagccagcggacgcgcgacaucuacaucucccggcgccugcugggcaccuucaccuggacccucagcgacuccgagagcaacgagacgccgggcggguacugccugacccgguggaugcugaucgaggccgagcucaagugcuucggcaacaccgccguggccaagugcaacgagaagcacgacgaggaguucugcgacaugcugcgccuguucgacuucugcaagcaggcgauccggcgccucaaggccgaggcccagauguccauccagcugaucaacaaggccgugaacgcccugaucaacgaccagcucaucaugaagaaccaccuccgggacaucauggggauccccuacugcaacuacagcaaguacugguaccugaaccacaccgucacgggccgcaccucccugccccggugcuggcuggugagcaacggguccuaccugaacgagacccacuucagcgacgacaucgagcagcaggcggacaacaugaucaccgagcuccugcagaaggaguacauggaccgccagggcaagacgccccugggccucguggaccuguucgucuucuccaccagcuucuaccugaucuccaucuuccugcaccucgugaagaucccgacccaccggcacgugaucgggaagcccugccccaagccccaccgccugaaccacaugggcaucugcagcugcgggcuguacaagcacccgggcguccccgugaaguggaagcggugaggacuagucccuguucccagagcccacuuuuuuuucuuuuuuugaaauaaaauagccugucuuucagaucucaaaggcucuuuucagagccaccaaaaaaaaaaaaaaaaaaaaaaaaaaaaaaaaaaaaaaaaaaaaaaaaaaaaaaaaaaaaaaaaaaaaaaaaaaaaaaaaaaaaaaaaaaaaaaaaaaaaa

SEQ ID NO: 37204 - RNA, 1764 nt, Artificial Sequence
  mRNA product Design a-2 (hSL-A100) comprising derived and/or modified sequence from LASV(LASV035-NIG-2009;Clade II)__AIT17588__GPCmut10 (opt1)
aggagaguccgcucagccagguugcagaagcggcuuagcguguguccuaaucuucucucugcguguagguaggccugugccgcaaacaagcuuaccaugggccagaucaucaccuucuuccaggaggugccccacgucaucgaggaggugaugaacaucgugcugaucgcccucagccugcuggccauccucaaggggaucuacaacgucgcgaccugcggccuguucgggcugguguccuuccuccugcugugcggccgcagcugcuccacgaccuacaaggggguguacgagcuccagacccuggagcuggacauggccagccucaacaugugcaugccgcuguccugcacgaagaacaacagccaccacuacaucauggucggcaacgagaccggccuggagcucacccugaccaacacguccaucaucaaccacaaguucugcaaccugagcgacgcccacaagaagaaccucuacgaccacgcccugauguccaucaucagcaccuuccaccuguccauccccaacuucaaccaguacgaggccaugagcugcgacuucaacgggggcaagaucuccgugcaguacaaccucagccacgcguacgccguggacgccgccaaccacugcgggaccaucgcgaacggcguccugcagaccuucaugcggauggccuggggcggguccuacaucgcccuggacagcggcaagggguccugggacugcaucaugacgagcuaccaguaccucaucauccagaacaccaccugggaggaccacugccaguucucccgccccagccccaucggcuaccuggggcugcucagccagcggacccgcgacaucuacaucucccggcgccugcugggcacguucaccuggacccucagcgacuccgagggcaacgagacccccgggggcuacugccugacgcgguggaugcugaucgaggccgagcucaagugcuucgggaacaccgccguggcgaagugcaacgagaagcacgacgaggaguucugcgacaugcugcgccuguucgacuucugcaagcaggccauccggcgccucaaggccgaggcccagaugagcauccagcugaucaacaaggccgugaacgcgcugaucaacgaccagcucaucaugaagaaccaccuccgggacaucaugggcauccccuacugcaacuacuccaaguacugguaccugaaccacaccgucaccgggaagacgagccugccccgcugcuggcugguguccaacggcagcuaccugaacgagacccacuucuccgacgacaucgagcagcaggccgacaacaugaucaccgagcuccugcagaaggaguacaucgaccggcagggcaagaccccgcuggggcucguggaccuguucgucuucagcacguccuucuaccugaucagcaucuuccugcaccucgugaagaucccgacccaccgccacgugaucggcaagcccugccccaagccccaccggcugaaccacauggggaucugcuccugcggccuguacaagcacccggggguccccgugaaguggaagcgcugaggacuagucccuguucccagagcccacuuuuuuuucuuuuuuugaaauaaaauagccugucuuucagaucucaaaggcucuuuucagagccaccaaaaaaaaaaaaaaaaaaaaaaaaaaaaaaaaaaaaaaaaaaaaaaaaaaaaaaaaaaaaaaaaaaaaaaaaaaaaaaaaaaaaaaaaaaaaaaaaaaaaa

SEQ ID NO: 37205 - RNA, 1764 nt, Artificial Sequence
  mRNA product Design a-2 (hSL-A100) comprising derived and/or modified sequence from LASV(LASV1000-NIG-2009;Clade II)__AIT17782__GPCmut10 (opt1)
aggagaguccgcucagccagguugcagaagcggcuuagcguguguccuaaucuucucucugcguguagguaggccugugccgcaaacaagcuuaccaugggccagaucaucaccuucuuccaggaggugccccacgucaucgaggaggugaugaacaucgugcugaucgcccucagccugcuggccauccucaaggggaucuacaacgucgcgaccugcggccuguucgggcugguguccuuccuccugcugugcggccgcagcugcuccacgaccuacaaggggguguacgagcuccagacccuggagcuggacauggccagccucaacaugugcaugccgcuguccugcacgaagaacaacagccaccacuacaucauggucggcaacgagaccggccuggagcucacccugaccaacacguccaucaucaaccacaaguucugcaaccugagcgacgcccacaagaagaaccucuacgaccacgcccugauguccaucaucagcaccuuccaccuguccauccccaacuucaaccaguacgaggccaugagcugcgacuucaacgggggcaagaucuccgugcaguacaaccucagccacaccuacgcgguggacgccgccaaccacugcgggaccaucgccaacggcguccugcagacguucaugcggauggcguggggcggguccuacaucgcccuggacagcggcaagggguccugggacugcaucaugaccagcuaccaguaccucaucauccagaacaccaccugggaggaccacugccaguucucccgccccagccccaucggcuaccuggggcugcucagccagcggacgcgcgacaucuacaucucccggcgccugcugggcaccuucaccuggacccucagcgacuccgagggcaacgagacgcccgggggcuacugccugacccgguggaugcugaucgaggccgagcucaagugcuucgggaacaccgccguggccaagugcaacgagaagcacgacgaggaguucugcgacaugcugcgccuguucgacuucugcaagcaggcgaucaagcggcucaagaccgaggcccagaugagcauccagcugaucaacaaggccgugaacgcccugaucaacgaccagcucaucaugaagaaccaccuccgcgacaucaugggcauccccuacugcaacuacuccaaguacugguaccugaaccacacggucaccgggaagaccagccugccccggugcuggcugguguccaacggcagcuaccugaacgagacccacuucuccgacgacaucgagcagcaggccgacaacaugaucacggagcuccugcagaaggaguacaucgaccgccagggcaagaccccgcuggggcucguggaccuguucgucuucagcaccuccuucuaccugaucagcaucuuccugcaccucgugaagaucccgacccaccggcacguggucggcaagcccugccccaagccccaccgccugaaccacauggggaucugcuccugcggccuguacaagcacccgggggugcccgugaaguggaagcggugaggacuagucccuguucccagagcccacuuuuuuuucuuuuuuugaaauaaaauagccugucuuucagaucucaaaggcucuuuucagagccaccaaaaaaaaaaaaaaaaaaaaaaaaaaaaaaaaaaaaaaaaaaaaaaaaaaaaaaaaaaaaaaaaaaaaaaaaaaaaaaaaaaaaaaaaaaaaaaaaaaaaa

SEQ ID NO: 37206 - RNA, 1764 nt, Artificial Sequence
  mRNA product Design a-2 (hSL-A100) comprising derived and/or modified sequence from LASV(LASV221-NIG-2010;Clade II)__AIT17624__GPCmut10 (opt1)
aggagaguccgcucagccagguugcagaagcggcuuagcguguguccuaaucuucucucugcguguagguaggccugugccgcaaacaagcuuaccaugggccagaucaucaccuucuuccaggaggugccccacgucaucgaggaggugaugaacaucgugcugaucgcccucagccugcuggccauccucaaggggaucuacaacgucgcgaccugcggccuguucgggcugguguccuuccuccugcugugcggccgcagcugcuccacgaccuacaaggggguguacgagcuccagacccuggagcuggacauggccagccucaacaugugcaugccgcuguccugcacgaagaacaacagccaccacuacaucauggucggcaacgagaccggccuggagcucacccugaccaacacguccaucaucaaccacaaguucugcaaccugagcgacgcccacaagaagaaccucuacgaccacgcccugauguccaucaucagcaccuuccaccuguccauccccaacuucaaccaguacgaggccaugagcugcgacuucaacgggggcaagaucuccgugcaguacaaccucagccacaccuacgcgaucgacgccgccaaccacugcgggaccaucgccaacggcgugcugcagacguucaugcggauggcguggggcggguccuacaucgcccuggacagcggcaagggguccugggacugcaucaugaccagcuaccaguaccucaucauccagaacaccaccugggaggaccacugccaguucucccgccccagccccaucggcuaccuggggcugcucagccagcggacgcgcgacaucuacaucucccggcgccugcugggcaccuucaccuggacccucagcgacuccgagggcaacgagacgcccgggggcuacugccugacccgguggaugcugaucgaggccgagcucaagugcuucgggaacaccgccgucgccaagugcaacgagaagcacgacgaggaguucugcgacaugcugcgccuguucgacuucugcaagcaggcgauccggcgccucaagaccgaggcccagaugagcauccagcugaucaacaaggccgugaacgcccugaucaacgaccagcucaucaugaagaaccaccuccgggacaucaugggcauccccuacugcaacuacuccaaguacugguaccugaaccacacggugaccgggaagaccagccugccccgcugcuggcuggucuccaacggcagcuaccugaacgagacccacuucuccgacgacaucgagcagcaggccgacaacaugaucacggagaugcuccagaaggaguacauggaccggcagggcaagaccccgcuggggcugguggaccucuucguguucagcaccuccuucuaccugaucagcaucuuccugcaccuggucaagaucccgacccaccgccacgugaucggcaagcccugccccaagccccaccggcucaaccacauggggaucugcuccugcggccuguacaagcacccgggggugcccgucaaguggaagcgcugaggacuagucccuguucccagagcccacuuuuuuuucuuuuuuugaaauaaaauagccugucuuucagaucucaaaggcucuuuucagagccaccaaaaaaaaaaaaaaaaaaaaaaaaaaaaaaaaaaaaaaaaaaaaaaaaaaaaaaaaaaaaaaaaaaaaaaaaaaaaaaaaaaaaaaaaaaaaaaaaaaaaa

SEQ ID NO: 37207 - RNA, 1764 nt, Artificial Sequence
  mRNA product Design a-2 (hSL-A100) comprising derived and/or modified sequence from LASV(LASV237-NIG-2010;Clade II)__AIT17638__GPCmut10 (opt1)
aggagaguccgcucagccagguugcagaagcggcuuagcguguguccuaaucuucucucugcguguagguaggccugugccgcaaacaagcuuaccaugggccagaucaucaccuucuuccaggaggugccccacgucaucgaggaggugaugaacaucgugcugaucgcccucagccugcuggccauccucaaggggaucuacaacgucgcgaccugcggccuguucgggcugguguccuuccuccugcugugcggccgcagcugcuccacgaccuacaaggggguguacgagcuccagacccuggagcuggacauggccagccucaacaugugcaugccgcuguccugcacgaagaacaacagccaccacuacaucauggucggcaacgagaccggccuggagcucacccugaccaacacguccaucaucaaccacaaguucugcaaccugagcgacgcccacaagaaggaccucuacgaccacgcccugauguccaucaucagcaccuuccaccuguccauccccaacuucaaccaguacgaggccaugagcugcgacuucaacgggggcaagaucuccgugcaguacaaccucagccacaccuacgcgguggacgccgccaaccacugcgggaccaucgccaacggcguccugcagacguucaugcggauggcguggggcggguccuacaucgcccuggacagcggcaagggguccugggacugcaucaugaccagcuaccaguaccucaucauccagaacaccaccugggaggaccacugccaguucucccgccccagccccaucggcuaccuggggcugcucagccagcggacgcgcgacaucuacaucucccggcgccugcugggcaccuucaccuggacccucagcgacuccgagggcaacgagacgcccgggggcuacugccugacccgguggaugcugaucgaggccgagcucaagugcuucgggaacaccgccguggccaagugcaacgagaagcacgacgaggaguucugcgacaugcugcgccuguucgacuucugcaagcaggcgauccggcgccucaagaccgaggcccagaugagcauccagcugaucaacaaggccgugaacgcccugaucaacgaccagcucaucaugaagaaccaccuccgggacaucaugggcauccccuacugcaacuacuccaaguacugguaccugaaccacacggucaccgggaagaccagccugccccgcugcuggcugguguccaacggcagcuaccugaacgagacccacuucuccgacgacaucgagcagcaggccgacaacaugaucacggagcuccugcagaaggaguacauggaccggcagggcaagaccccgcuggggcucguggaccuguucgucuucagcaccuccuucuaccugaucagcaucuuccugcaccucaucaagaucccgacccaccgccacaucacgggcaagcccugccccaagccccaccggcugaaccacauggggaucugcuccugcggccuguacaagcacccgggggugcccgugaaguggaagcgcugaggacuagucccuguucccagagcccacuuuuuuuucuuuuuuugaaauaaaauagccugucuuucagaucucaaaggcucuuuucagagccaccaaaaaaaaaaaaaaaaaaaaaaaaaaaaaaaaaaaaaaaaaaaaaaaaaaaaaaaaaaaaaaaaaaaaaaaaaaaaaaaaaaaaaaaaaaaaaaaaaaaaa

SEQ ID NO: 37208 - RNA, 1764 nt, Artificial Sequence
  mRNA product Design a-2 (hSL-A100) comprising derived and/or modified sequence from LASV(LASV253-NIG-2011;Clade II)__AIT17670__GPCmut10 (opt1)
aggagaguccgcucagccagguugcagaagcggcuuagcguguguccuaaucuucucucugcguguagguaggccugugccgcaaacaagcuuaccaugggccagaucaucaccuucuuccaggaggugccccacgucaucgaggaggugaugaacaucgugcugaucgcccucagccugcuggccauccucaaggggaucuacaacgucgcgaccugcggccuguucgggcugguguccuuccuccugcugugcggccgcagcugcuccacgaccuacaaggggguguacgagcuccagacccuggagcuggacauggccagccucaacaugugcaugccgcuguccugcacgaagaacaacagccaccacuacaucauggucggcaacgagaccggccuggagcucacccugaccaacacguccaucaucaaccacaaguucugcaaccugagcgacgcccacaagaagaaccucuacgaccacgcccugauguccaucaucagcaccuuccaccuguccauccccaacuucaaccaguacgaggccaugagcugcgacuucaacgggggcaagaucuccgugcaguacaaccucagccacaccuacgcgguggacgccgccaaccacugcgggaccaucgccaacggcguccugcagacguucaugcggauggcguggggcggguccuacaucgcccuggacagcggcaagggguccugggacugcaucaugaccagcuaccaguaccucaucauccagaacaccaccugggaggaccacugccaguucucccgccccagccccaucggcuaccuggggcugcucagccagcggacgcgcgacaucuacaucucccggcgccugcugggcaccuucaccuggacccucagcgacuccgagggcaacgagacgcccgggggcuacugccugacccgguggaugcugaucgaggccgagcucaagugcuucgggaacaccgccguggccaagugcaacgagaagcacgacgaggaguucugcgacaugcugcgccuguucgacuucugcaagcaggcgauccggcgccucaaggccgaggcccagaugagcauccagcugaucaacaaggccgugaacgcccugaucaacgaccagcucaucaugaagaaccaccuccgggacaucaugggcaucccguacugcaacuacuccaaguacugguaccugaaccacaccgucacggggcgcaccagccugccccggugcuggcugguguccaacggcagcuaccugaacgagacccacuucuccgacgacaucgagcagcaggcggacaacaugaucaccgagcuccugcagaaggaguacaucgaccgccagggcaagacgccccuggggcucguggaccuguucgucuucagcaccuccuucuaccugaucagcaucuuccugcaccucgugaagaucccgacccaccggcacaucaucggcaagcccugccccaagccccaccgccugaaccacauggggaucugcuccugcggccuguacaagcacccgggggugcccgucaaguggaagcggugaggacuagucccuguucccagagcccacuuuuuuuucuuuuuuugaaauaaaauagccugucuuucagaucucaaaggcucuuuucagagccaccaaaaaaaaaaaaaaaaaaaaaaaaaaaaaaaaaaaaaaaaaaaaaaaaaaaaaaaaaaaaaaaaaaaaaaaaaaaaaaaaaaaaaaaaaaaaaaaaaaaaa

SEQ ID NO: 37209 - RNA, 1764 nt, Artificial Sequence
  mRNA product Design a-2 (hSL-A100) comprising derived and/or modified sequence from LASV(LASV254-NIG-2011;Clade II)__AIT17674__GPCmut10 (opt1)
aggagaguccgcucagccagguugcagaagcggcuuagcguguguccuaaucuucucucugcguguagguaggccugugccgcaaacaagcuuaccaugggccagaucaucaccuucuuccaggaggugccccacgucaucgaggaggugaugaacaucgugcugaucgcccucagccugcuggccauccucaaggggaucuacaacgucgcgaccugcggccuguucgggcugguguccuuccuccugcugugcggccgcagcugcuccacgaccuacaaggggguguacgagcuccagacccuggagcuggacaugaccaaccucaacaugugcaugccgcugagcugcaccaagaacaacucccaccacuacaucauggucggcaacgagaccggccuggagcucacccugacgaacaccagcaucaucaaccacaaguucugcaaccuguccgacgcccacaagaagaaccucuacaaccacgcccugaugagcaucaucuccaccuuccaccugagcauccccaacuucaaccaguacgaggccauguccugcgacuucaacgggggcaagaucagcgugcaguacaaccucucccacagcuacgccguggacgcggccaaccacugcgggaccaucgccaacggcguccugcagacguucaugcggauggccuggggcggguccuacaucgcgcuggacagcggcaaggggaacugggacugcaucaugaccuccuaccaguaccucaucauccagaacaccaccugggaggaccacugccaguucagccgccccucccccaucggcuaccuggggcugcucagccagcggacgcgcgacaucuacaucagccggcgccugcugggcaccuucaccuggacccucuccgacagcgagggcaacgagacgcccgggggcuacugccugacccgguggaugcugaucgaggccgagcucaagugcuucgggaacaccgccguggccaagugcaacgagaagcacgacgaggaguucugcgacaugcugcgccuguucgacuucugcaagcaggccauccggcgccucaagaccgaggcgcaggccaacauccagcugaucaacaaggccgugaacgcccugaucaacgaccagcucaucaugaagaaccaccuccgggacaucaugggcauccccuacugcaacuacuccaaguacugguaccugaaccacacggucaccgggaagaccagccugccccgcugcuggcugguguccaacggcagcuaccugaacgagacccacuucuccgacgacaucgagcagcaggccgacaacaugaucacggagcuccugcagaaggaguacauggaccggcagggcaagaccccgcuggggcucguggaccuguucgucuucagcaccuccuucuaccugaucagcaucuuccugcaccucgugaagaucccgacccaccgccacgugaucggcaagcccugccccaagccccaccggcugaaccacauggggaucugcuccugcggccuguacaagcacccggggguccccgugaaguggaagcgcugaggacuagucccuguucccagagcccacuuuuuuuucuuuuuuugaaauaaaauagccugucuuucagaucucaaaggcucuuuucagagccaccaaaaaaaaaaaaaaaaaaaaaaaaaaaaaaaaaaaaaaaaaaaaaaaaaaaaaaaaaaaaaaaaaaaaaaaaaaaaaaaaaaaaaaaaaaaaaaaaaaaaa

SEQ ID NO: 37210 - RNA, 1764 nt, Artificial Sequence
  mRNA product Design a-2 (hSL-A100) comprising derived and/or modified sequence from LASV(Nig08-A19;Clade III)__ADU56618__GPCmut10 (opt1)
aggagaguccgcucagccagguugcagaagcggcuuagcguguguccuaaucuucucucugcguguagguaggccugugccgcaaacaagcuuaccaugggccagaucgugaccuucuuccaggaggucccccacgugaucgaggaggugaugaacaucguccugaucgcccucagcauccuggccauccugaaggggcucuacaacaucgcgaccugcggccugaucgggcuggugacguuccuccugcuguccggccgcagcugcuccaugaccuacaaggggguguacgagcuccagacccuggagcugaacaugaacacccucaacaugugcaugccgcugagcugcaccaagaacaacucccaccacuacaucauggucggcaacgagaccggccuggagcucacccugacgaacaccagccugcuccaccacaaguucugcaaccuguccgacgcccacaagaagaaccuguacgaccacacccucaugagcaucaucuccaccuuccaccugagcauccccaacuucaaccaguacgaggccauguccugcgacuucaacgggggcaagaucacggugcaguacaaccugagccacuccuacgccaucgacgccgcgaaccacugcgggaccguggccaacggcguccuccagaccuucaugcggauggccuggggcgggagcuacaucgcccuggacuccggccgcgggaagugggacugcaucaugaccagcuaccaguaccugaucauccagaacacgaccugggaggaccacugccaguucucccggcccagccccaucggcuaccucgggcugcugucccagcgcacccgggacaucuacaucagccgccggcuccugggcaccuucacguggacccugagcgacuccgagggcaacgagacccccgggggcuacugccucacccgcuggaugcugaucgaggcggagcugaagugcuucgggaacacggccguggccaagugcaacgagaagcacgacgaggaguucugcgacaugcuccggcuguucgacuucugcaagcaggccauccgccggcugaaggccgaggcgcagaugagcauccagcucaucaacaaggccgugaacgcccugaucaacgaccagcugaucaugaagaaccaccuccgcgacaucaugggcauccccuacugcaacuacuccaaguacugguaccugaaccacaccagcaccgggcggaccucccugccccgcugcuggcucgucagcaacggcuccuaccugaacgagacgcacuucagcgacgacaucgagcagcaggccgacaacaugaucaccgagaugcugcagaaggaguaccucgaccggcagggcaagaccccgcuggggcugguggaccuguucguguucuccaccagcuucuaccucaucuccaucuuccugcaccuggucaagaucccgacgcaccgccacaucgugggcaagcccugccccaagccccaccggcucaaccacauggggaucugcagcugcggccuguacaagcagccgggggugcccguccgcuggaagcggugaggacuagucccuguucccagagcccacuuuuuuuucuuuuuuugaaauaaaauagccugucuuucagaucucaaaggcucuuuucagagccaccaaaaaaaaaaaaaaaaaaaaaaaaaaaaaaaaaaaaaaaaaaaaaaaaaaaaaaaaaaaaaaaaaaaaaaaaaaaaaaaaaaaaaaaaaaaaaaaaaaaaa

SEQ ID NO: 37211 - RNA, 1767 nt, Artificial Sequence
  mRNA product Design a-2 (hSL-A100) comprising derived and/or modified sequence from LASV(G1180-SLE-2010;Clade IV)__AIT17168__GPCmut10 (opt1)
aggagaguccgcucagccagguugcagaagcggcuuagcguguguccuaaucuucucucugcguguagguaggccugugccgcaaacaagcuuaccaugggccagaucgugaccuucuuccaggaggucccccacgugaucgaggaggugaugaacaucguccugaucgcccucagcauccuggccgugcugaaggggcucuacaacuucgcgaccugcggccugguggggcugcucaccuuccugcugcucugcggccgcuccugcaccgccagccgguacaagggggucuacgagcugcagacccuggagcucaacauggagacccugaacaugugcaugccgcuguccugcaccaagaacaacagccaccacuacaucauggugggcaacgagaccggccucgagcugacccugacgaacaccuccaucaucaaccacaaguucugcaaccucagcgacgcccacaagaagaaccuguacgaccacgcccugauguccaucaucagcaccuuccaccucuccauccccaacuucaaccaguacgaggccaugagcugcgacuucaacgggggcaagaucuccgugcaguacaaccugagccacuccuacgcgggggacgccgccaaccacugcggcaccgucgccaacggggugcugcagacguucaugcgcauggcguggggcggcagcuacaucgcccucgacuccgggcacggcagcugggacugcaucaugaccuccuaccaguaccugaucauccagaacaccaccugggaggaccacugccaguucagccggcccucccccaucggguaccugggccuccugagccagcgcacgcgggacaucuacaucagccgccggcugcucggcaccuucaccuggacccuguccgacagcgaggggaaggacacgccgggcggguacugccugacccgcuggaugcucaucgaggccgagcugaagugcuucggcaacaccgccguggccaagugcaacgagaagcacgacgaggaguucugcgacaugcugcggcuguucgacuucugcaagcaggcgauccagcgccugaaggccgaggcccagauguccauccagcugaucaacaaggccgucaacgcccucaucaacgaccagcugaucaugaagaaccaccuccgggacaucauggggauccccuacugcaacuacagcaaguacugguaccucaaccacaccacgaccggcaagaccucccugcccaagugcuggcuggugagcaacggcuccuaccucaacgagacccacuucagcgacgacaucgagcagcaggcggacaacaugaucacggagaugcugcagaaggaguacauggagcgccaggggaagacgccccugggccucguggaccuguucgucuucuccaccagcuucuaccugaucuccaucuuccugcaccucgugaagaucccgacccaccggcacaucgugggcaagagcugccccaagccccaccgccugaaccacauggggaucugcuccugcgggcuguacaagcagcccggcgucccggugaaguggaagcggugaggacuagucccuguucccagagcccacuuuuuuuucuuuuuuugaaauaaaauagccugucuuucagaucucaaaggcucuuuucagagccaccaaaaaaaaaaaaaaaaaaaaaaaaaaaaaaaaaaaaaaaaaaaaaaaaaaaaaaaaaaaaaaaaaaaaaaaaaaaaaaaaaaaaaaaaaaaaaaaaaaaaa

SEQ ID NO: 37212 - RNA, 1767 nt, Artificial Sequence
  mRNA product Design a-2 (hSL-A100) comprising derived and/or modified sequence from LASV(G1442-SLE-2011;Clade IV)__AIT17180__GPCmut10 (opt1)
aggagaguccgcucagccagguugcagaagcggcuuagcguguguccuaaucuucucucugcguguagguaggccugugccgcaaacaagcuuaccaugggccagaucgugaccuucuuccaggaggucccccacgugaucgaggaggugaugaacaucguccugaucgcccucagcauccuggccgugcugaaggggcucuacaacguggcgaccugcggccugaucgggcuggucacguuccuccugcugugcggccgcuccugcaccaccacccucuacaaggggguguacgagcugcagacgcuggagcucaacauggagacccugaacaugugcaugccgcugagcugcaccaagaacaacucccaccacuacauccgggugggcaacgagacgggccucgagcugacccugaccaacaccagcaucaucaaccacaaguucugcaaccucuccgacgcccacaagaagaaccuguacgaccacgcccugaugagcaucaucuccacguuccaccucagcauccccaacuucaaccaguacgaggccauguccugcgacuucaacgggggcaagaucagcguccaguacaaccugucccacagcuacgccggggacgcggccaaccacugcggcaccguggccaacggggugcugcagaccuucaugcgcauggccuggggcggcuccuacaucgcgcucgacagcgggcggggcaacugggacugcaucaugaccuccuaccaguaccugaucauccagaacacgaccugggacgaccacugccaguucagccgccccucccccaucggguaccugggccuccugagccagcggacccgcgacgucuacaucucccggcgccugcucggcaccuucacguggacccugagcgacagcgaggggaaggacaccccgggcggguacugccugacccgguggaugcucaucgaggccgagcugaagugcuucggcaacacggccguggccaagugcaacgagaagcacgacgaggaguucugcgacaugcugcgccucuucgacuucugcaagcaggccauccagcggcugaaggcggaggcccagauguccauccagcugaucaacaaggccgugaacgcccucaucaacgaccagcugaucaugaagaaccaccuccgcgacaucauggggauccccuacugcaacuacagcaaguacugguaccugaacaacaccgccaccggcaagaccucccugcccaagugcuggcugaucagcaacggcuccuaccucaacgagacgcacuucagcgacgacaucgagcaggaggcggacaacaugaucaccgagaugcugcagaaggaguacauggagcggcaggggaagacgccccugggccucgucgaccuguucguguucuccaccagcuucuaccugaucuccaucuuccugcaccucgugaagaucccgacccaccgccacaucgucggcaagagcugccccaagccccaccggcugaaccacauggggaucugcuccugcgggcuguacaagcagcccggcgugccggugcgcuggaagcggugaggacuagucccuguucccagagcccacuuuuuuuucuuuuuuugaaauaaaauagccugucuuucagaucucaaaggcucuuuucagagccaccaaaaaaaaaaaaaaaaaaaaaaaaaaaaaaaaaaaaaaaaaaaaaaaaaaaaaaaaaaaaaaaaaaaaaaaaaaaaaaaaaaaaaaaaaaaaaaaaaaaaa

SEQ ID NO: 37213 - RNA, 1767 nt, Artificial Sequence
  mRNA product Design a-2 (hSL-A100) comprising derived and/or modified sequence from LASV(G3010-SLE-2013;Clade IV)__AIT17344__GPCmut10 (opt1)
aggagaguccgcucagccagguugcagaagcggcuuagcguguguccuaaucuucucucugcguguagguaggccugugccgcaaacaagcuuaccaugggccagaucgugaccuucuuccaggaggucccccacgugaucgaggaggugaugaacaucguccugaucgcccucagcauccuggccgugcugaaggggcucuacaacuucgcgaccugcggccugguggggcuggucacguuccuccugcugugcggccgcuccugcaccaccagccucuacaaggggguguacgagcugcagacccuggagcucaacauggagacgcugaacaugugcaugccgcuguccugcaccaagaacaacagccaccacuacaucauggugggcaacgagaccggccucgagcugacgcugaccaacaccuccaucaucaaccacaaguucugcaaccucagcgacgcccacaagaagaaccuguacaaccacgcccugauguccaucaucagcaccuuccaccucuccauccccaacuucaaccaguacgaggccaugagcugcgacuucaacgggggcaagaucuccguccaguacaaccugagccacuccuacgccggggacgcggccagccacugcggcacgguggccaacggggugcugcagaccuucaugcggauggccuggggcggcuccuacaucgcgcucgacagcggguacggcaagugggacugcaucaugaccuccuaccaguaccugaucauccagaacaccacgugggaggaccacugccaguucagccgccccucccccaucggguaccugggccuccugagccagcggacccgcgacaucuacaucagccggcgccugcucggcaccuucaccuggacgcuguccgacagcgaggggaaggacaccccgggcggguacugccugacccgguggaugcucaucgaggccgagcugaagugcuucggcaacaccgccgucgccaagugcaacgagaagcacgacgaggaguucugcgacaugcugcgccucuucgacuucugcaagcaggccauccagcggcugaagacggaggcgcagauguccauccagcugaucaacaaggccgugaacgcccucaucaacgaccagcugaucaugaagaaccaccuccgcgacaucauggggauccccuacugcaacuacagcaaguacugguaccugaaccacaccaccaccggcaagacgucccugcccaagugcuggcuggugagcaacggcuccuaccucaacgagacccacuucagcgacgacaucgagcagcaggccgacaacaugaucaccgagaugcugcagaaggaguacauggagcggcaggggaagacgccccugggccucgucgaccuguucguguucuccaccagcuucuaccugaucuccaucuuccugcaccucgugaagaucccgacccaccgccacaucgucggcaagagcugccccaagccccaccggcugaaccacauggggaucugcuccugcgggcuguacaagcagcccggcgugccggugcgcuggaagcggugaggacuagucccuguucccagagcccacuuuuuuuucuuuuuuugaaauaaaauagccugucuuucagaucucaaaggcucuuuucagagccaccaaaaaaaaaaaaaaaaaaaaaaaaaaaaaaaaaaaaaaaaaaaaaaaaaaaaaaaaaaaaaaaaaaaaaaaaaaaaaaaaaaaaaaaaaaaaaaaaaaaaa

SEQ ID NO: 37214 - RNA, 1767 nt, Artificial Sequence
  mRNA product Design a-2 (hSL-A100) comprising derived and/or modified sequence from LASV(G502-SLE-2009;Clade IV)__AIT17126__GPCmut10 (opt1)
aggagaguccgcucagccagguugcagaagcggcuuagcguguguccuaaucuucucucugcguguagguaggccugugccgcaaacaagcuuaccaugggccagaucgugaccuucuuccaggaggucccccacgugaucgaggaggugaugaacaucguccugaucgcccucagcauccuggccgugcugaaggggcucuacaacuucgcgaccugcggccugguggggcugcucacguuccugcugcucugcggccgcuccugcaccaccgggcuguacaagggcgucuacgagcugcagacccucgagcugaacauggagacgcugaacaugugcaugccgcucagcugcaccaagaacaacucccaccacuacaucauggugggcaacgagaccgggcuggagcugacgcucaccaacaccagcaucaucaaccacaaguucugcaaccuguccgacgcccacaagaagaaccuguacgaccacgcccucaugagcaucaucuccaccuuccaccugagcauccccaacuucaaccaguacgaggccauguccugcgacuucaacggcgggaagaucagcgugcaguacaaccugucccacagcuacgccggcgacgcggccgaccacugcgggacggucgccaacggcgugcuccagaccuucaugcggauggccuggggcggguccuacaucgcgcuggacagcggccgcgggcggugggacugcaucaugaccuccuaccaguaccugaucauccagaacaccacgugggaggaccacugccaguucagccgccccucccccaucggcuaccucggccugcugagccagcggacccgcgacaucuacaucucccggcgccuccuggggaccuucaccuggacgcugagcgacagcgagggcaaggacacccccgggggcuacugccucacccgguggaugcugaucgaggccgagcugaagugcuucgggaacaccgccguggccaagugcaacgagaagcacgacgaggaguucugcgacaugcuccgccuguucgacuucugcaagcaggccauccagcggcugaaggcggaggcccagauguccauccagcucaucaacaaggccgucaacgcccugaucaacgaccagcuggugaugaagaaccaccuccgcgacaucaugggcauccccuacugcaacuacagccgguacugguaccugaaccacacgaccaccggccgcaccucccugcccaagugcuggcucgugagcaacggguccuaccugaacgagacgcacuucagcgacgacaucgagcagcaggccgacaacaugaucaccgagaugcugcagaaggaguacauggagcggcagggcaagaccccgcucgggcuggucgaccuguucguguucuccaccagcuucuaccugaucuccaucuuccuccaccuggugaagaucccgacgcaccgccacaucgucggcaagagcugccccaagccccaccggcugaaccacauggggaucugcuccugcggccucuacaagcagcccggcgugccggugaaguggaagcgcugaggacuagucccuguucccagagcccacuuuuuuuucuuuuuuugaaauaaaauagccugucuuucagaucucaaaggcucuuuucagagccaccaaaaaaaaaaaaaaaaaaaaaaaaaaaaaaaaaaaaaaaaaaaaaaaaaaaaaaaaaaaaaaaaaaaaaaaaaaaaaaaaaaaaaaaaaaaaaaaaaaaaa

SEQ ID NO: 37215 - RNA, 1767 nt, Artificial Sequence
  mRNA product Design a-2 (hSL-A100) comprising derived and/or modified sequence from LASV(G733-SLE-2010;Clade IV)__AIT17154__GPCmut10 (opt1)
aggagaguccgcucagccagguugcagaagcggcuuagcguguguccuaaucuucucucugcguguagguaggccugugccgcaaacaagcuuaccaugggccagaucgugaccuucuuccaggaggucccccacgugaucgaggaggugaugaacaucguccugaucgcccucagcauccuggccgugcugaaggggcucuacaacuucgcgaccugcggcaucguggggcuggucuccuuccugcuccugugcggccgcagcugcacgaccucccuguacaaggggguguacgagcuccagacccuggagcugaacauggagacccucaacaugugcaugccgcugagcugcaccaagaacaacucccaccacuacaucauggugggcaacgagaccggccuggagcucacccugacgaacaccagcaucaucaaccacaaguucugcaaccuguccgacgcccacaagaagaaccucuacgaccacgcccugaugagcaucaucuccaccuuccaccugagcauccccaacuucaaccaguacgaggccauguccugcgacuucaacgggggcaagaucagcguccaguacaaccucucccacagcuacgccggggacgcggccaaccacugcggcaccaucgccaacggggugcugcagacguucaugcggauggccuggggcggcuccuacaucgcgcuggacagcgggcgcgaccggugggacugcaucaugaccuccuaccaguaccucaucauccagaacaccaccugggaggaccacugccaguucagccgccccucccccaucggcuaccuggggcugcucagccagcggacgcgcgacaucuacaucagccggcgccugcugggcaccuucaccuggacccucuccgacagcgagggcaaggacacgcccgggggcuacugccugacccgguggaugcugaucgaggccgagcucaagugcuucgggaacaccgccguggccaagugcaacgagaagcacgacgaggaguucugcgacaugcugcgccuguucgacuucugcaagcaggccauccagcggcucaaggcggaggcccagauguccauccagcugaucaacaaggccgucaacgcccugaucaacgaccagcucaucaugaagaaccaccuccgcgacaucaugggcauccccuacugcaacuacagcaaguacugguaccugaaccacaccacgaccgggaagaccucccugcccaagugcuggcuggugagcaacggcuccuaccugaacgagacccacuucagcgacgacaucgagcagcaggccgacaacaugaucacggagaugcuccagaaggaguacauggagcggcagggcaagaccccgcuggggcugguggaccucuucgucuucuccaccagcuucuaccugaucuccaucuuccugcaccuggugaagaucccgacccaccgccacguggucggcaagagcugccccaagccccaccggcucaaccacauggggaucugcuccugcggccuguacgggcagcccggcgugccggugaaguggaagcgcugaggacuagucccuguucccagagcccacuuuuuuuucuuuuuuugaaauaaaauagccugucuuucagaucucaaaggcucuuuucagagccaccaaaaaaaaaaaaaaaaaaaaaaaaaaaaaaaaaaaaaaaaaaaaaaaaaaaaaaaaaaaaaaaaaaaaaaaaaaaaaaaaaaaaaaaaaaaaaaaaaaaaa

SEQ ID NO: 37216 - RNA, 1767 nt, Artificial Sequence
  mRNA product Design a-2 (hSL-A100) comprising derived and/or modified sequence from MOPV/LASV reassortant(IGS-1;Clade IV)__AFY05576__GPCmut10 (opt1)
aggagaguccgcucagccagguugcagaagcggcuuagcguguguccuaaucuucucucugcguguagguaggccugugccgcaaacaagcuuaccaugggccagaucgugaccuucuuccaggaggucccccacgugaucgaggaggugaugaacaucguccugaucgcccucagcgugcuggccgugcugaaggggcucuacaacuucgcgaccugcggccuggucgggcuggugacguuccuccugcugugcggccgcuccugcaccaccagccucuacaaggggguguacgagcugcagacccuggagcucaacauggagacgcugaacaugugcaugccgcuguccugcaccaagaacaacagccaccacuacaucauggucggcaacgagaccggccucgagcugacgcugaccaacaccuccaucaucaaccacaaguucugcaaccucagcgacgcccacaagaagaaccuguacgaccacgcccugauguccaucaucagcaccuuccaccucuccauccccaacuucaaccaguacgaggccaugagcugcgacuucaacgggggcaagaucuccgugcaguacaaccugagccacuccuacgccggggacgcggccaaccacugcggcacgguggccaacgggguccugcagaccuucaugcggauggccuggggcggcagcuacaucgcgcucgacuccgggcgcggcaacugggacugcaucaugaccagcuaccaguaccugaucauccagaacaccacgugggaggaccacugccaguucucccggcccagccccaucggguaccugggccuccugucccagcgcacccgggacaucuacaucagccgccggcugcucggcaccuucaccuggacgcugagcgacuccgagggggaggacaccccgggcggguacugccugacccgcuggaugcucaucgaggccgagcugaagugcuucggcaacaccgccguggccaagugcaacgagaagcacgacgaggaguucugcgacaugcugcggcuguucgacuucugcaagcaggccauccagcgccugaaggcggaggcccagaugagcauccagcugaucaacaaggccgugaacgcccucaucaacgaccagcugaucaugaagaaccaccuccgggacaucauggggauccccuacugcaacuacuccaaguacugguaccucaaccacacgaccaccggccgcaccagccugcccaagugcuggcuggucuccaacggcagcuaccucaacgagacgcacuucuccgacgacaucgagcagcaggccgacaacaugaucaccgagaugcugcagaaggaguacauggagcggcaggggaagacgccccugggccucguggaccuguucguguucagcaccuccuucuaccugaucagcaucuuccugcaccucgucaagaucccgacccaccgccacaucguggggaaguccugccccaagccccaccggcugaaccacaugggcaucugcagcugcgggcuguacaagcagcccggcgugccggucaaguggaagcgcugaggacuagucccuguucccagagcccacuuuuuuuucuuuuuuugaaauaaaauagccugucuuucagaucucaaaggcucuuuucagagccaccaaaaaaaaaaaaaaaaaaaaaaaaaaaaaaaaaaaaaaaaaaaaaaaaaaaaaaaaaaaaaaaaaaaaaaaaaaaaaaaaaaaaaaaaaaaaaaaaaaaaa

SEQ ID NO: 37217 - RNA, 1767 nt, Artificial Sequence
  mRNA product Design a-2 (hSL-A100) comprising derived and/or modified sequence from LASV(LM765-SLE-2012;Clade IV)__AIT17814__GPCmut10 (opt1)
aggagaguccgcucagccagguugcagaagcggcuuagcguguguccuaaucuucucucugcguguagguaggccugugccgcaaacaagcuuaccaugggccagaucgugaccuucuuccaggaggucccccacgugaucgaggaggugaugaacaucguccugaucgcccucagcauccuggccgugcugaaggggcucuacaacuucgcgaccugcggccugguggggcuggucacguuccuccugcugugcggccgcuccugcaccaccagccucuacaaggggguguacgagcugcagacccuggagcucaacauggagacgcugaacaugugcaugccgcuguccugcaccaagaacaacagccaccacuacaucauggugggcaacgagaccggccucgagcugacgcugaccaacaccuccaucaucgaccacaaguucugcaaccucagcgacgcccaccggaagaaccuguacgaccacgcccugauguccaucaucagcaccuuccaccucuccauccccaacuucaaccaguacgaggccaugagcugcgacuucaacgggggcaagaucuccguccaguacaaccugagccacuccuacgccaaggacgcggccgaccacugcgggacgguggccaacggcgugcugcagaccuucaugcgcauggccuggggcgggagcuacaucgcgcucgacuccggccgggggcgcugggacugcaucaugaccagcuaccaguaccugaucauccagaacaccacgugggaggaccacugccaguucucccggcccagccccaucggcuaccuggggcuccugucccagcgcacccgggacaucuacaucagccgccggcugcucggcaccuucaccuggacgcugagcgacuccgagggcaaggacacccccgggggcuacugccugacccgcuggaugcucaucgaggccgagcugaagugcuucgggaacaccgccgucgccaagugcaacgagaagcacgacgaggaguucugcgacaugcugcggcuguucgacuucugcaagcaggccauccagcgccugaaggcggaggcccagaugagcauccagcugaucaacaaggccgugaacgcccucaucaacgaccagcugaucaugaagaaccaccuccgggacaucaugggcauccccuacugcaacuacuccaaguacugguaccucaaccacacgaccaccgggaagaccagccugcccaagugcuggcugguguccaacggcagcuaccucaacgagacgcacuucuccgacgacaucgagcagcaggccgacaacaugaucaccgagaugcugcagaaggaguacauggagcgccagggcaagaccccgcuggggcucgucgaccuguucguguucagcaccuccuucuaccugaucagcaucuuccugcaccucgugaagaucccgacgcaccggcacaucgucggcaagcccugccccaagccccaccgccugaaccacauggggaucugcuccugcggccuguacaagcagccgggggugcccgugaaguggaagcggugaggacuagucccuguucccagagcccacuuuuuuuucuuuuuuugaaauaaaauagccugucuuucagaucucaaaggcucuuuucagagccaccaaaaaaaaaaaaaaaaaaaaaaaaaaaaaaaaaaaaaaaaaaaaaaaaaaaaaaaaaaaaaaaaaaaaaaaaaaaaaaaaaaaaaaaaaaaaaaaaaaaaa

SEQ ID NO: 37218 - RNA, 1767 nt, Artificial Sequence
  mRNA product Design a-2 (hSL-A100) comprising derived and/or modified sequence from LASV(LM776-SLE-2012;Clade IV)__AIT17824__GPCmut10 (opt1)
aggagaguccgcucagccagguugcagaagcggcuuagcguguguccuaaucuucucucugcguguagguaggccugugccgcaaacaagcuuaccaugggccagaucgugaccuucuuccaggaggucccccacgugaucgaggaggugaugaacaucguccugaucgcccucagcauccuggccgugcugaaggggcucuacaacuucgcgaccugcggccugguggggcuggucacguuccuccugcugugcggccgcuccugcaccaccagcguguacaaggggguguacgagcuccagacccuggagcugaacauggagacgcucaacaugugcaugccgcuguccugcaccaagaacaacagccaccacuacaucauggucggcaacgagaccggccuggagcucacgcugaccaacaccuccaucaucaaccacaaguucugcaaccugagcgacgcccacaagaagaaccucuacgaccacgcccugauguccaucaucagcaccuuccaccuguccauccccaacuucaaccaguacgaggccaugagcugcgacuucaacgggggcaagaucuccgugcaguacaaccucagccacuccuacgccggggacgcggccaaccacugcggcacgguggccaacgggguccugcagaccuucaugcggauggccuggggcggcagcuacaucgcgcuggacuccgggcacggcaagugggacugcaucaugaccagcuaccaguaccucaucauccagaacaccacgugggaggaccacugccaguucucccgccccagccccaucggguaccugggccugcucucccagcggacccgcgacaucuacaucagccggcgccugcugggcaccuucaccuggacgcucagcgacuccgaggggaaggacaccccgggcggguacugccugacccgguggaugcugaucgaggccgagcucaagugcuucggcaacaccgccguggccaagugcaacgagaagcacgacgaggaguucugcgacaugcugcgccuguucgacuucugcaagcaggccauccagcggcucaaggcggaggcccagaugagcauccagcugaucaacaaggccgugaacgcccugaucaacgaccagcucaucaugaagaaccaccuccgcgacaucauggggauccccuacugcaacuacuccaaguacugguaccugaaccacacgaccaccggcaagaccagccugcccaagugcuggcuggucuccaacggcagcuaccugaacgagacgcacuucuccgacgacaucgagcagcaggccgacaacaugaucaccgagaugcuccagaaggaguacauggagcggcaggggaagacgccccugggccugguggaccucuucguguucagcaccuccuucuaccugaucagcaucuuccugcaccuggucaagaucccgacccaccgccacaucguggggaaguccugccccaagccccaccggcucaaccacaugggcaucugcagcugcgggcuguacaagcagcccggcgugccgguccgcuggaagcggugaggacuagucccuguucccagagcccacuuuuuuuucuuuuuuugaaauaaaauagccugucuuucagaucucaaaggcucuuuucagagccaccaaaaaaaaaaaaaaaaaaaaaaaaaaaaaaaaaaaaaaaaaaaaaaaaaaaaaaaaaaaaaaaaaaaaaaaaaaaaaaaaaaaaaaaaaaaaaaaaaaaaa

SEQ ID NO: 37219 - RNA, 1767 nt, Artificial Sequence
  mRNA product Design a-2 (hSL-A100) comprising derived and/or modified sequence from LASV(Mad39;Clade IV)__ANH09722__GPCmut10 (opt1)
aggagaguccgcucagccagguugcagaagcggcuuagcguguguccuaaucuucucucugcguguagguaggccugugccgcaaacaagcuuaccaugggccagaucgugaccuucuuccaggaggucccccacgugaucgaggaggugaugaacaucguccugaucgcccucagcauccuggccgugcugaaggggcucuacaacguggcgaccugcggccugaucgggcuggucacguuccuccugcugugcggccgcuccugcaccaccacccucuacaaggggguguacgagcugcaggcccuggagcucaacauggagacgcugaacaugugcaugccgcugagcugcaccaagaacaacucccaccacuacauccgggugggcaacgagaccggccucgagcugacgcugaccaacaccagccucaucaaccacaaguucugcaaccuguccgacgcccacaagaagaaccuguacgaccacgcccucaugagcaucaucuccaccuuccaccugagcauccccaacuucaaccaguacgaggccauguccugcgacuucaacgacgggaagaucagcguccaguacaaccugucccacacguacgcgggcgacaccgccaaccacugcgggaccguggccaacggcgugcuccagaccuucaugcgcauggccuggggcgggagcuacaucgcgcuggacuccggccgcgggggcugggacugcaucaugacgagcuaccaguaccugaucauccagaacaccaccugggaggaccacugccaguucucccggcccagccccaucggguaccucggccugcugucccagcggacccgcgacaucuacaucagccggcgccuccugggcacguucaccuggacccuguccgacagcgaggggaaggacaccccgggcggguacugccucacgcgguggaugcugaucgaggccgagcugaagugcuucggcaacaccgccgucgccaagugcaacgagaagcacgacgaggaguucugcgacaugcuccgccuguucgacuucugcaagcaggccauccagcggcugaaggcggaggcccagaugagcauccagcucaucaacaaggccgugaacgcccugaucaacgaccagcugaucaugaagaaccaccuccgcgacaucauggggauccccuacugcaacuacuccaaguacugguaccugaaccacaccgugaccggcaagacgagccugcccaagugcuggcucgucuccaacggcagcuaccugaacgagacccacuucuccgacgacaucgagcagcaggccgacaacaugaucaccgagaugcugcagaaggaguacauggagcggcaggggaagacgccccucggccugguggaccuguucguguucagcaccuccuucuaccugaucagcaucuuccuccaccuggucaagaucccgacccaccgccacgugguggggaagcccugccccaagccccaccggcugaaccacaugggcaucugcuccugcggguucuacaagcagccgggcguccccgugcgcuggaagcggugaggacuagucccuguucccagagcccacuuuuuuuucuuuuuuugaaauaaaauagccugucuuucagaucucaaaggcucuuuucagagccaccaaaaaaaaaaaaaaaaaaaaaaaaaaaaaaaaaaaaaaaaaaaaaaaaaaaaaaaaaaaaaaaaaaaaaaaaaaaaaaaaaaaaaaaaaaaaaaaaaaaaa

SEQ ID NO: 37220 - RNA, 1767 nt, Artificial Sequence
  mRNA product Design a-2 (hSL-A100) comprising derived and/or modified sequence from LASV(Z0947-SLE-2011;Clade IV)__AIT17840__GPCmut10 (opt1)
aggagaguccgcucagccagguugcagaagcggcuuagcguguguccuaaucuucucucugcguguagguaggccugugccgcaaacaagcuuaccaugggccagaucgugaccuucuuccaggaggucccccacgugaucgaggaggugaugaacaucguccugaucgcccucagcauccuggccgugcugaaggggcucuacaacuucgcgaccugcggccugguggggcuggucacguuccuccugcugugcggccgcuccugcaccaucagccucuacaaggggguguacgagcugcagacccuggagcucaacauggagacccugaacaugugcaugccgcuguccugcaccaagaacaacagccaccacuacaucauggugggcaacgagaccggccucgagcugacccugacgaacaccuccaucaucaaccacaaguucugcaaccucagcgacgcccacaagaagaaccuguacgaccacgcccugauguccaucaucagcaccuuccaccucuccauccccaacuucaaccaguacgaggccaugagcugcgacuucaacgggggcaagaucuccguccaguacaaccugagccacuccuacgccggggacgcggccaaccacugcggcaccguggccaacggggugcugcagacguucaugcggauggccuggggcggcagcuacaucgcgcucgacuccgggcgcgaccggugggacugcaucaugaccagcuaccaguaccugaucauccagaacaccaccugggaggaccacugccaguucucccgccccagccccaucggcuaccuggggcuccugucccagcggacgcgcgacaucuacaucagccggcgccugcucggcaccuucaccuggacccugagcgacuccgagggcaaggacacgcccgggggcuacugccugacccgguggaugcucaucgaggccgagcugaagugcuucgggaacaccgccgucgccaagugcaacgagaagcacgacgaggaguucugcgacaugcugcgccucuucgacuucugcaagcaggccauccagcggcugaaggcggaggcccagaugagcauccagcugaucaacaaggccgugaacgcccucaucaacgaccagcugaucaugaagaaccaccuccgcgacaucaugggcauccccuacugcaacuacuccaaguacugguaccugaaccacaccacgaccgggaagaccagccugcccaagugcuggcugguguccaacggcagcuaccucaacgagacccacuucuccgacgacaucgagcagcaggccgacaacaugaucacggagaugcugcagaaggaguacauggagcggcagggcaagaccccgcuggggcucgucgaccuguucguguucagcaccuccuucuaccugaucagcaucuuccugcaccucgugaagaucccgacccaccgccacaucgucggcaagcccugccccaagccccaccggcugaaccacauggggaucugcuccugcggccuguacaagcagccgggggugcccgugaaguggaagcgcugaggacuagucccuguucccagagcccacuuuuuuuucuuuuuuugaaauaaaauagccugucuuucagaucucaaaggcucuuuucagagccaccaaaaaaaaaaaaaaaaaaaaaaaaaaaaaaaaaaaaaaaaaaaaaaaaaaaaaaaaaaaaaaaaaaaaaaaaaaaaaaaaaaaaaaaaaaaaaaaaaaaaa

SEQ ID NO: 37221 - RNA, 1767 nt, Artificial Sequence
  mRNA product Design a-2 (hSL-A100) comprising derived and/or modified sequence from LASV(Josiah;Clade IV)__NP_694870__GPCmut10 (opt1)
aggagaguccgcucagccagguugcagaagcggcuuagcguguguccuaaucuucucucugcguguagguaggccugugccgcaaacaagcuuaccaugggccagaucgugaccuucuuccaggaggucccccacgugaucgaggaggugaugaacaucguccugaucgcccucagcgugcuggccgugcugaaggggcucuacaacuucgcgaccugcggccuggucgggcuggugaccuuccuccugcugugcggccgcuccugcaccaccagccucuacaaggggguguacgagcugcagacccuggagcucaacauggagacgcugaacaugugcaugccgcuguccugcaccaagaacaacagccaccacuacaucauggucggcaacgagaccggccucgagcugacccugacgaacaccuccaucaucaaccacaaguucugcaaccucagcgacgcccacaagaagaaccuguacgaccacgcccugauguccaucaucagcaccuuccaccucuccauccccaacuucaaccaguacgaggccaugagcugcgacuucaacgggggcaagaucuccgugcaguacaaccugagccacuccuacgccggggacgcggccaaccacugcggcaccguggccaacgggguccugcagacguucaugcggauggccuggggcggcagcuacaucgcgcucgacuccgggcgcggcaacugggacugcaucaugaccagcuaccaguaccugaucauccagaacaccaccugggaggaccacugccaguucucccggcccagccccaucggguaccugggccuccugucccagcgcacgcgggacaucuacaucagccgccggcugcucggcaccuucaccuggacccugagcgacuccgaggggaaggacacgccgggcggguacugccugacccgcuggaugcucaucgaggccgagcugaagugcuucggcaacaccgccguggccaagugcaacgagaagcacgacgaggaguucugcgacaugcugcggcuguucgacuucugcaagcaggccauccagcgccugaaggcggaggcccagaugagcauccagcugaucaacaaggccgugaacgcccucaucaacgaccagcugaucaugaagaaccaccuccgggacaucauggggauccccuacugcaacuacuccaaguacugguaccucaaccacaccacgaccggccgcaccagccugcccaagugcuggcuggucuccaacggcagcuaccucaacgagacccacuucuccgacgacaucgagcagcaggccgacaacaugaucacggagaugcugcagaaggaguacauggagcggcaggggaagacgccccugggccugguggaccucuucguguucagcaccuccuucuaccugaucagcaucuuccugcaccucgucaagaucccgacccaccgccacaucguggggaaguccugccccaagccccaccggcugaaccacaugggcaucugcagcugcgggcuguacaagcagcccggcgugccggucaaguggaagcgcugaggacuagucccuguucccagagcccacuuuuuuuucuuuuuuugaaauaaaauagccugucuuucagaucucaaaggcucuuuucagagccaccaaaaaaaaaaaaaaaaaaaaaaaaaaaaaaaaaaaaaaaaaaaaaaaaaaaaaaaaaaaaaaaaaaaaaaaaaaaaaaaaaaaaaaaaaaaaaaaaaaaaa

SEQ ID NO: 37222 - RNA, 1764 nt, Artificial Sequence
  mRNA product Design a-2 (hSL-A100) comprising derived and/or modified sequence from LASV(LP;Clade I)__AAF86701__GPCmut10 (opt1)
aggagaguccgcucagccagguugcagaagcggcuuagcguguguccuaaucuucucucugcguguagguaggccugugccgcaaacaagcuuaccaugggccagaucaucaccuucuuccaggaggugccccacgucaucgaggaggugaugaacaucgugcugaucgcccucagccugcuggccauccucaaggggcuguacaacaucgcgaccugcggcaucaucgggcuggucgccuuccucuuccugugcggcaaguccugcagccugacgcucaagggcggguacgagcugcagacccuggagcucaacauggagacccugaacaugugcaugccgcuguccugcaccaagaacagcucccaccacuacauccgcgugggcaacgagacggggcucgagcugacccugaccaacaccagcaucaucaaccacaaguucugcaaccucuccgacgcccacaagaagaaccuguacgaccacgcccugaugagcaucaucuccacguuccaccucagcauccccaacuucaaccaguacgaggccauguccugcgacuucaacggcgggaagaucagcgugcaguacaaccugucccacagcuacgcgggcgacgccgccgagcacugcgggaccgucgccaacggcgugcugcagaccuucaugcggauggcguggggcgggcgcuacaucgcccucgacuccggcaaggggaacugggacugcaucaugaccagcuaccaguaccugaucauccagaacacgaccugggaggaccacugccaguucucccggcccagccccaucggcuaccugggccuccugucccagcgcacccgggacaucuacaucagccgccggcugcucgggaccuucacguggacccugagcgacuccgagggcaacgagacccccgggggcuacugccugacccgcuggaugcucaucgaggccgagcugaagugcuucgggaacacggccguggccaagugcaacgagaagcacgacgaggaguucugcgacaugcugcggcuguucgacuucugcaagcaggcgauccgccggcugaaggccgaggcccagaugagcauccagcugaucaacaaggccgucaacgcccucaucaacgaccagcugaucaugaagaaccaccuccgcgacaucaugggcauccccuacugcaacuacuccaaguacugguaccucaaccacaccagcuccggccggaccagccugcccaagugcuggcugaucuccaacgggagcuaccucaacgagacccaguucuccgacgacaucgagcagcaggcggacaacaugaucacggagaugcugcagaaggaguacaucgagcgccagggcaagaccccgcuggggcugguggacaucuucaucuucagcaccuccuucuaccucaucagcaucuuccugcaccugaucaagaucccgacccaccggcacaucgugggcaagcccugccccaagccccaccgccucaaccacaugggggucugcuccugcggccuguacaagcacccgggcgugcccacgaaguggaagcggugaggacuagucccuguucccagagcccacuuuuuuuucuuuuuuugaaauaaaauagccugucuuucagaucucaaaggcucuuuucagagccaccaaaaaaaaaaaaaaaaaaaaaaaaaaaaaaaaaaaaaaaaaaaaaaaaaaaaaaaaaaaaaaaaaaaaaaaaaaaaaaaaaaaaaaaaaaaaaaaaaaaaa

SEQ ID NO: 37223 - RNA, 1764 nt, Artificial Sequence
  mRNA product Design a-2 (hSL-A100) comprising derived and/or modified sequence from LASV(803213;Clade II)__AAF86703__GPCmut10 (opt1)
aggagaguccgcucagccagguugcagaagcggcuuagcguguguccuaaucuucucucugcguguagguaggccugugccgcaaacaagcuuaccaugggccagaucaucaccuucuuccaggaggugccccacgucaucgaggaggugaugaacaucgugcugaucgcccucagccugcuggccauccucaaggggaucuacaacgucgcgaccugcggccuguucgggcugaucuccuuccuccugcugugcggccgcagcugcuccgugacguacaaggggguguacgagcuccagacccuggagcugaacauggccaaccucaacaugugcaugccgcugagcugcaccaagaacaacucccaccacuacaucauggucggcaacgagaccggccuggagcucacgcugaccaacaccagcaucaucaaccacaaguucugcaaccuguccgacgcccacaagaagaaccucuacgaccacgcccugaugagcaucaucuccaccuuccaccugagcauccccaacuucaaccaguacgaggccauguccugcgacuucaacgggggcaagaucagcgugcaguacaaccucucccacagcuucgcgguggacgccgccaaccacugcgggacgaucgccaacggcguccugcagaccuucaugcggauggcguggggcggguccuacaucgcccuggacagcggcaaggggaacugggacugcaucaugaccuccuaccaguaccucaucauccagaacaccacgugggaggaccacugccaguucagccgccccucccccaucggcuaccuggggcugcucagccagcggacccgcgacaucuacaucagccggcgccugcugggcaccuucaccuggacgcucuccgacagcgagggcaacgaggcccccgggggcuacugccugacccgguggaugcugaucgaggccgagcucaagugcuucgggaacaccgccguggcgaagugcaacgagaagcacgacgaggaguucugcgacaugcugcgccuguucgacuucugcaagcaggccaucaagcggcucaagaccgaggcccagauguccauccagcugaucaacaaggccgugaacgcccugaucaacgaccagcucaucaugaagaaccaccuccgcgacaucaugggcauccccuacugcaacuacagccgguacugguaccugaaccacacggucaccgggaagaccucccugccccgcugcuggcuggugagcaacggcuccuaccugaacgagacccacuucagcgacgacaucgagcagcaggcggacaacaugaucacggagaugcuccagaaggaguacauggaccggcagggcaagaccccgcuggggcugguggaccuguucgucuucuccaccagcuucuaccucaucuccaucuuccugcaccuggugaagaucccgacccaccgccacaucgugggcaagcccugccccaagccccaccggcucaaccacauggggaucugcagcugcggccuguacaagcacccggggguccccgugaaguggaagcgcugaggacuagucccuguucccagagcccacuuuuuuuucuuuuuuugaaauaaaauagccugucuuucagaucucaaaggcucuuuucagagccaccaaaaaaaaaaaaaaaaaaaaaaaaaaaaaaaaaaaaaaaaaaaaaaaaaaaaaaaaaaaaaaaaaaaaaaaaaaaaaaaaaaaaaaaaaaaaaaaaaaaaa

SEQ ID NO: 37224 - RNA, 1764 nt, Artificial Sequence
  mRNA product Design a-2 (hSL-A100) comprising derived and/or modified sequence from LASV(GA391;Clade III)__CAA36645__GPCmut10 (opt1)
aggagaguccgcucagccagguugcagaagcggcuuagcguguguccuaaucuucucucugcguguagguaggccugugccgcaaacaagcuuaccaugggccagaucgugaccuucuuccaggaggucccccacgugaucgaggaggugaugaacaucguccugaucgcccucagcauccuggccauccugaaggggcucuacaacguggcgaccugcggccugaucgggcuggugaccuuccuccugcuguccggccgcagcugcucccucaucuacaaggggaccuacgagcugcagacccuggagcucaacauggagacccugaacaugugcaugccgcugagcugcacgaagaacaacucccaccacuacauccgggucggcaacgagaccggccucgagcugacccugaccaacacgagcauccucaaccacaaguucugcaaccuguccgacgcccacaagcgcaaccuguacgaccacagccucauguccaucaucagcaccuuccaccuguccauccccaacuucaaccaguacgaggccaugagcugcgacuucaacgggggcaagaucaccgugcaguacaaccugucccacagcuucgccguggacgccgcggggcacugcggcacccucgccaacgggguccugcagacguucaugcggauggccuggggcggcuccuacaucgcccuggacagcgggcgcggcaacugggacugcaucaugaccuccuaccaguaccucaucauccagaacaccaccugggacgaccacugccaguucagccggcccucccccaucggguaccugggccugcucagccagcgcacgcgggacaucuacaucagccgccggcugcugggcaccuucaccuggacccucuccgacagcgaggggaacgagacgccgggcggguacugccugacccgcuggaugcugaucgaggcggagcucaagugcuucggcaacaccgccguggccaagugcaacgagaagcacgacgaggaguucugcgacaugcugcggcuguucgacuucugcaagcaggccauccgccggcucaagaccgaggcccagauguccauccagcugaucaacaaggcggugaacgcccugaucaacgaccagcucaucaugaagaaccaccuccgcgacaucauggggauccccuacugcaacuacagccgguacugguaccugaaccacacguccaccggcaagaccagccugccccgcugcuggcugaucuccaacggcagcuaccugaacgagaccaaguucuccgacgacaucgagcagcaggccgacaacaugaucacggagaugcugcagaaggaguacaucgaccggcaggggaagacgccccucggccuggucgaccuguucguguucagcaccuccuucuaccucaucagcaucuuccugcaccuggugaagaucccgacccaccgccacaucgucgggaagcccugccccaagccccaccggcucaaccacaugggcaucugcuccugcgggcuguacaagcagccgggcgugcccgugcgcuggaagcggugaggacuagucccuguucccagagcccacuuuuuuuucuuuuuuugaaauaaaauagccugucuuucagaucucaaaggcucuuuucagagccaccaaaaaaaaaaaaaaaaaaaaaaaaaaaaaaaaaaaaaaaaaaaaaaaaaaaaaaaaaaaaaaaaaaaaaaaaaaaaaaaaaaaaaaaaaaaaaaaaaaaaa

SEQ ID NO: 37225 - RNA, 1767 nt, Artificial Sequence
  mRNA product Design a-2 (hSL-A100) comprising derived and/or modified sequence from LASV(AV;Clade V)__CCA30314__GPCmut10 (opt1)
aggagaguccgcucagccagguugcagaagcggcuuagcguguguccuaaucuucucucugcguguagguaggccugugccgcaaacaagcuuaccaugggccagaucgugaccuucuuccaggaggucccccacgugaucgaggaggugaugaacaucguccugaucgcccucagcauccuggccgugcugaaggggcucuacaacaucgcgaccugcggccugaucgggcugaucacguuccuccugcugugcggccgcuccugcagcuccaaccucuacaaggggguguacgagcugcagagccuggaccucaacauggagacccugaacaugugcaugccgcuguccugcaccaagaacaacagccaccacuacauccgggucggcaacgacaccggccucgagcugacgcugaccaacaccuccauccucaaccacaaguucugcaaccugagcgacgcccacaagaaggaccuguacgaccacgcccucauguccaucaucagcaccuuccaccuguccauccccaacuucaaccaguacgaggccaugagcugcgacuucaacgggggcaagaucuccgugcaguacaaccugagccacuccuacgccaucgacgcggccaaccacugcgggacgguggccaacggcauccuccagaccuucaugcgcauggccuggggcgggagcuacaucgcgcuggacuccggccgggggaacugggacugcaucaugaccagcuaccaguaccugaucauccagaacaccacgugggagaaccacugccaguucucccgccccagccccaucggcuaccucgggcugcugagccagcggacccgcgacaucuacaucucccggcgccuccugggcaccuucaccuggacgcugagcgacuccgagggcaacgccacccccgggggcuacugccucacccgguggaugcugaucgaggccgagcugaagugcuucgggaacaccgccgucgccaagugcaacgagaagcacgacgaggaguucugcgacaugcuccgccuguucgacuucugcaagcaggcgaucagccggcugaaguccgaggcccagaugagcauccagcucaucaacaaggccgugaacgcccugaucaacgaccagcugaucaugaagaaccaccuccgcgacaucaugggcauccccuacugcaacuacuccaaguacugguaccugaaccacacgaucaccgggaagaccagccugcccaagugcuggcucguguccaacggcagcuaccugaacgagacccacuucuccgacgacaucgagcagcaggccgacaacaugaucacggagaugcugcagaaggaguacauggagcggcagggcaagaccccgcuggggcucgucgaccuguucguguucagcaccuccuucuaccugaucagcaucuuccuccgccuggugaagaucccgacccaccggcacaucgucggcaagcccugccccaagccccaccgccugaaccacauggggaucugcuccugcggccucuacaagcagccgggggugcccgugcgguggaagcgcugaggacuagucccuguucccagagcccacuuuuuuuucuuuuuuugaaauaaaauagccugucuuucagaucucaaaggcucuuuucagagccaccaaaaaaaaaaaaaaaaaaaaaaaaaaaaaaaaaaaaaaaaaaaaaaaaaaaaaaaaaaaaaaaaaaaaaaaaaaaaaaaaaaaaaaaaaaaaaaaaaaaaa

SEQ ID NO: 37226 - RNA, 1764 nt, Artificial Sequence
  mRNA product Design a-2 (hSL-A100) comprising derived and/or modified sequence from LASV(Togo/2016/7082;Clade VI)__AMR44577__GPCmut10 (opt1)
aggagaguccgcucagccagguugcagaagcggcuuagcguguguccuaaucuucucucugcguguagguaggccugugccgcaaacaagcuuaccaugggccagaucaucaccuucuuccaggaggugccccacgucaucgaggaggugaugaacaucgugcugaucgcccucagccugcuggccauccucaagggggucuacaacguggcgaccugcggcaucaucgggcuggugacguuccuguuccucugcggccgcuccugcagccugaucuacaagggguccuacgagcugcagacccucgagcugaacauggagacccugaacaugugcaugccgcucagcugcaccaagaacuccagccaccacuacauccgggucggcaacgagacgggccuggagcugacccucaccaacaccuccaucaucaaccacaaguucugcaaccugagcgacgcccacaagcgcaaccuguacgaccacgcccucauguccauccugagcacguuccaccuguccauccccaacuucaaccaguacgaggccaugagcugcgacuucaacgggggcaagaucuccgugcaguacaaccucagccacgccuacgcgguggacgccgccgagcacugcgggaccgucgccaacggcgugcugcagaccuucaugcggauggcguggggcggguccuacaucgcccuggacagcggccgcgggaacugggacugcaucaugaccuccuaccaguaccucaucauccagaacacgaccugggaggaccacugccaguucagccggcccucccccaucggcuaccuggggcugcucagccagcgcacccgggacaucuacaucagccgccggcugcugggcaccuucacguggacccucuccgacagcgagggcaacgagacccccgggggcuacugccugacccgcuggaugcugaucgaggccgagcucaagugcuucgggaacacggccguggccaagugcaacgagaagcacgacgaggaguucugcgacaugcugcggcuguucgacuucugcaagcaggcgauccagcgccucaaguccgaggcccagaugagcauccagcugaucaacaaggccgucaacgcccugaucaacgaccagcucaucaugaagaaccaccuccgggacaugaugggcauccccuacugcaacuacuccaaguacugguaccugaaccacaccagcuccgggcgcaccagccugcccaagugcuggcugguguccaacggcagcuaccugaacgagacccacuucuccgacgacaucgagcagcaggccgacaacaugaucacggagaugcuccagaaggaguacaucgaccggcagggcaagaccccgcuggggcugguggaccuguucgucuucagcaccuccuucuaccucaucagcaucuuccugcaccugaucaagaucccgacccaccgccacaucgugggcaagcccugccccaagccccaccggcucaaccacauggggaucugcuccugcggccuguacaagcagccgggggugcccacgcgcuggaagcggugaggacuagucccuguucccagagcccacuuuuuuuucuuuuuuugaaauaaaauagccugucuuucagaucucaaaggcucuuuucagagccaccaaaaaaaaaaaaaaaaaaaaaaaaaaaaaaaaaaaaaaaaaaaaaaaaaaaaaaaaaaaaaaaaaaaaaaaaaaaaaaaaaaaaaaaaaaaaaaaaaaaaa

SEQ ID NO: 37227 - RNA, 1764 nt, Artificial Sequence
  mRNA product Design a-2 (hSL-A100) comprising derived and/or modified sequence from LASV(KAK-428;Clade n.d. (VII))__ANH09740__GPCmut10 (opt1)
aggagaguccgcucagccagguugcagaagcggcuuagcguguguccuaaucuucucucugcguguagguaggccugugccgcaaacaagcuuaccaugggccagaucgugaccuucuuccaggaggucccccacgugaucgaggaggugaugaacaucguccugaucgcccucagccugcuggccauccucaaggggcuguacaacuucgcgaccugcggcgugaucgggcugaucacguuccuccugcugugcggccgcuccugcagcgccaccuacaaggggcaguacgagcuccagacccuggagcugaacauggagucccucaacaugugcaugccgcugagcugcaccaagaacaacucccaccacuacauccgggccggcaacaacacgggccuggagcucacccugaccaacaccagcaucaucucccacaaguucugcaaccugagcgacgcccacaagaagaaccucuacgaccacacgcugauguccaucaucaccaccuuccaccugagcauccccaacuucaaccaguacgaggccauguccugcgacuucaacgggggcaagaucagcauccaguacaaccucucccacagcuacgcgggggacgccgcccagcacugcggcaccguggccaacgggguccugcagacguucaugcgcauggcguggggcggcuccuaccuggcccucgacagcgggcggcgcggcugggacugcaucaucuccagcuaccaguaccugaucauccagaacaccaccugggacgaccacugccaguucucccggcccagccccaucggguaccugggcuucgugagccagaagacccgcgacaucuacaucucccggcgccuccugggcacguucaccuggacccugagcgacuccgaggggcacgacaugccgggcggguacugccucacccgguggaugcugaucgaggccgaccugaagugcuucggcaacacggccguggccaagugcaacgagaagcacgacgaggaguucugcgacauguggcgccucuucgacuucugcaagcaggcgauccagcggcugaaggccgaggcccagaugaacauccagcugaucaacaaggccgucaacgcccucaucaacgaccagcugaugaugaagaaccaccuccgcgacaucauggggauccccuacugcaacuacagcaaguucugguaccugaacaacaccaccaccggccggacgucccugccccgcugcuggcugaucagcaacggcuccuaccucaacgagacccacuucagcgacgacaucgagcagcaggcggacaacaugaucaccgagaugcugcagaaggaguacauggaccggcaggggaagacgccccugggccucguggaccuguucguguucuccaccagcuucuaccugaucaccaucuuccugcaccucgucaagaucccgacccaccgccacaucguggggaagcccugccccaagccccaccggcugaaccacaugggcaucugcuccugcgggcuguacaagcagccgggcgugcccguccgcuggaagcggugaggacuagucccuguucccagagcccacuuuuuuuucuuuuuuugaaauaaaauagccugucuuucagaucucaaaggcucuuuucagagccaccaaaaaaaaaaaaaaaaaaaaaaaaaaaaaaaaaaaaaaaaaaaaaaaaaaaaaaaaaaaaaaaaaaaaaaaaaaaaaaaaaaaaaaaaaaaaaaaaaaaaa

SEQ ID NO: 37228 - RNA, 1764 nt, Artificial Sequence; identical to SEQ ID NO: 37222
  mRNA product Design a-2 (hSL-A100) comprising derived and/or modified sequence from LASV(Pinneo-NIG-1969;Clade I)__AIT17836__GPCmut10 (opt1)

SEQ ID NO: 37229 - RNA, 1764 nt, Artificial Sequence
  mRNA product Design a-2 (hSL-A100) comprising derived and/or modified sequence from LASV(ISTH0009-NIG-2011;Clade II)__AIT17404__GPCmut10 (opt1)
aggagaguccgcucagccagguugcagaagcggcuuagcguguguccuaaucuucucucugcguguagguaggccugugccgcaaacaagcuuaccaugggccagaucaucaccuucuuccaggaggugccccacgucaucgaggaggugaugaacaucgugcugaucgcccucagccugcuggccauccucaaggggaucuacaacgucgcgaccugcggccuguucgggcugguguccuuccuccugcugugcggccgcagcugcuccacgaccuacaaggggguguacgagcuccagacccuggagcuggacauggccagccucaacaugugcaugccgcuguccugcaccaagaacaacagccaccacuacaucauggucggcaacgagacgggccuggagcucacccugaccaacaccuccaucaucaaccacaaguucugcaaccugagcgacgcccacaagaagaaccucuacgaccacgcccugauguccaucaucagcacguuccaccuguccauccccaacuucaaccaguacgaggccaugagcugcgacuucaacgggggcaagaucuccgugcaguacaaccucagccacgcguacgccguggacgccgccaaccacugcgggaccaucgcgaacggcguccugcagaccuucaugcggauggccuggggcggguccuacaucgcccuggacagcggcaagggguccugggacugcaucaugaccagcuaccaguaccucaucauccagaacacgaccugggaggaccacugccaguucucccgccccagccccaucggcuaccuggggcugcucagccagcggacccgcgacaucuacaucucccggcgccugcugggcaccuucacguggacccucagcgacuccgagggcaacgagacccccgggggcuacugccugacccgguggaugcugaucgaggccgagcucaagugcuucgggaacacggccguggcgaagugcaacgagaagcacgacgaggaguucugcgacaugcugcgccuguucgacuucugcaagcaggccauccggcgccucaagaccgaggcccagaugagcauccagcugaucaacaaggccgugaacgcccugaucaacgaccagcucaucaugaagaaccaccuccgggacaucaugggcauccccuacugcaacuacuccaaguacugguaccugaaccacaccgucaccgggaagacgagccugccccgcugcuggcugguguccaacggcagcuaccugaacgagacccacuucuccgacgacaucgagcagcaggcggacaacaugaucaccgagcuccugcagaaggaguacauggaccggcagggcaagaccccgcuggggcugguggaccucuucgucuucagcacguccuucuaccugaucagcaucuuccugcaccucaucaagaucccgacccaccgccacaucaccggcaagcccugccccaagccccaccggcugaaccacauggggaucugcuccugcggccuguacaagcacccgggggugcccgugaaguggaagcgcugaggacuagucccuguucccagagcccacuuuuuuuucuuuuuuugaaauaaaauagccugucuuucagaucucaaaggcucuuuucagagccaccaaaaaaaaaaaaaaaaaaaaaaaaaaaaaaaaaaaaaaaaaaaaaaaaaaaaaaaaaaaaaaaaaaaaaaaaaaaaaaaaaaaaaaaaaaaaaaaaaaaaa

SEQ ID NO: 37230 - RNA, 1764 nt, Artificial Sequence
  mRNA product Design a-2 (hSL-A100) comprising derived and/or modified sequence from LASV(ISTH2010-NIG-2012;Clade II)__AIT17482__GPCmut10 (opt1)
aggagaguccgcucagccagguugcagaagcggcuuagcguguguccuaaucuucucucugcguguagguaggccugugccgcaaacaagcuuaccaugggccagaucaucaccuucuuccaggaggugccccacgucaucgaggaggugaugaacaucgugcugaucgcccucagccugcuggccauccucaaggggaucuacaacgucgcgaccugcggccuguucgggcugguguccuuccuccugcugugcggccgcagcugcuccacgaccuacaaggggguguacgagcuccagacccuggagcuggacauggccagccucaacaugugcaugccgcuguccugcaccaagaacaacagccaccacuacaucauggucggcaacgagacgggccuggagcucacccugaccaacaccuccaucaucaaccacaaguucugcaaccugagcgacgcccacaagaagaaccucuacgaccacgcccugauguccaucaucagcacguuccaccuguccauccccaacuucaaccaguacgaggccaugagcugcgacuucaacgggggcaagaucuccgugcaguacaaccucagccacgcguacgccguggacgccgccaaccacugcgggaccaucgcgaacggcguccugcagaccuucaugcggauggccuggggcggguccuacaucgcccuggacagcggcaagggguccugggacugcaucaugaccagcuaccaguaccucaucauccagaacaucacgugggaggaccacugccaguucucccgccccagccccaucggcuaccuggggcugcucagccagcggacccgcgacaucuacaucucccggcgccugcugggcaccuucaccuggacgcucagcgacuccgagggcaacgagacccccgggggcuacugccugacccgguggaugcugaucgaggccgagcucaagugcuucgggaacaccgccguggcgaagugcaacgagaagcacgacgaggaguucugcgacaugcugcgccuguucgacuucugcaagcaggccauccggcgccucaagacggaggcccagaugagcauccagcugaucaacaaggccgugaacgcccugaucaacgaccagcucaucaugaagaaccaccuccgggacaucaugggcauccccuacugcaacuacuccaaguacugguaccugaaccacaccgucaccgggaagaccagccugccccgcugcuggcugguguccaacggcagcuaccugaacgagacgcacuucuccgacgacaucgagcagcaggcggacaacaugaucaccgagcuccugcagaaggaguacaucgaccggcagggcaagaccccgcuggggcugguggaccucuucgucuucagcaccuccuucuaccugaucagcaucuuccugcaccucgugaagaucccgacgcaccgccacguggucggcaagcccugccccaagccccaccggcugaaccacauggggaucugcuccugcggccuguacaagcacccgggggugcccgugaaguggaagcgcugaggacuagucccuguucccagagcccacuuuuuuuucuuuuuuugaaauaaaauagccugucuuucagaucucaaaggcucuuuucagagccaccaaaaaaaaaaaaaaaaaaaaaaaaaaaaaaaaaaaaaaaaaaaaaaaaaaaaaaaaaaaaaaaaaaaaaaaaaaaaaaaaaaaaaaaaaaaaaaaaaaaaa

SEQ ID NO: 37231 - RNA, 1764 nt, Artificial Sequence
  mRNA product Design a-2 (hSL-A100) comprising derived and/or modified sequence from LASV(Lassa virus/H.sapiens-wt/NGA/2015/ISTH_0543;Clade II)__AVO03639__GPCmut10 (opt1)
aggagaguccgcucagccagguugcagaagcggcuuagcguguguccuaaucuucucucugcguguagguaggccugugccgcaaacaagcuuaccaugggccagaucaucaccuucuuccaggaggugccccacgucaucgaggaggugaugaacaucgugcugaucgcccucagccugcuggccauccucaaggggaucuacaacgucgcgaccugcggccuguucgggcugguguccuuccuccugcugugcggccgcagcugcuccacgaccuacaaggggguguacgagcuccagacccuggagcuggacauggccaaccucaacaugugcaugccgcugagcugcaccaagaacaacucccaccacuacaucauggucggcaacgagacgggccuggagcucacccugaccaacaccagcaucaucaaccacaaguucugcaaccuguccgacgcccacaagaagaaccucuacgaccacgcccugaugagcaucaucuccacguuccaccugagcauccccaacuucaaccaguacgaggccauguccugcgacuucaacgggggcaagaucagcgugcaguacaaccucucccacaccuacgcgguggacgccgccaaccacugcgggaccaucgccaacggcguccugcagaccuucaugcggauggcguggggcgggagcuacaucgcccuggacuccggcaaggggagcugggacugcaucaugacguccuaccaguaccucgugauccagaacaccaccugggaggaccacugccaguucagccgccccucccccaucggcuaccuggggcugcucagccagcggacccgcgacaucuacaucagccggcgccugcugggcacguucaccuggacccucuccgacagcgagggcaacgagacccccgggggcuacugccugacgcgguggaugcugaucgaggccgagcucaagugcuucgggaacaccgccguggccaagugcaacgagaagcacgacgaggaguucugcgacaugcugcgccuguucgacuucugcaagcaggcgauccggcgccucaagaccgaggcccagauguccauccagcugaucaacaaggccgucaacgcccugaucaacgaccagcucaucaugaagaaccaccuccgggacaucaugggcaucccguacugcaacuacagcaaguacugguaccugaaccacaccgugacggggaagaccucccugccccgcugcuggcuggugagcaacggcuccuaccugaacgagacccacuucagcgacgacaucgagcagcaggccgacaacaugaucaccgagcuccugcagaaggaguacaucgaccggcagggcaagacgccccuggggcuggucgaccucuucguguucuccaccagcuucuaccugaucuccaucuuccugcaccucgugaagaucccgacccaccgccacaucaccggcaagcccugccccaagccccaccggcugaaccacauggggaucugcagcugcggccuguacaagcacccggggguccccgugaaguggaagcgcugaggacuagucccuguucccagagcccacuuuuuuuucuuuuuuugaaauaaaauagccugucuuucagaucucaaaggcucuuuucagagccaccaaaaaaaaaaaaaaaaaaaaaaaaaaaaaaaaaaaaaaaaaaaaaaaaaaaaaaaaaaaaaaaaaaaaaaaaaaaaaaaaaaaaaaaaaaaaaaaaaaaaa

SEQ ID NO: 37232 - RNA, 1764 nt, Artificial Sequence
  mRNA product Design a-2 (hSL-A100) comprising derived and/or modified sequence from LASV(Lassa virus/H.sapiens-wt/NGA/2016/ISTH_0009;Clade II)__AVO03571__GPCmut10 (opt1)
aggagaguccgcucagccagguugcagaagcggcuuagcguguguccuaaucuucucucugcguguagguaggccugugccgcaaacaagcuuaccaugggccagaucaucaccuucuuccaggaggugccccacgucaucgaggaggugaugaacaucgugcugaucgcccucagccugcuggccauccucaaggggaucuacaacgucgcgaccugcggccugcuggggcucguguccuuccugcugcucugcggccgcagcugcuccacgaccuacaaggggguguacgagcugcagacccuggagcucgacauggccagccugaacaugugcaugccgcuguccugcaccaagaacaacagccaccacuacaucauggucggcaacgagacgggccucgagcugacccugaccaacaccuccaucaucaaccacaaguucugcaaccucagcgacgcccacaagaagaaccuguacgaccacgcccugauguccaucaucagcacguuccaccucuccauccccaacuucaaccaguacgaggccaugagcugcgacuucaacgggggccggaucuccgugcaguacaaccugagccacuccuacgcgguggacgccgccaaccacugcgggaccaucgccaacggcguccugcagaccuucaugcgcauggcguggggcgggagcuacaucgcccucgacuccggcaaggggagcugggacugcaucaugaccuccuaccaguaccugaucauccagaacacgaccugggaggaccacugccaguucagccggcccagccccaucggcuaccuggggcuccugucccagcgcacccgggacaucuacaucagccgccggcugcucggcaccuucacguggacccuguccgacagcgagggcaacgagacccccgggggcuacugccugacccgcuggaugcucaucgaggccgagcugaagugcuucgggaacacggccguggccaagugcaacgagaagcacgacgaggaguucugcgacaugcugcggcuguucgacuucugcaagcaggcgauccgccggcugaagaccgaggcccagauguccauccagcugaucaacaaggccgugaacgcccucaucaacgaccagcugaucaugaagaaccaccuccgcgacaucaugggcauccccuacugcaacuacagcaaguacugguaccucaaccacaccgucaccgggaagacgucccugccccggugcuggcuggugagcaacggcuccuaccucaacgagacccacuucagcgacgacaucgagcagcaggccgacaacaugaucaccgagcugcugcagaaggaguacaucgaccgccagggcaagaccccgcuggggcucguggaccuguucgucuucuccacgagcuucuaccugaucuccaucuuccuccaccuggugaagaucccgacccaccggcacaucaccggcaagcccugccccaagccccaccgccugaaccacauggggaucugcagcugcggccucuacaaccacccgggggugcccgucaaguggaagcggugaggacuagucccuguucccagagcccacuuuuuuuucuuuuuuugaaauaaaauagccugucuuucagaucucaaaggcucuuuucagagccaccaaaaaaaaaaaaaaaaaaaaaaaaaaaaaaaaaaaaaaaaaaaaaaaaaaaaaaaaaaaaaaaaaaaaaaaaaaaaaaaaaaaaaaaaaaaaaaaaaaaaa

SEQ ID NO: 37233 - RNA, 1764 nt, Artificial Sequence
  mRNA product Design a-2 (hSL-A100) comprising derived and/or modified sequence from LASV(Lassa virus/H.sapiens-wt/NGA/2016/ISTH_0017;Clade II)__AVO03567__GPCmut10 (opt1)
aggagaguccgcucagccagguugcagaagcggcuuagcguguguccuaaucuucucucugcguguagguaggccugugccgcaaacaagcuuaccaugggccagaucaucaccuucuuccaggaggugccccacgucaucgaggaggugaugaacaucgugcugaucgcccucagccugcuggccauccucaaggggaucuacaacgucgcgaccugcggccuguucgggcugguguccuuccuccugcugugcggccgcagcugcuccacgaccuacaaggggguguacgagcuccagacccuggagcuggacauggccagccucaacaugugcaugccgcuguccugcaccaagaacaacagccaccacuacaucauggucggcaacgagacgggccuggagcucacccugaccaacaccuccaucaucaaccacaaguucugcaaccugagcgacgcccacaagaagaaccucuacgaccacgcccugauguccaucaucagcacguuccaccuguccauccccaacuucaaccaguacgaggccaugagcugcgacuucaacgggggcaagaucuccgugcaguacaaccucagccacaccuacgcgaucgacgccgccaaccacugcgggaccaucgccaacggcgugcugcagaccuucaugcggauggcguggggcggguccuacaucgcccuggacagcggcaagggguccugggacugcaucaugacgagcuaccaguaccucaucauccagaacaccaccugggaggaccacugccaguucucccgccccagccccaucggcuaccuggggcugcucagccagcggacccgcgacaucuacaucucccggcgccugcugggcacguucaccuggacccucagcgacuccgagggcaacgagacccccgggggcuacugccugacgcgguggaugcugaucgaggccgagcucaagugcuucgggaacaccgccgucgccaagugcaacgagaagcacgacgaggaguucugcgacaugcugcgccuguucgacuucugcaagcaggcgauccggcgccucaagaccgaggcccagaugagcauccagcugaucaacaaggccgugaacgcccugaucaacgaccagcucaucaugaagaaccaccuccgggacaucaugggcaucccguacugcaacuacuccaaguacugguaccugaaccacaccgugacggggaagaccagccugccccgcugcuggcuggucuccaacggcagcuaccugaacgagacccacuucuccgacgacaucgagcagcaggccgacaacaugaucaccgagcuccugcagaaggaguacauggaccggcagggcaagacgccccuggggcugguggaccucuucguguucagcaccuccuucuaccugaucagcaucuuccugcaccucguccgcaucccgacccaccggcacgugaucggcaagcccugccccaagccccaccgccugaaccacauggggaucugcuccugcggccuguacaagcacccgggggugcccgucaaguggaagcggugaggacuagucccuguucccagagcccacuuuuuuuucuuuuuuugaaauaaaauagccugucuuucagaucucaaaggcucuuuucagagccaccaaaaaaaaaaaaaaaaaaaaaaaaaaaaaaaaaaaaaaaaaaaaaaaaaaaaaaaaaaaaaaaaaaaaaaaaaaaaaaaaaaaaaaaaaaaaaaaaaaaaa

SEQ ID NO: 37234 - RNA, 1764 nt, Artificial Sequence
  mRNA product Design a-2 (hSL-A100) comprising derived and/or modified sequence from LASV(Lassa virus/H.sapiens-wt/NGA/2018/ISTH_0959;Clade II)__AVV65099__GPCmut10 (opt1)
aggagaguccgcucagccagguugcagaagcggcuuagcguguguccuaaucuucucucugcguguagguaggccugugccgcaaacaagcuuaccaugggccagaucaucaccuucuuccaggaggugccccacgucaucgaggaggugaugaacaucgugcugaucgcccucagccugcuggccauccucaaggggaucuacaacgucgugaccugcggccuguucgggcugguguccuuccuccugcugugcggccgcagcugcuccacgaccuacaagggggucuacgagcuccagacccuggagcuggacauggcgagccucaacaugugcaugccgcuguccugcaccaagaacaacagccaccacuacaucauggugggcaacgagacgggccuggagcucacccugaccaacaccuccaucaucaaccacaaguucugcaaccugagcgacgcccacaagaagaaccucuacgaccacgcccugauguccaucaucagcacguuccaccuguccauccccaacuucaaccaguacgaggccaugagcugcgacuucaacgggggcaagaucuccgugcaguacaaccucagccacgccuacgcgaucgacgccgccaaccacugcgggaccaucgccaacggcguccugcagaccuucaugcggauggcguggggcggguccuacaucgcccuggacagcggcaagggguccugggacugcaucaugaccagcuaccaguaccucaucauccagaacacgaccugggaggaccacugccaguucucccgccccagccccaucggcuaccuggggcugcucagccagcggacccgcgacaucuacaucucccggcgccugcugggcaccuucacguggacccucagcgacuccgagggcaacgagacccccgggggcuacugccugacccgguggaugcugaucgaggccgagcucaagugcuucgggaacacggccguggccaagugcaacgagaagcacgacgaggaguucugcgacaugcugcgccuguucgacuucugcaagcaggcgauccggcgccucaagaccgaggcccagaugagcauccagcugaucaacaaggccgugaacgcccugaucaacgaccagcucaucaugaagaaccaccuccgggacaucaugggcauccccuacugcaacuacuccaaguacugguaccugaaccacaccgucaccgggaagacgagccugccccgcugcuggcugguguccaacggcagcuaccugaacgagacccacuucuccgacgacaucgagcagcaggccgacaacaugaucaccgagcuccugcagaaggaguacaucgaccggcagggcaagaccccgcuggggcugguggaccucuucgucuucagcacguccuucuaccugaucagcaucuuccugcaccucgugaagaucccgacccaccgccacgugaucggcaagcccugccccaagccccaccggcugaaccacauggggaucugcuccugcggccuguacaagcacccggggguccccgugaaguggaagcgcugaggacuagucccuguucccagagcccacuuuuuuuucuuuuuuugaaauaaaauagccugucuuucagaucucaaaggcucuuuucagagccaccaaaaaaaaaaaaaaaaaaaaaaaaaaaaaaaaaaaaaaaaaaaaaaaaaaaaaaaaaaaaaaaaaaaaaaaaaaaaaaaaaaaaaaaaaaaaaaaaaaaaa

SEQ ID NO: 37235 - RNA, 1764 nt, Artificial Sequence
  mRNA product Design a-2 (hSL-A100) comprising derived and/or modified sequence from LASV(LASV003-NIG-2008;Clade II)__AIT17580__GPCmut10 (opt1)
aggagaguccgcucagccagguugcagaagcggcuuagcguguguccuaaucuucucucugcguguagguaggccugugccgcaaacaagcuuaccaugggccagaucaucaccuucuuccaggaggugccccacgucaucgaggaggugaugaacaucgugcugaucgcccucagccugcuggccauccucaaggggaucuacaacgucgcgaccugcggccuguucgggcugguguccuuccuccugcugugcggccgcagcugcuccacgaccuacaaggggguguacgagcuccagacccuggagcuggacauggccagccucaacaugugcaugccgcuguccugcaccaagaacaacagccaccacuacaucauggucggcaacgagacgggccuggagcucacccugaccaacaccuccaucaucaaccacaaguucugcaaccugagcgacgcccacaagaagaaccucuacgaccacgcccugauguccaucaucagcacguuccaccuguccauccccaacuucaaccaguacgaggccaugagcugcgacuucaacgggggcaagaucuccgugcaguacaaccucagccacaccuacgcgguggacgccgccaaccacugcgggaccaucgccaacggcguccugcagaccuucaugcggauggcguggggcggguccuacaucgcccuggacagcggcaagggguccugggacugcaucaugacgagcuaccaguaccucaucauccagaacaccaccugggaggaccacugccaguucucccgccccagccccaucggcuaccuggggcugcucagccagcggacccgcgacaucuacaucucccggcgccugcugggcacguucaccuggacccucagcgacuccgagagcaacgagaccccgggcggguacugccugacgcgguggaugcugaucgaggccgagcucaagugcuucggcaacaccgccguggccaagugcaacgagaagcacgacgaggaguucugcgacaugcugcgccuguucgacuucugcaagcaggcgauccggcgccucaaggccgaggcccagauguccauccagcugaucaacaaggccgugaacgcccugaucaacgaccagcucaucaugaagaaccaccuccgggacaucauggggauccccuacugcaacuacagcaaguacugguaccugaaccacaccgucaccggccgcacgucccugccccggugcuggcuggugagcaacggguccuaccugaacgagacccacuucagcgacgacaucgagcagcaggcggacaacaugaucaccgagcuccugcagaaggaguacauggaccgccagggcaagacgccccugggccugguggaccucuucgucuucuccaccagcuucuaccugaucuccaucuuccugcaccucgugaagaucccgacccaccggcacgugaucgggaagcccugccccaagccccaccgccugaaccacaugggcaucugcagcugcgggcuguacaagcacccgggcguccccgugaaguggaagcggugaggacuagucccuguucccagagcccacuuuuuuuucuuuuuuugaaauaaaauagccugucuuucagaucucaaaggcucuuuucagagccaccaaaaaaaaaaaaaaaaaaaaaaaaaaaaaaaaaaaaaaaaaaaaaaaaaaaaaaaaaaaaaaaaaaaaaaaaaaaaaaaaaaaaaaaaaaaaaaaaaaaaa

SEQ ID NO: 37236 - RNA, 1764 nt, Artificial Sequence
  mRNA product Design a-2 (hSL-A100) comprising derived and/or modified sequence from LASV(LASV035-NIG-2009;Clade II)__AIT17588__GPCmut10 (opt1)
aggagaguccgcucagccagguugcagaagcggcuuagcguguguccuaaucuucucucugcguguagguaggccugugccgcaaacaagcuuaccaugggccagaucaucaccuucuuccaggaggugccccacgucaucgaggaggugaugaacaucgugcugaucgcccucagccugcuggccauccucaaggggaucuacaacgucgcgaccugcggccuguucgggcugguguccuuccuccugcugugcggccgcagcugcuccacgaccuacaaggggguguacgagcuccagacccuggagcuggacauggccagccucaacaugugcaugccgcuguccugcaccaagaacaacagccaccacuacaucauggucggcaacgagacgggccuggagcucacccugaccaacaccuccaucaucaaccacaaguucugcaaccugagcgacgcccacaagaagaaccucuacgaccacgcccugauguccaucaucagcacguuccaccuguccauccccaacuucaaccaguacgaggccaugagcugcgacuucaacgggggcaagaucuccgugcaguacaaccucagccacgcguacgccguggacgccgccaaccacugcgggaccaucgcgaacggcguccugcagaccuucaugcggauggccuggggcggguccuacaucgcccuggacagcggcaagggguccugggacugcaucaugaccagcuaccaguaccucaucauccagaacacgaccugggaggaccacugccaguucucccgccccagccccaucggcuaccuggggcugcucagccagcggacccgcgacaucuacaucucccggcgccugcugggcaccuucacguggacccucagcgacuccgagggcaacgagacccccgggggcuacugccugacccgguggaugcugaucgaggccgagcucaagugcuucgggaacacggccguggcgaagugcaacgagaagcacgacgaggaguucugcgacaugcugcgccuguucgacuucugcaagcaggccauccggcgccucaaggccgaggcccagaugagcauccagcugaucaacaaggccgugaacgcgcugaucaacgaccagcucaucaugaagaaccaccuccgggacaucaugggcauccccuacugcaacuacuccaaguacugguaccugaaccacaccgucaccgggaagaccagccugccccgcugcuggcugguguccaacggcagcuaccugaacgagacgcacuucuccgacgacaucgagcagcaggccgacaacaugaucaccgagcuccugcagaaggaguacaucgaccggcagggcaagaccccgcuggggcugguggaccucuucgucuucagcaccuccuucuaccugaucagcaucuuccugcaccucgugaagaucccgacgcaccgccacgugaucggcaagcccugccccaagccccaccggcugaaccacauggggaucugcuccugcggccuguacaagcacccggggguccccgugaaguggaagcgcugaggacuagucccuguucccagagcccacuuuuuuuucuuuuuuugaaauaaaauagccugucuuucagaucucaaaggcucuuuucagagccaccaaaaaaaaaaaaaaaaaaaaaaaaaaaaaaaaaaaaaaaaaaaaaaaaaaaaaaaaaaaaaaaaaaaaaaaaaaaaaaaaaaaaaaaaaaaaaaaaaaaaa

SEQ ID NO: 37237 - RNA, 1764 nt, Artificial Sequence
  mRNA product Design a-2 (hSL-A100) comprising derived and/or modified sequence from LASV(LASV1000-NIG-2009;Clade II)__AIT17782__GPCmut10 (opt1)
aggagaguccgcucagccagguugcagaagcggcuuagcguguguccuaaucuucucucugcguguagguaggccugugccgcaaacaagcuuaccaugggccagaucaucaccuucuuccaggaggugccccacgucaucgaggaggugaugaacaucgugcugaucgcccucagccugcuggccauccucaaggggaucuacaacgucgcgaccugcggccuguucgggcugguguccuuccuccugcugugcggccgcagcugcuccacgaccuacaaggggguguacgagcuccagacccuggagcuggacauggccagccucaacaugugcaugccgcuguccugcaccaagaacaacagccaccacuacaucauggucggcaacgagacgggccuggagcucacccugaccaacaccuccaucaucaaccacaaguucugcaaccugagcgacgcccacaagaagaaccucuacgaccacgcccugauguccaucaucagcacguuccaccuguccauccccaacuucaaccaguacgaggccaugagcugcgacuucaacgggggcaagaucuccgugcaguacaaccucagccacaccuacgcgguggacgccgccaaccacugcgggaccaucgccaacggcguccugcagaccuucaugcggauggcguggggcggguccuacaucgcccuggacagcggcaagggguccugggacugcaucaugacgagcuaccaguaccucaucauccagaacaccaccugggaggaccacugccaguucucccgccccagccccaucggcuaccuggggcugcucagccagcggacccgcgacaucuacaucucccggcgccugcugggcacguucaccuggacccucagcgacuccgagggcaacgagacccccgggggcuacugccugacgcgguggaugcugaucgaggccgagcucaagugcuucgggaacaccgccguggccaagugcaacgagaagcacgacgaggaguucugcgacaugcugcgccuguucgacuucugcaagcaggcgaucaagcggcucaagaccgaggcccagaugagcauccagcugaucaacaaggccgugaacgcccugaucaacgaccagcucaucaugaagaaccaccuccgcgacaucaugggcaucccguacugcaacuacuccaaguacugguaccugaaccacaccgucacggggaagaccagccugccccggugcuggcugguguccaacggcagcuaccugaacgagacccacuucuccgacgacaucgagcagcaggccgacaacaugaucaccgagcuccugcagaaggaguacaucgaccgccagggcaagacgccccuggggcugguggaccucuucgucuucagcaccuccuucuaccugaucagcaucuuccugcaccucgugaagaucccgacccaccggcacguggucggcaagcccugccccaagccccaccgccugaaccacauggggaucugcuccugcggccuguacaagcacccgggggugcccgugaaguggaagcggugaggacuagucccuguucccagagcccacuuuuuuuucuuuuuuugaaauaaaauagccugucuuucagaucucaaaggcucuuuucagagccaccaaaaaaaaaaaaaaaaaaaaaaaaaaaaaaaaaaaaaaaaaaaaaaaaaaaaaaaaaaaaaaaaaaaaaaaaaaaaaaaaaaaaaaaaaaaaaaaaaaaaa

SEQ ID NO: 37238 - RNA, 1764 nt, Artificial Sequence
  mRNA product Design a-2 (hSL-A100) comprising derived and/or modified sequence from LASV(LASV221-NIG-2010;Clade II)__AIT17624__GPCmut10 (opt1)
aggagaguccgcucagccagguugcagaagcggcuuagcguguguccuaaucuucucucugcguguagguaggccugugccgcaaacaagcuuaccaugggccagaucaucaccuucuuccaggaggugccccacgucaucgaggaggugaugaacaucgugcugaucgcccucagccugcuggccauccucaaggggaucuacaacgucgcgaccugcggccuguucgggcugguguccuuccuccugcugugcggccgcagcugcuccacgaccuacaaggggguguacgagcuccagacccuggagcuggacauggccagccucaacaugugcaugccgcuguccugcaccaagaacaacagccaccacuacaucauggucggcaacgagacgggccuggagcucacccugaccaacaccuccaucaucaaccacaaguucugcaaccugagcgacgcccacaagaagaaccucuacgaccacgcccugauguccaucaucagcacguuccaccuguccauccccaacuucaaccaguacgaggccaugagcugcgacuucaacgggggcaagaucuccgugcaguacaaccucagccacaccuacgcgaucgacgccgccaaccacugcgggaccaucgccaacggcgugcugcagaccuucaugcggauggcguggggcggguccuacaucgcccuggacagcggcaagggguccugggacugcaucaugacgagcuaccaguaccucaucauccagaacaccaccugggaggaccacugccaguucucccgccccagccccaucggcuaccuggggcugcucagccagcggacccgcgacaucuacaucucccggcgccugcugggcacguucaccuggacccucagcgacuccgagggcaacgagacccccgggggcuacugccugacgcgguggaugcugaucgaggccgagcucaagugcuucgggaacaccgccgucgccaagugcaacgagaagcacgacgaggaguucugcgacaugcugcgccuguucgacuucugcaagcaggcgauccggcgccucaagaccgaggcccagaugagcauccagcugaucaacaaggccgugaacgcccugaucaacgaccagcucaucaugaagaaccaccuccgggacaucaugggcaucccguacugcaacuacuccaaguacugguaccugaaccacaccgugacggggaagaccagccugccccgcugcuggcuggucuccaacggcagcuaccugaacgagacccacuucuccgacgacaucgagcagcaggccgacaacaugaucaccgagaugcuccagaaggaguacauggaccggcagggcaagacgccccuggggcugguggaccuguucguguucagcaccuccuucuaccucaucagcaucuuccugcaccuggucaagaucccgacccaccgccacgugaucggcaagcccugccccaagccccaccggcucaaccacauggggaucugcuccugcggccuguacaagcacccgggggugcccgucaaguggaagcgcugaggacuagucccuguucccagagcccacuuuuuuuucuuuuuuugaaauaaaauagccugucuuucagaucucaaaggcucuuuucagagccaccaaaaaaaaaaaaaaaaaaaaaaaaaaaaaaaaaaaaaaaaaaaaaaaaaaaaaaaaaaaaaaaaaaaaaaaaaaaaaaaaaaaaaaaaaaaaaaaaaaaaa

SEQ ID NO: 37239 - RNA, 1764 nt, Artificial Sequence
  mRNA product Design a-2 (hSL-A100) comprising derived and/or modified sequence from LASV(LASV237-NIG-2010;Clade II)__AIT17638__GPCmut10 (opt1)
aggagaguccgcucagccagguugcagaagcggcuuagcguguguccuaaucuucucucugcguguagguaggccugugccgcaaacaagcuuaccaugggccagaucaucaccuucuuccaggaggugccccacgucaucgaggaggugaugaacaucgugcugaucgcccucagccugcuggccauccucaaggggaucuacaacgucgcgaccugcggccuguucgggcugguguccuuccuccugcugugcggccgcagcugcuccacgaccuacaaggggguguacgagcuccagacccuggagcuggacauggccagccucaacaugugcaugccgcuguccugcaccaagaacaacagccaccacuacaucauggucggcaacgagacgggccuggagcucacccugaccaacaccuccaucaucaaccacaaguucugcaaccugagcgacgcccacaagaaggaccucuacgaccacgcccugauguccaucaucagcacguuccaccuguccauccccaacuucaaccaguacgaggccaugagcugcgacuucaacgggggcaagaucuccgugcaguacaaccucagccacaccuacgcgguggacgccgccaaccacugcgggaccaucgccaacggcguccugcagaccuucaugcggauggcguggggcggguccuacaucgcccuggacagcggcaagggguccugggacugcaucaugacgagcuaccaguaccucaucauccagaacaccaccugggaggaccacugccaguucucccgccccagccccaucggcuaccuggggcugcucagccagcggacccgcgacaucuacaucucccggcgccugcugggcacguucaccuggacccucagcgacuccgagggcaacgagacccccgggggcuacugccugacgcgguggaugcugaucgaggccgagcucaagugcuucgggaacaccgccguggccaagugcaacgagaagcacgacgaggaguucugcgacaugcugcgccuguucgacuucugcaagcaggcgauccggcgccucaagaccgaggcccagaugagcauccagcugaucaacaaggccgugaacgcccugaucaacgaccagcucaucaugaagaaccaccuccgggacaucaugggcaucccguacugcaacuacuccaaguacugguaccugaaccacaccgucacggggaagaccagccugccccgcugcuggcugguguccaacggcagcuaccugaacgagacccacuucuccgacgacaucgagcagcaggccgacaacaugaucaccgagcuccugcagaaggaguacauggaccggcagggcaagacgccccuggggcugguggaccucuucgucuucagcaccuccuucuaccugaucagcaucuuccugcaccucaucaagaucccgacccaccgccacaucaccggcaagcccugccccaagccccaccggcugaaccacauggggaucugcuccugcggccuguacaagcacccgggggugcccgugaaguggaagcgcugaggacuagucccuguucccagagcccacuuuuuuuucuuuuuuugaaauaaaauagccugucuuucagaucucaaaggcucuuuucagagccaccaaaaaaaaaaaaaaaaaaaaaaaaaaaaaaaaaaaaaaaaaaaaaaaaaaaaaaaaaaaaaaaaaaaaaaaaaaaaaaaaaaaaaaaaaaaaaaaaaaaaa

SEQ ID NO: 37240 - RNA, 1764 nt, Artificial Sequence
  mRNA product Design a-2 (hSL-A100) comprising derived and/or modified sequence from LASV(LASV253-NIG-2011;Clade II)__AIT17670__GPCmut10 (opt1)
aggagaguccgcucagccagguugcagaagcggcuuagcguguguccuaaucuucucucugcguguagguaggccugugccgcaaacaagcuuaccaugggccagaucaucaccuucuuccaggaggugccccacgucaucgaggaggugaugaacaucgugcugaucgcccucagccugcuggccauccucaaggggaucuacaacgucgcgaccugcggccuguucgggcugguguccuuccuccugcugugcggccgcagcugcuccacgaccuacaaggggguguacgagcuccagacccuggagcuggacauggccagccucaacaugugcaugccgcuguccugcaccaagaacaacagccaccacuacaucauggucggcaacgagacgggccuggagcucacccugaccaacaccuccaucaucaaccacaaguucugcaaccugagcgacgcccacaagaagaaccucuacgaccacgcccugauguccaucaucagcacguuccaccuguccauccccaacuucaaccaguacgaggccaugagcugcgacuucaacgggggcaagaucuccgugcaguacaaccucagccacaccuacgcgguggacgccgccaaccacugcgggaccaucgccaacggcguccugcagaccuucaugcggauggcguggggcggguccuacaucgcccuggacagcggcaagggguccugggacugcaucaugacgagcuaccaguaccucaucauccagaacaccaccugggaggaccacugccaguucucccgccccagccccaucggcuaccuggggcugcucagccagcggacccgcgacaucuacaucucccggcgccugcugggcacguucaccuggacccucagcgacuccgagggcaacgagacccccgggggcuacugccugacgcgguggaugcugaucgaggccgagcucaagugcuucgggaacaccgccguggccaagugcaacgagaagcacgacgaggaguucugcgacaugcugcgccuguucgacuucugcaagcaggcgauccggcgccucaaggccgaggcccagaugagcauccagcugaucaacaaggccgugaacgcccugaucaacgaccagcucaucaugaagaaccaccuccgggacaucaugggcauccccuacugcaacuacuccaaguacugguaccugaaccacaccgucaccgggcgcacgagccugccccggugcuggcugguguccaacggcagcuaccugaacgagacccacuucuccgacgacaucgagcagcaggcggacaacaugaucaccgagcuccugcagaaggaguacaucgaccgccagggcaagaccccgcuggggcugguggaccucuucgucuucagcacguccuucuaccugaucagcaucuuccugcaccucgugaagaucccgacccaccggcacaucaucggcaagcccugccccaagccccaccgccugaaccacauggggaucugcuccugcggccuguacaagcacccgggggugcccgucaaguggaagcggugaggacuagucccuguucccagagcccacuuuuuuuucuuuuuuugaaauaaaauagccugucuuucagaucucaaaggcucuuuucagagccaccaaaaaaaaaaaaaaaaaaaaaaaaaaaaaaaaaaaaaaaaaaaaaaaaaaaaaaaaaaaaaaaaaaaaaaaaaaaaaaaaaaaaaaaaaaaaaaaaaaaaa

SEQ ID NO: 37241 - RNA, 1764 nt, Artificial Sequence
  mRNA product Design a-2 (hSL-A100) comprising derived and/or modified sequence from LASV(LASV254-NIG-2011;Clade II)__AIT17674__GPCmut10 (opt1)
aggagaguccgcucagccagguugcagaagcggcuuagcguguguccuaaucuucucucugcguguagguaggccugugccgcaaacaagcuuaccaugggccagaucaucaccuucuuccaggaggugccccacgucaucgaggaggugaugaacaucgugcugaucgcccucagccugcuggccauccucaaggggaucuacaacgucgcgaccugcggccuguucgggcugguguccuuccuccugcugugcggccgcagcugcuccacgaccuacaaggggguguacgagcuccagacccuggagcuggacaugaccaaccucaacaugugcaugccgcugagcugcacgaagaacaacucccaccacuacaucauggucggcaacgagaccggccuggagcucacccugaccaacacgagcaucaucaaccacaaguucugcaaccuguccgacgcccacaagaagaaccucuacaaccacgcccugaugagcaucaucuccaccuuccaccugagcauccccaacuucaaccaguacgaggccauguccugcgacuucaacgggggcaagaucagcgugcaguacaaccucucccacagcuacgccguggacgcggccaaccacugcgggaccaucgccaacggcguccugcagaccuucaugcggauggccuggggcggguccuacaucgcgcuggacagcggcaaggggaacugggacugcaucaugacguccuaccaguaccucaucauccagaacaccaccugggaggaccacugccaguucagccgccccucccccaucggcuaccuggggcugcucagccagcggacccgcgacaucuacaucagccggcgccugcugggcacguucaccuggacccucuccgacagcgagggcaacgagacccccgggggcuacugccugacgcgguggaugcugaucgaggccgagcucaagugcuucgggaacaccgccguggccaagugcaacgagaagcacgacgaggaguucugcgacaugcugcgccuguucgacuucugcaagcaggccauccggcgccucaagaccgaggcgcaggccaacauccagcugaucaacaaggccgugaacgcccugaucaacgaccagcucaucaugaagaaccaccuccgggacaucaugggcaucccguacugcaacuacuccaaguacugguaccugaaccacaccgucacggggaagaccagccugccccgcugcuggcugguguccaacggcagcuaccugaacgagacccacuucuccgacgacaucgagcagcaggccgacaacaugaucaccgagcuccugcagaaggaguacauggaccggcagggcaagacgccccuggggcugguggaccucuucgucuucagcaccuccuucuaccugaucagcaucuuccugcaccucgugaagaucccgacccaccgccacgugaucggcaagcccugccccaagccccaccggcugaaccacauggggaucugcuccugcggccuguacaagcacccggggguccccgugaaguggaagcgcugaggacuagucccuguucccagagcccacuuuuuuuucuuuuuuugaaauaaaauagccugucuuucagaucucaaaggcucuuuucagagccaccaaaaaaaaaaaaaaaaaaaaaaaaaaaaaaaaaaaaaaaaaaaaaaaaaaaaaaaaaaaaaaaaaaaaaaaaaaaaaaaaaaaaaaaaaaaaaaaaaaaaa

SEQ ID NO: 37242 - RNA, 1764 nt, Artificial Sequence
  mRNA product Design a-2 (hSL-A100) comprising derived and/or modified sequence from LASV(Nig08-A19;Clade III)__ADU56618__GPCmut10 (opt1)
aggagaguccgcucagccagguugcagaagcggcuuagcguguguccuaaucuucucucugcguguagguaggccugugccgcaaacaagcuuaccaugggccagaucgugaccuucuuccaggaggucccccacgugaucgaggaggugaugaacaucguccugaucgcccucagcauccuggccauccugaaggggcucuacaacaucgcgaccugcggccugaucgggcuggugacguuccuccugcuguccggccgcagcugcuccaugaccuacaaggggguguacgagcuccagacccuggagcugaacaugaacacccucaacaugugcaugccgcugagcugcacgaagaacaacucccaccacuacaucauggucggcaacgagaccggccuggagcucacccugaccaacacgagccugcuccaccacaaguucugcaaccuguccgacgcccacaagaagaaccuguacgaccacacccucaugagcaucaucuccaccuuccaccugagcauccccaacuucaaccaguacgaggccauguccugcgacuucaacgggggcaagaucaccgugcaguacaaccugagccacuccuacgccaucgacgccgcgaaccacugcgggacgguggccaacggcguccuccagaccuucaugcggauggccuggggcgggagcuacaucgcccuggacuccggccgcgggaagugggacugcaucaugaccagcuaccaguaccugaucauccagaacaccacgugggaggaccacugccaguucucccggcccagccccaucggcuaccucgggcugcugucccagcgcacccgggacaucuacaucagccgccggcuccugggcaccuucaccuggacgcugagcgacuccgagggcaacgagacccccgggggcuacugccucacccgcuggaugcugaucgaggcggagcugaagugcuucgggaacaccgccguggccaagugcaacgagaagcacgacgaggaguucugcgacaugcuccggcuguucgacuucugcaagcaggccauccgccggcugaaggccgaggcgcagaugagcauccagcucaucaacaaggccgugaacgcccugaucaacgaccagcugaucaugaagaaccaccuccgcgacaucaugggcauccccuacugcaacuacuccaaguacugguaccugaaccacacgagcaccgggcggaccucccugccccgcugcuggcucgucagcaacggcuccuaccugaacgagacccacuucagcgacgacaucgagcagcaggccgacaacaugaucacggagaugcugcagaaggaguaccuggaccggcagggcaagaccccgcucgggcugguggaccuguucguguucuccaccagcuucuaccucaucuccaucuuccugcaccuggucaagaucccgacccaccgccacaucgugggcaagcccugccccaagccccaccggcucaaccacauggggaucugcagcugcggccuguacaagcagccgggggugcccguccgcuggaagcggugaggacuagucccuguucccagagcccacuuuuuuuucuuuuuuugaaauaaaauagccugucuuucagaucucaaaggcucuuuucagagccaccaaaaaaaaaaaaaaaaaaaaaaaaaaaaaaaaaaaaaaaaaaaaaaaaaaaaaaaaaaaaaaaaaaaaaaaaaaaaaaaaaaaaaaaaaaaaaaaaaaaaa

SEQ ID NO: 37243 - RNA, 1767 nt, Artificial Sequence
  mRNA product Design a-2 (hSL-A100) comprising derived and/or modified sequence from LASV(G1180-SLE-2010;Clade IV)__AIT17168__GPCmut10 (opt1)
aggagaguccgcucagccagguugcagaagcggcuuagcguguguccuaaucuucucucugcguguagguaggccugugccgcaaacaagcuuaccaugggccagaucgugaccuucuuccaggaggucccccacgugaucgaggaggugaugaacaucguccugaucgcccucagcauccuggccgugcugaaggggcucuacaacuucgcgaccugcggccugguggggcugcucacguuccugcugcucugcggccgcuccugcaccgccagccgguacaagggggucuacgagcugcagacccuggagcucaacauggagacccugaacaugugcaugccgcuguccugcacgaagaacaacagccaccacuacaucauggugggcaacgagaccggccucgagcugacccugaccaacacguccaucaucaaccacaaguucugcaaccucagcgacgcccacaagaagaaccuguacgaccacgcccugauguccaucaucagcaccuuccaccucuccauccccaacuucaaccaguacgaggccaugagcugcgacuucaacgggggcaagaucuccgugcaguacaaccugagccacuccuacgcgggggacgccgccaaccacugcggcaccgucgccaacggggugcugcagaccuucaugcgcauggcguggggcggcagcuacaucgcccucgacuccgggcacggcagcugggacugcaucaugacguccuaccaguaccugaucauccagaacaccaccugggaggaccacugccaguucagccggcccucccccaucggguaccugggccuccugagccagcgcacccgggacaucuacaucagccgccggcugcucggcacguucaccuggacccuguccgacagcgaggggaaggacaccccgggcggguacugccugacgcgcuggaugcucaucgaggccgagcugaagugcuucggcaacaccgccguggccaagugcaacgagaagcacgacgaggaguucugcgacaugcugcggcuguucgacuucugcaagcaggcgauccagcgccugaaggccgaggcccagauguccauccagcugaucaacaaggccgucaacgcccucaucaacgaccagcugaucaugaagaaccaccuccgggacaucauggggauccccuacugcaacuacagcaaguacugguaccucaaccacaccaccacgggcaagaccucccugcccaagugcuggcuggugagcaacggcuccuaccucaacgagacccacuucagcgacgacaucgagcagcaggcggacaacaugaucaccgagaugcugcagaaggaguacauggagcgccaggggaagacgccccugggccugguggaccucuucgucuucuccaccagcuucuaccugaucuccaucuuccugcaccucgugaagaucccgacccaccggcacaucgugggcaagagcugccccaagccccaccgccugaaccacauggggaucugcuccugcgggcuguacaagcagcccggcgucccggugaaguggaagcggugaggacuagucccuguucccagagcccacuuuuuuuucuuuuuuugaaauaaaauagccugucuuucagaucucaaaggcucuuuucagagccaccaaaaaaaaaaaaaaaaaaaaaaaaaaaaaaaaaaaaaaaaaaaaaaaaaaaaaaaaaaaaaaaaaaaaaaaaaaaaaaaaaaaaaaaaaaaaaaaaaaaaa

SEQ ID NO: 37244 - RNA, 1767 nt, Artificial Sequence
  mRNA product Design a-2 (hSL-A100) comprising derived and/or modified sequence from LASV(G1442-SLE-2011;Clade IV)__AIT17180__GPCmut10 (opt1)
aggagaguccgcucagccagguugcagaagcggcuuagcguguguccuaaucuucucucugcguguagguaggccugugccgcaaacaagcuuaccaugggccagaucgugaccuucuuccaggaggucccccacgugaucgaggaggugaugaacaucguccugaucgcccucagcauccuggccgugcugaaggggcucuacaacguggcgaccugcggccugaucgggcuggucaccuuccuccugcugugcggccgcuccugcaccaccacccucuacaaggggguguacgagcugcagacgcuggagcucaacauggagacccugaacaugugcaugccgcugagcugcaccaagaacaacucccaccacuacauccgggugggcaacgagaccggccucgagcugacgcugaccaacaccagcaucaucaaccacaaguucugcaaccucuccgacgcccacaagaagaaccuguacgaccacgcccugaugagcaucaucuccaccuuccaccucagcauccccaacuucaaccaguacgaggccauguccugcgacuucaacgggggcaagaucagcguccaguacaaccugucccacagcuacgccggggacgcggccaaccacugcggcacgguggccaacggggugcugcagaccuucaugcgcauggccuggggcggcuccuacaucgcgcucgacagcgggcggggcaacugggacugcaucaugaccuccuaccaguaccugaucauccagaacaccacgugggacgaccacugccaguucagccgccccucccccaucggguaccugggccuccugagccagcggacccgcgacgucuacaucucccggcgccugcucggcaccuucaccuggacgcugagcgacagcgaggggaaggacaccccgggcggguacugccugacccgguggaugcucaucgaggccgagcugaagugcuucggcaacaccgccguggccaagugcaacgagaagcacgacgaggaguucugcgacaugcugcgccucuucgacuucugcaagcaggccauccagcggcugaaggcggaggcccagauguccauccagcugaucaacaaggccgugaacgcccucaucaacgaccagcugaucaugaagaaccaccuccgcgacaucauggggauccccuacugcaacuacagcaaguacugguaccugaacaacacggccaccggcaagaccucccugcccaagugcuggcugaucagcaacggcuccuaccucaacgagacccacuucagcgacgacaucgagcaggaggcggacaacaugaucacggagaugcugcagaaggaguacauggagcggcaggggaagacgccccugggccuggucgaccucuucguguucuccaccagcuucuaccugaucuccaucuuccugcaccucgugaagaucccgacccaccgccacaucgucggcaagagcugccccaagccccaccggcugaaccacauggggaucugcuccugcgggcuguacaagcagcccggcgugccggugcgcuggaagcggugaggacuagucccuguucccagagcccacuuuuuuuucuuuuuuugaaauaaaauagccugucuuucagaucucaaaggcucuuuucagagccaccaaaaaaaaaaaaaaaaaaaaaaaaaaaaaaaaaaaaaaaaaaaaaaaaaaaaaaaaaaaaaaaaaaaaaaaaaaaaaaaaaaaaaaaaaaaaaaaaaaaaa

SEQ ID NO: 37245 - RNA, 1767 nt, Artificial Sequence
  mRNA product Design a-2 (hSL-A100) comprising derived and/or modified sequence from LASV(G3010-SLE-2013;Clade IV)__AIT17344__GPCmut10 (opt1)
aggagaguccgcucagccagguugcagaagcggcuuagcguguguccuaaucuucucucugcguguagguaggccugugccgcaaacaagcuuaccaugggccagaucgugaccuucuuccaggaggucccccacgugaucgaggaggugaugaacaucguccugaucgcccucagcauccuggccgugcugaaggggcucuacaacuucgcgaccugcggccugguggggcuggucacguuccuccugcugugcggccgcuccugcaccaccagccucuacaaggggguguacgagcugcagacccuggagcucaacauggagacgcugaacaugugcaugccgcuguccugcaccaagaacaacagccaccacuacaucauggugggcaacgagaccggccucgagcugacccugacgaacaccuccaucaucaaccacaaguucugcaaccucagcgacgcccacaagaagaaccuguacaaccacgcccugauguccaucaucagcaccuuccaccucuccauccccaacuucaaccaguacgaggccaugagcugcgacuucaacgggggcaagaucuccguccaguacaaccugagccacuccuacgccggggacgcggccagccacugcggcaccguggccaacggggugcugcagacguucaugcggauggccuggggcggcuccuacaucgcgcucgacagcggguacggcaagugggacugcaucaugaccuccuaccaguaccugaucauccagaacaccaccugggaggaccacugccaguucagccgccccucccccaucggguaccugggccuccugagccagcggacgcgcgacaucuacaucagccggcgccugcucggcaccuucaccuggacccuguccgacagcgaggggaaggacacgccgggcggguacugccugacccgguggaugcucaucgaggccgagcugaagugcuucggcaacaccgccgucgccaagugcaacgagaagcacgacgaggaguucugcgacaugcugcgccucuucgacuucugcaagcaggccauccagcggcugaagaccgaggcgcagauguccauccagcugaucaacaaggccgugaacgcccucaucaacgaccagcugaucaugaagaaccaccuccgcgacaucauggggauccccuacugcaacuacagcaaguacugguaccugaaccacacgaccaccggcaagaccucccugcccaagugcuggcuggugagcaacggcuccuaccucaacgagacgcacuucagcgacgacaucgagcagcaggccgacaacaugaucaccgagaugcugcagaaggaguacauggagcggcaggggaagacgccccugggccuggucgaccucuucguguucuccaccagcuucuaccugaucuccaucuuccugcaccucgugaagaucccgacccaccgccacaucgucggcaagagcugccccaagccccaccggcugaaccacauggggaucugcuccugcgggcuguacaagcagcccggcgugccggugcgcuggaagcggugaggacuagucccuguucccagagcccacuuuuuuuucuuuuuuugaaauaaaauagccugucuuucagaucucaaaggcucuuuucagagccaccaaaaaaaaaaaaaaaaaaaaaaaaaaaaaaaaaaaaaaaaaaaaaaaaaaaaaaaaaaaaaaaaaaaaaaaaaaaaaaaaaaaaaaaaaaaaaaaaaaaaa

SEQ ID NO: 37246 - RNA, 1767 nt, Artificial Sequence
  mRNA product Design a-2 (hSL-A100) comprising derived and/or modified sequence from LASV(G502-SLE-2009;Clade IV)__AIT17126__GPCmut10 (opt1)
aggagaguccgcucagccagguugcagaagcggcuuagcguguguccuaaucuucucucugcguguagguaggccugugccgcaaacaagcuuaccaugggccagaucgugaccuucuuccaggaggucccccacgugaucgaggaggugaugaacaucguccugaucgcccucagcauccuggccgugcugaaggggcucuacaacuucgcgaccugcggccugguggggcugcucacguuccugcugcucugcggccgcuccugcaccaccgggcuguacaagggcgucuacgagcugcagacccucgagcugaacauggagacgcugaacaugugcaugccgcucagcugcaccaagaacaacucccaccacuacaucauggugggcaacgagaccgggcuggagcugacccucacgaacaccagcaucaucaaccacaaguucugcaaccuguccgacgcccacaagaagaaccuguacgaccacgcccucaugagcaucaucuccaccuuccaccugagcauccccaacuucaaccaguacgaggccauguccugcgacuucaacggcgggaagaucagcgugcaguacaaccugucccacagcuacgccggcgacgcggccgaccacugcgggaccgucgccaacggcgugcuccagacguucaugcggauggccuggggcggguccuacaucgcgcuggacagcggccgcgggcggugggacugcaucaugaccuccuaccaguaccugaucauccagaacaccaccugggaggaccacugccaguucagccgccccucccccaucggcuaccucggccugcugagccagcggacgcgcgacaucuacaucucccggcgccuccuggggaccuucaccuggacccugagcgacagcgagggcaaggacacgcccgggggcuacugccucacccgguggaugcugaucgaggccgagcugaagugcuucgggaacaccgccguggccaagugcaacgagaagcacgacgaggaguucugcgacaugcuccgccuguucgacuucugcaagcaggccauccagcggcugaaggcggaggcccagauguccauccagcucaucaacaaggccgucaacgcccugaucaacgaccagcuggugaugaagaaccaccuccgcgacaucaugggcauccccuacugcaacuacagccgguacugguaccugaaccacaccacgaccggccgcaccucccugcccaagugcuggcucgugagcaacggguccuaccugaacgagacccacuucagcgacgacaucgagcagcaggccgacaacaugaucacggagaugcugcagaaggaguacauggagcggcagggcaagaccccgcuggggcucgucgaccuguucguguucuccaccagcuucuaccugaucuccaucuuccuccaccuggugaagaucccgacccaccgccacaucgucggcaagagcugccccaagccccaccggcugaaccacauggggaucugcuccugcggccucuacaagcagcccggcgugccggugaaguggaagcgcugaggacuagucccuguucccagagcccacuuuuuuuucuuuuuuugaaauaaaauagccugucuuucagaucucaaaggcucuuuucagagccaccaaaaaaaaaaaaaaaaaaaaaaaaaaaaaaaaaaaaaaaaaaaaaaaaaaaaaaaaaaaaaaaaaaaaaaaaaaaaaaaaaaaaaaaaaaaaaaaaaaaaa

SEQ ID NO: 37247 - RNA, 1767 nt, Artificial Sequence
  mRNA product Design a-2 (hSL-A100) comprising derived and/or modified sequence from LASV(G733-SLE-2010;Clade IV)__AIT17154__GPCmut10 (opt1)
aggagaguccgcucagccagguugcagaagcggcuuagcguguguccuaaucuucucucugcguguagguaggccugugccgcaaacaagcuuaccaugggccagaucgugaccuucuuccaggaggucccccacgugaucgaggaggugaugaacaucguccugaucgcccucagcauccuggccgugcugaaggggcucuacaacuucgcgaccugcggcaucguggggcuggucuccuuccugcuccugugcggccgcagcugcacgaccucccuguacaaggggguguacgagcuccagacccuggagcugaacauggagacccucaacaugugcaugccgcugagcugcacgaagaacaacucccaccacuacaucauggugggcaacgagaccggccuggagcucacccugaccaacacgagcaucaucaaccacaaguucugcaaccuguccgacgcccacaagaagaaccucuacgaccacgcccugaugagcaucaucuccaccuuccaccugagcauccccaacuucaaccaguacgaggccauguccugcgacuucaacgggggcaagaucagcguccaguacaaccucucccacagcuacgccggggacgcggccaaccacugcggcaccaucgccaacggggugcugcagaccuucaugcggauggccuggggcggcuccuacaucgcgcuggacagcgggcgcgaccggugggacugcaucaugacguccuaccaguaccucaucauccagaacaccaccugggaggaccacugccaguucagccgccccucccccaucggcuaccuggggcugcucagccagcggacccgcgacaucuacaucagccggcgccugcugggcacguucaccuggacccucuccgacagcgagggcaaggacacccccgggggcuacugccugacgcgguggaugcugaucgaggccgagcucaagugcuucgggaacaccgccguggccaagugcaacgagaagcacgacgaggaguucugcgacaugcugcgccuguucgacuucugcaagcaggccauccagcggcucaaggcggaggcccagauguccauccagcugaucaacaaggccgucaacgcccugaucaacgaccagcucaucaugaagaaccaccuccgcgacaucaugggcaucccguacugcaacuacagcaaguacugguaccugaaccacaccaccacggggaagaccucccugcccaagugcuggcuggugagcaacggcuccuaccugaacgagacccacuucagcgacgacaucgagcagcaggccgacaacaugaucaccgagaugcuccagaaggaguacauggagcggcagggcaagacgccccuggggcugguggaccuguucgucuucuccaccagcuucuaccucaucuccaucuuccugcaccuggugaagaucccgacccaccgccacguggucggcaagagcugccccaagccccaccggcucaaccacauggggaucugcuccugcggccuguacgggcagcccggcgugccggugaaguggaagcgcugaggacuagucccuguucccagagcccacuuuuuuuucuuuuuuugaaauaaaauagccugucuuucagaucucaaaggcucuuuucagagccaccaaaaaaaaaaaaaaaaaaaaaaaaaaaaaaaaaaaaaaaaaaaaaaaaaaaaaaaaaaaaaaaaaaaaaaaaaaaaaaaaaaaaaaaaaaaaaaaaaaaaa

SEQ ID NO: 37248 - RNA, 1767 nt, Artificial Sequence
  mRNA product Design a-2 (hSL-A100) comprising derived and/or modified sequence from MOPV/LASV reassortant(IGS-1;Clade IV)__AFY05576__GPCmut10 (opt1)
aggagaguccgcucagccagguugcagaagcggcuuagcguguguccuaaucuucucucugcguguagguaggccugugccgcaaacaagcuuaccaugggccagaucgugaccuucuuccaggaggucccccacgugaucgaggaggugaugaacaucguccugaucgcccucagcgugcuggccgugcugaaggggcucuacaacuucgcgaccugcggccuggucgggcuggugaccuuccuccugcugugcggccgcuccugcaccaccagccucuacaaggggguguacgagcugcagacccuggagcucaacauggagacgcugaacaugugcaugccgcuguccugcaccaagaacaacagccaccacuacaucauggucggcaacgagaccggccucgagcugacccugacgaacaccuccaucaucaaccacaaguucugcaaccucagcgacgcccacaagaagaaccuguacgaccacgcccugauguccaucaucagcaccuuccaccucuccauccccaacuucaaccaguacgaggccaugagcugcgacuucaacgggggcaagaucuccgugcaguacaaccugagccacuccuacgccggggacgcggccaaccacugcggcaccguggccaacgggguccugcagacguucaugcggauggccuggggcggcagcuacaucgcgcucgacuccgggcgcggcaacugggacugcaucaugaccagcuaccaguaccugaucauccagaacaccaccugggaggaccacugccaguucucccggcccagccccaucggguaccugggccuccugucccagcgcacgcgggacaucuacaucagccgccggcugcucggcaccuucaccuggacccugagcgacuccgagggggaggacacgccgggcggguacugccugacccgcuggaugcucaucgaggccgagcugaagugcuucggcaacaccgccguggccaagugcaacgagaagcacgacgaggaguucugcgacaugcugcggcuguucgacuucugcaagcaggccauccagcgccugaaggcggaggcccagaugagcauccagcugaucaacaaggccgugaacgcccucaucaacgaccagcugaucaugaagaaccaccuccgggacaucauggggauccccuacugcaacuacuccaaguacugguaccucaaccacaccacgaccggccgcaccagccugcccaagugcuggcuggucuccaacggcagcuaccucaacgagacccacuucuccgacgacaucgagcagcaggccgacaacaugaucacggagaugcugcagaaggaguacauggagcggcaggggaagacgccccugggccugguggaccucuucguguucagcaccuccuucuaccugaucagcaucuuccugcaccucgucaagaucccgacccaccgccacaucguggggaaguccugccccaagccccaccggcugaaccacaugggcaucugcagcugcgggcuguacaagcagcccggcgugccggucaaguggaagcgcugaggacuagucccuguucccagagcccacuuuuuuuucuuuuuuugaaauaaaauagccugucuuucagaucucaaaggcucuuuucagagccaccaaaaaaaaaaaaaaaaaaaaaaaaaaaaaaaaaaaaaaaaaaaaaaaaaaaaaaaaaaaaaaaaaaaaaaaaaaaaaaaaaaaaaaaaaaaaaaaaaaaaa

SEQ ID NO: 37249 - RNA, 1767 nt, Artificial Sequence
  mRNA product Design a-2 (hSL-A100) comprising derived and/or modified sequence from LASV(LM765-SLE-2012;Clade IV)__AIT17814__GPCmut10 (opt1)
aggagaguccgcucagccagguugcagaagcggcuuagcguguguccuaaucuucucucugcguguagguaggccugugccgcaaacaagcuuaccaugggccagaucgugaccuucuuccaggaggucccccacgugaucgaggaggugaugaacaucguccugaucgcccucagcauccuggccgugcugaaggggcucuacaacuucgcgaccugcggccugguggggcuggucacguuccuccugcugugcggccgcuccugcaccaccagccucuacaaggggguguacgagcugcagacccuggagcucaacauggagacgcugaacaugugcaugccgcuguccugcaccaagaacaacagccaccacuacaucauggugggcaacgagaccggccucgagcugacccugacgaacaccuccaucaucgaccacaaguucugcaaccucagcgacgcccaccggaagaaccuguacgaccacgcccugauguccaucaucagcaccuuccaccucuccauccccaacuucaaccaguacgaggccaugagcugcgacuucaacgggggcaagaucuccguccaguacaaccugagccacuccuacgccaaggacgcggccgaccacugcgggaccguggccaacggcgugcugcagacguucaugcgcauggccuggggcgggagcuacaucgcgcucgacuccggccgggggcgcugggacugcaucaugaccagcuaccaguaccugaucauccagaacaccaccugggaggaccacugccaguucucccggcccagccccaucggcuaccuggggcuccugucccagcgcacgcgggacaucuacaucagccgccggcugcucggcaccuucaccuggacccugagcgacuccgagggcaaggacacgcccgggggcuacugccugacccgcuggaugcucaucgaggccgagcugaagugcuucgggaacaccgccgucgccaagugcaacgagaagcacgacgaggaguucugcgacaugcugcggcuguucgacuucugcaagcaggccauccagcgccugaaggcggaggcccagaugagcauccagcugaucaacaaggccgugaacgcccucaucaacgaccagcugaucaugaagaaccaccuccgggacaucaugggcauccccuacugcaacuacuccaaguacugguaccucaaccacaccacgaccgggaagaccagccugcccaagugcuggcugguguccaacggcagcuaccucaacgagacccacuucuccgacgacaucgagcagcaggccgacaacaugaucacggagaugcugcagaaggaguacauggagcgccagggcaagaccccgcuggggcuggucgaccucuucguguucagcaccuccuucuaccugaucagcaucuuccugcaccucgugaagaucccgacccaccggcacaucgucggcaagcccugccccaagccccaccgccugaaccacauggggaucugcuccugcggccuguacaagcagccgggggugcccgugaaguggaagcggugaggacuagucccuguucccagagcccacuuuuuuuucuuuuuuugaaauaaaauagccugucuuucagaucucaaaggcucuuuucagagccaccaaaaaaaaaaaaaaaaaaaaaaaaaaaaaaaaaaaaaaaaaaaaaaaaaaaaaaaaaaaaaaaaaaaaaaaaaaaaaaaaaaaaaaaaaaaaaaaaaaaaa

SEQ ID NO: 37250 - RNA, 1767 nt, Artificial Sequence
  mRNA product Design a-2 (hSL-A100) comprising derived and/or modified sequence from LASV(LM776-SLE-2012;Clade IV)__AIT17824__GPCmut10 (opt1)
aggagaguccgcucagccagguugcagaagcggcuuagcguguguccuaaucuucucucugcguguagguaggccugugccgcaaacaagcuuaccaugggccagaucgugaccuucuuccaggaggucccccacgugaucgaggaggugaugaacaucguccugaucgcccucagcauccuggccgugcugaaggggcucuacaacuucgcgaccugcggccugguggggcuggucaccuuccuccugcugugcggccgcuccugcaccaccagcguguacaaggggguguacgagcuccagacccuggagcugaacauggagacgcucaacaugugcaugccgcuguccugcaccaagaacaacagccaccacuacaucauggucggcaacgagaccggccuggagcucacccugacgaacaccuccaucaucaaccacaaguucugcaaccugagcgacgcccacaagaagaaccucuacgaccacgcccugauguccaucaucagcaccuuccaccuguccauccccaacuucaaccaguacgaggccaugagcugcgacuucaacgggggcaagaucuccgugcaguacaaccucagccacuccuacgccggggacgcggccaaccacugcggcaccguggccaacgggguccugcagacguucaugcggauggccuggggcggcagcuacaucgcgcuggacuccgggcacggcaagugggacugcaucaugaccagcuaccaguaccucaucauccagaacaccaccugggaggaccacugccaguucucccgccccagccccaucggguaccugggccugcucucccagcggacgcgcgacaucuacaucagccggcgccugcugggcaccuucaccuggacccucagcgacuccgaggggaaggacacgccgggcggguacugccugacccgguggaugcugaucgaggccgagcucaagugcuucggcaacaccgccguggccaagugcaacgagaagcacgacgaggaguucugcgacaugcugcgccuguucgacuucugcaagcaggccauccagcggcucaaggcggaggcccagaugagcauccagcugaucaacaaggccgugaacgcccugaucaacgaccagcucaucaugaagaaccaccuccgcgacaucauggggauccccuacugcaacuacuccaaguacugguaccugaaccacaccacgaccggcaagaccagccugcccaagugcuggcuggucuccaacggcagcuaccugaacgagacccacuucuccgacgacaucgagcagcaggccgacaacaugaucacggagaugcuccagaaggaguacauggagcggcaggggaagacgccccugggccugguggaccuguucguguucagcaccuccuucuaccucaucagcaucuuccugcaccuggucaagaucccgacccaccgccacaucguggggaaguccugccccaagccccaccggcucaaccacaugggcaucugcagcugcgggcuguacaagcagcccggcgugccgguccgcuggaagcggugaggacuagucccuguucccagagcccacuuuuuuuucuuuuuuugaaauaaaauagccugucuuucagaucucaaaggcucuuuucagagccaccaaaaaaaaaaaaaaaaaaaaaaaaaaaaaaaaaaaaaaaaaaaaaaaaaaaaaaaaaaaaaaaaaaaaaaaaaaaaaaaaaaaaaaaaaaaaaaaaaaaaa

SEQ ID NO: 37251 - RNA, 1767 nt, Artificial Sequence
  mRNA product Design a-2 (hSL-A100) comprising derived and/or modified sequence from LASV(Mad39;Clade IV)__ANH09722__GPCmut10 (opt1)
aggagaguccgcucagccagguugcagaagcggcuuagcguguguccuaaucuucucucugcguguagguaggccugugccgcaaacaagcuuaccaugggccagaucgugaccuucuuccaggaggucccccacgugaucgaggaggugaugaacaucguccugaucgcccucagcauccuggccgugcugaaggggcucuacaacguggcgaccugcggccugaucgggcuggucacguuccuccugcugugcggccgcuccugcaccaccacccucuacaaggggguguacgagcugcaggcccuggagcucaacauggagacgcugaacaugugcaugccgcugagcugcaccaagaacaacucccaccacuacauccgggugggcaacgagaccggccucgagcugacccugacgaacaccagccucaucaaccacaaguucugcaaccuguccgacgcccacaagaagaaccuguacgaccacgcccucaugagcaucaucuccaccuuccaccugagcauccccaacuucaaccaguacgaggccauguccugcgacuucaacgacgggaagaucagcguccaguacaaccugucccacaccuacgcgggcgacacggccaaccacugcgggaccguggccaacggcgugcuccagaccuucaugcgcauggccuggggcgggagcuacaucgcgcuggacuccggccgcgggggcugggacugcaucaugaccagcuaccaguaccugaucauccagaacacgaccugggaggaccacugccaguucucccggcccagccccaucggguaccucggccugcugucccagcggacccgcgacaucuacaucagccggcgccuccugggcaccuucacguggacccuguccgacagcgaggggaaggacaccccgggcggguacugccucacccgguggaugcugaucgaggccgagcugaagugcuucggcaacacggccgucgccaagugcaacgagaagcacgacgaggaguucugcgacaugcuccgccuguucgacuucugcaagcaggccauccagcggcugaaggcggaggcccagaugagcauccagcucaucaacaaggccgugaacgcccugaucaacgaccagcugaucaugaagaaccaccuccgcgacaucauggggauccccuacugcaacuacuccaaguacugguaccugaaccacaccgugaccggcaagaccagccugcccaagugcuggcucgucuccaacggcagcuaccugaacgagacgcacuucuccgacgacaucgagcagcaggccgacaacaugaucaccgagaugcugcagaaggaguacauggagcggcaggggaagacgccccugggccucguggaccuguucguguucagcaccuccuucuaccugaucagcaucuuccuccaccuggucaagaucccgacccaccgccacgugguggggaagcccugccccaagccccaccggcugaaccacaugggcaucugcuccugcggguucuacaagcagccgggcguccccgugcgcuggaagcggugaggacuagucccuguucccagagcccacuuuuuuuucuuuuuuugaaauaaaauagccugucuuucagaucucaaaggcucuuuucagagccaccaaaaaaaaaaaaaaaaaaaaaaaaaaaaaaaaaaaaaaaaaaaaaaaaaaaaaaaaaaaaaaaaaaaaaaaaaaaaaaaaaaaaaaaaaaaaaaaaaaaaa

SEQ ID NO: 37252 - RNA, 1767 nt, Artificial Sequence
  mRNA product Design a-2 (hSL-A100) comprising derived and/or modified sequence from LASV(Z0947-SLE-2011;Clade IV)__AIT17840__GPCmut10 (opt1)
aggagaguccgcucagccagguugcagaagcggcuuagcguguguccuaaucuucucucugcguguagguaggccugugccgcaaacaagcuuaccaugggccagaucgugaccuucuuccaggaggucccccacgugaucgaggaggugaugaacaucguccugaucgcccucagcauccuggccgugcugaaggggcucuacaacuucgcgaccugcggccugguggggcuggucacguuccuccugcugugcggccgcuccugcaccaucagccucuacaaggggguguacgagcugcagacccuggagcucaacauggagacccugaacaugugcaugccgcuguccugcacgaagaacaacagccaccacuacaucauggugggcaacgagaccggccucgagcugacccugaccaacacguccaucaucaaccacaaguucugcaaccucagcgacgcccacaagaagaaccuguacgaccacgcccugauguccaucaucagcaccuuccaccucuccauccccaacuucaaccaguacgaggccaugagcugcgacuucaacgggggcaagaucuccguccaguacaaccugagccacuccuacgccggggacgcggccaaccacugcggcaccguggccaacggggugcugcagaccuucaugcggauggccuggggcggcagcuacaucgcgcucgacuccgggcgcgaccggugggacugcaucaugacgagcuaccaguaccugaucauccagaacaccaccugggaggaccacugccaguucucccgccccagccccaucggcuaccuggggcuccugucccagcggacccgcgacaucuacaucagccggcgccugcucggcacguucaccuggacccugagcgacuccgagggcaaggacacccccgggggcuacugccugacgcgguggaugcucaucgaggccgagcugaagugcuucgggaacaccgccgucgccaagugcaacgagaagcacgacgaggaguucugcgacaugcugcgccucuucgacuucugcaagcaggccauccagcggcugaaggcggaggcccagaugagcauccagcugaucaacaaggccgugaacgcccucaucaacgaccagcugaucaugaagaaccaccuccgcgacaucaugggcaucccguacugcaacuacuccaaguacugguaccugaaccacaccaccacggggaagaccagccugcccaagugcuggcugguguccaacggcagcuaccucaacgagacccacuucuccgacgacaucgagcagcaggccgacaacaugaucaccgagaugcugcagaaggaguacauggagcggcagggcaagacgccccuggggcuggucgaccucuucguguucagcaccuccuucuaccugaucagcaucuuccugcaccucgugaagaucccgacccaccgccacaucgucggcaagcccugccccaagccccaccggcugaaccacauggggaucugcuccugcggccuguacaagcagccgggggugcccgugaaguggaagcgcugaggacuagucccuguucccagagcccacuuuuuuuucuuuuuuugaaauaaaauagccugucuuucagaucucaaaggcucuuuucagagccaccaaaaaaaaaaaaaaaaaaaaaaaaaaaaaaaaaaaaaaaaaaaaaaaaaaaaaaaaaaaaaaaaaaaaaaaaaaaaaaaaaaaaaaaaaaaaaaaaaaaaa

SEQ ID NO: 37253 - RNA, 1767 nt, Artificial Sequence
  mRNA product Design a-2 (hSL-A100) comprising derived and/or modified sequence from LASV(Josiah;Clade IV)__NP_694870__GPCmut10 (opt4)
aggagaguccgcucagccagguugcagaagcggcuuagcguguguccuaaucuucucucugcguguagguaggccugugccgcaaacaagcuuaccaugggccagaucgugaccuucuuccaggaggugccccacgugaucgaggaggugaugaacaucgugcugaucgcccugagcgugcuggccgugcugaagggccuguacaacuucgccaccugcggccuggugggccuggugaccuuccugcugcugugcggcagaagcugcaccaccagccuguacaagggcguguacgagcugcagacccuggagcugaacauggagacccugaacaugugcaugccccugagcugcaccaagaacaacagccaccacuacaucauggugggcaacgagaccggccuggagcugacccugaccaacaccagcaucaucaaccacaaguucugcaaccugagcgacgcccacaagaagaaccuguacgaccacgcccugaugagcaucaucagcaccuuccaccugagcauccccaacuucaaccaguacgaggccaugagcugcgacuucaacggcggcaagaucagcgugcaguacaaccugagccacagcuacgccggcgacgccgccaaccacugcggcaccguggccaacggcgugcugcagaccuucaugagaauggccuggggcggcagcuacaucgcccuggacagcggcagaggcaacugggacugcaucaugaccagcuaccaguaccugaucauccagaacaccaccugggaggaccacugccaguucagcagacccagccccaucggcuaccugggccugcugagccagagaaccagagacaucuacaucagcagaagacugcugggcaccuucaccuggacccugagcgacagcgagggcaaggacacccccggcggcuacugccugaccagauggaugcugaucgaggccgagcugaagugcuucggcaacaccgccguggccaagugcaacgagaagcacgacgaggaguucugcgacaugcugagacuguucgacuucugcaagcaggccauccagagacugaaggccgaggcccagaugagcauccagcugaucaacaaggccgugaacgcccugaucaacgaccagcugaucaugaagaaccaccugagagacaucaugggcauccccuacugcaacuacagcaaguacugguaccugaaccacaccaccaccggcagaaccagccugcccaagugcuggcuggugagcaacggcagcuaccugaacgagacccacuucagcgacgacaucgagcagcaggccgacaacaugaucaccgagaugcugcagaaggaguacauggagagacagggcaagaccccccugggccugguggaccuguucguguucagcaccagcuucuaccugaucagcaucuuccugcaccuggugaagauccccacccacagacacaucgugggcaagagcugccccaagccccacagacugaaccacaugggcaucugcagcugcggccuguacaagcagcccggcgugcccgugaaguggaagagaugaggacuagucccuguucccagagcccacuuuuuuuucuuuuuuugaaauaaaauagccugucuuucagaucucaaaggcucuuuucagagccaccaaaaaaaaaaaaaaaaaaaaaaaaaaaaaaaaaaaaaaaaaaaaaaaaaaaaaaaaaaaaaaaaaaaaaaaaaaaaaaaaaaaaaaaaaaaaaaaaaaaaa

SEQ ID NO: 37254 - RNA, 1764 nt, Artificial Sequence
  mRNA product Design a-2 (hSL-A100) comprising derived and/or modified sequence from LASV(LP;Clade I)__AAF86701__GPCmut10 (opt4)
aggagaguccgcucagccagguugcagaagcggcuuagcguguguccuaaucuucucucugcguguagguaggccugugccgcaaacaagcuuaccaugggccagaucaucaccuucuuccaggaggugccccacgugaucgaggaggugaugaacaucgugcugaucgcccugagccugcuggccauccugaagggccuguacaacaucgccaccugcggcaucaucggccugguggccuuccuguuccugugcggcaagagcugcagccugacccugaagggcggcuacgagcugcagacccuggagcugaacauggagacccugaacaugugcaugccccugagcugcaccaagaacagcagccaccacuacaucagagugggcaacgagaccggccuggagcugacccugaccaacaccagcaucaucaaccacaaguucugcaaccugagcgacgcccacaagaagaaccuguacgaccacgcccugaugagcaucaucagcaccuuccaccugagcauccccaacuucaaccaguacgaggccaugagcugcgacuucaacggcggcaagaucagcgugcaguacaaccugagccacagcuacgccggcgacgccgccgagcacugcggcaccguggccaacggcgugcugcagaccuucaugagaauggccuggggcggcagauacaucgcccuggacagcggcaagggcaacugggacugcaucaugaccagcuaccaguaccugaucauccagaacaccaccugggaggaccacugccaguucagcagacccagccccaucggcuaccugggccugcugagccagagaaccagagacaucuacaucagcagaagacugcugggcaccuucaccuggacccugagcgacagcgagggcaacgagacccccggcggcuacugccugaccagauggaugcugaucgaggccgagcugaagugcuucggcaacaccgccguggccaagugcaacgagaagcacgacgaggaguucugcgacaugcugagacuguucgacuucugcaagcaggccaucagaagacugaaggccgaggcccagaugagcauccagcugaucaacaaggccgugaacgcccugaucaacgaccagcugaucaugaagaaccaccugagagacaucaugggcauccccuacugcaacuacagcaaguacugguaccugaaccacaccagcagcggcagaaccagccugcccaagugcuggcugaucagcaacggcagcuaccugaacgagacccaguucagcgacgacaucgagcagcaggccgacaacaugaucaccgagaugcugcagaaggaguacaucgagagacagggcaagaccccccugggccugguggacaucuucaucuucagcaccagcuucuaccugaucagcaucuuccugcaccugaucaagauccccacccacagacacaucgugggcaagcccugccccaagccccacagacugaaccacaugggcgugugcagcugcggccuguacaagcaccccggcgugcccaccaaguggaagagaugaggacuagucccuguucccagagcccacuuuuuuuucuuuuuuugaaauaaaauagccugucuuucagaucucaaaggcucuuuucagagccaccaaaaaaaaaaaaaaaaaaaaaaaaaaaaaaaaaaaaaaaaaaaaaaaaaaaaaaaaaaaaaaaaaaaaaaaaaaaaaaaaaaaaaaaaaaaaaaaaaaaaa

SEQ ID NO: 37255 - RNA, 1764 nt, Artificial Sequence
  mRNA product Design a-2 (hSL-A100) comprising derived and/or modified sequence from LASV(803213;Clade II)__AAF86703__GPCmut10 (opt4)
aggagaguccgcucagccagguugcagaagcggcuuagcguguguccuaaucuucucucugcguguagguaggccugugccgcaaacaagcuuaccaugggccagaucaucaccuucuuccaggaggugccccacgugaucgaggaggugaugaacaucgugcugaucgcccugagccugcuggccauccugaagggcaucuacaacguggccaccugcggccuguucggccugaucagcuuccugcugcugugcggcagaagcugcagcgugaccuacaagggcguguacgagcugcagacccuggagcugaacauggccaaccugaacaugugcaugccccugagcugcaccaagaacaacagccaccacuacaucauggugggcaacgagaccggccuggagcugacccugaccaacaccagcaucaucaaccacaaguucugcaaccugagcgacgcccacaagaagaaccuguacgaccacgcccugaugagcaucaucagcaccuuccaccugagcauccccaacuucaaccaguacgaggccaugagcugcgacuucaacggcggcaagaucagcgugcaguacaaccugagccacagcuucgccguggacgccgccaaccacugcggcaccaucgccaacggcgugcugcagaccuucaugagaauggccuggggcggcagcuacaucgcccuggacagcggcaagggcaacugggacugcaucaugaccagcuaccaguaccugaucauccagaacaccaccugggaggaccacugccaguucagcagacccagccccaucggcuaccugggccugcugagccagagaaccagagacaucuacaucagcagaagacugcugggcaccuucaccuggacccugagcgacagcgagggcaacgaggcccccggcggcuacugccugaccagauggaugcugaucgaggccgagcugaagugcuucggcaacaccgccguggccaagugcaacgagaagcacgacgaggaguucugcgacaugcugagacuguucgacuucugcaagcaggccaucaagagacugaagaccgaggcccagaugagcauccagcugaucaacaaggccgugaacgcccugaucaacgaccagcugaucaugaagaaccaccugagagacaucaugggcauccccuacugcaacuacagcagauacugguaccugaaccacaccgugaccggcaagaccagccugcccagaugcuggcuggugagcaacggcagcuaccugaacgagacccacuucagcgacgacaucgagcagcaggccgacaacaugaucaccgagaugcugcagaaggaguacauggacagacagggcaagaccccccugggccugguggaccuguucguguucagcaccagcuucuaccugaucagcaucuuccugcaccuggugaagauccccacccacagacacaucgugggcaagcccugccccaagccccacagacugaaccacaugggcaucugcagcugcggccuguacaagcaccccggcgugcccgugaaguggaagagaugaggacuagucccuguucccagagcccacuuuuuuuucuuuuuuugaaauaaaauagccugucuuucagaucucaaaggcucuuuucagagccaccaaaaaaaaaaaaaaaaaaaaaaaaaaaaaaaaaaaaaaaaaaaaaaaaaaaaaaaaaaaaaaaaaaaaaaaaaaaaaaaaaaaaaaaaaaaaaaaaaaaaa

SEQ ID NO: 37256 - RNA, 1764 nt, Artificial Sequence
  mRNA product Design a-2 (hSL-A100) comprising derived and/or modified sequence from LASV(GA391;Clade III)__CAA36645__GPCmut10 (opt4)
aggagaguccgcucagccagguugcagaagcggcuuagcguguguccuaaucuucucucugcguguagguaggccugugccgcaaacaagcuuaccaugggccagaucgugaccuucuuccaggaggugccccacgugaucgaggaggugaugaacaucgugcugaucgcccugagcauccuggccauccugaagggccuguacaacguggccaccugcggccugaucggccuggugaccuuccugcugcugagcggcagaagcugcagccugaucuacaagggcaccuacgagcugcagacccuggagcugaacauggagacccugaacaugugcaugccccugagcugcaccaagaacaacagccaccacuacaucagagugggcaacgagaccggccuggagcugacccugaccaacaccagcauccugaaccacaaguucugcaaccugagcgacgcccacaagagaaaccuguacgaccacagccugaugagcaucaucagcaccuuccaccugagcauccccaacuucaaccaguacgaggccaugagcugcgacuucaacggcggcaagaucaccgugcaguacaaccugagccacagcuucgccguggacgccgccggccacugcggcacccuggccaacggcgugcugcagaccuucaugagaauggccuggggcggcagcuacaucgcccuggacagcggcagaggcaacugggacugcaucaugaccagcuaccaguaccugaucauccagaacaccaccugggacgaccacugccaguucagcagacccagccccaucggcuaccugggccugcugagccagagaaccagagacaucuacaucagcagaagacugcugggcaccuucaccuggacccugagcgacagcgagggcaacgagacccccggcggcuacugccugaccagauggaugcugaucgaggccgagcugaagugcuucggcaacaccgccguggccaagugcaacgagaagcacgacgaggaguucugcgacaugcugagacuguucgacuucugcaagcaggccaucagaagacugaagaccgaggcccagaugagcauccagcugaucaacaaggccgugaacgcccugaucaacgaccagcugaucaugaagaaccaccugagagacaucaugggcauccccuacugcaacuacagcagauacugguaccugaaccacaccagcaccggcaagaccagccugcccagaugcuggcugaucagcaacggcagcuaccugaacgagaccaaguucagcgacgacaucgagcagcaggccgacaacaugaucaccgagaugcugcagaaggaguacaucgacagacagggcaagaccccccugggccugguggaccuguucguguucagcaccagcuucuaccugaucagcaucuuccugcaccuggugaagauccccacccacagacacaucgugggcaagcccugccccaagccccacagacugaaccacaugggcaucugcagcugcggccuguacaagcagcccggcgugcccgugagauggaagagaugaggacuagucccuguucccagagcccacuuuuuuuucuuuuuuugaaauaaaauagccugucuuucagaucucaaaggcucuuuucagagccaccaaaaaaaaaaaaaaaaaaaaaaaaaaaaaaaaaaaaaaaaaaaaaaaaaaaaaaaaaaaaaaaaaaaaaaaaaaaaaaaaaaaaaaaaaaaaaaaaaaaaa

SEQ ID NO: 37257 - RNA, 1767 nt, Artificial Sequence
  mRNA product Design a-2 (hSL-A100) comprising derived and/or modified sequence from LASV(AV;Clade V)__CCA30314__GPCmut10 (opt4)
aggagaguccgcucagccagguugcagaagcggcuuagcguguguccuaaucuucucucugcguguagguaggccugugccgcaaacaagcuuaccaugggccagaucgugaccuucuuccaggaggugccccacgugaucgaggaggugaugaacaucgugcugaucgcccugagcauccuggccgugcugaagggccuguacaacaucgccaccugcggccugaucggccugaucaccuuccugcugcugugcggcagaagcugcagcagcaaccuguacaagggcguguacgagcugcagagccuggaccugaacauggagacccugaacaugugcaugccccugagcugcaccaagaacaacagccaccacuacaucagagugggcaacgacaccggccuggagcugacccugaccaacaccagcauccugaaccacaaguucugcaaccugagcgacgcccacaagaaggaccuguacgaccacgcccugaugagcaucaucagcaccuuccaccugagcauccccaacuucaaccaguacgaggccaugagcugcgacuucaacggcggcaagaucagcgugcaguacaaccugagccacagcuacgccaucgacgccgccaaccacugcggcaccguggccaacggcauccugcagaccuucaugagaauggccuggggcggcagcuacaucgcccuggacagcggcagaggcaacugggacugcaucaugaccagcuaccaguaccugaucauccagaacaccaccugggagaaccacugccaguucagcagacccagccccaucggcuaccugggccugcugagccagagaaccagagacaucuacaucagcagaagacugcugggcaccuucaccuggacccugagcgacagcgagggcaacgccacccccggcggcuacugccugaccagauggaugcugaucgaggccgagcugaagugcuucggcaacaccgccguggccaagugcaacgagaagcacgacgaggaguucugcgacaugcugagacuguucgacuucugcaagcaggccaucagcagacugaagagcgaggcccagaugagcauccagcugaucaacaaggccgugaacgcccugaucaacgaccagcugaucaugaagaaccaccugagagacaucaugggcauccccuacugcaacuacagcaaguacugguaccugaaccacaccaucaccggcaagaccagccugcccaagugcuggcuggugagcaacggcagcuaccugaacgagacccacuucagcgacgacaucgagcagcaggccgacaacaugaucaccgagaugcugcagaaggaguacauggagagacagggcaagaccccccugggccugguggaccuguucguguucagcaccagcuucuaccugaucagcaucuuccugagacuggugaagauccccacccacagacacaucgugggcaagcccugccccaagccccacagacugaaccacaugggcaucugcagcugcggccuguacaagcagcccggcgugcccgugagauggaagagaugaggacuagucccuguucccagagcccacuuuuuuuucuuuuuuugaaauaaaauagccugucuuucagaucucaaaggcucuuuucagagccaccaaaaaaaaaaaaaaaaaaaaaaaaaaaaaaaaaaaaaaaaaaaaaaaaaaaaaaaaaaaaaaaaaaaaaaaaaaaaaaaaaaaaaaaaaaaaaaaaaaaaa

SEQ ID NO: 37258 - RNA, 1764 nt, Artificial Sequence
  mRNA product Design a-2 (hSL-A100) comprising derived and/or modified sequence from LASV(Togo/2016/7082;Clade VI)__AMR44577__GPCmut10 (opt4)
aggagaguccgcucagccagguugcagaagcggcuuagcguguguccuaaucuucucucugcguguagguaggccugugccgcaaacaagcuuaccaugggccagaucaucaccuucuuccaggaggugccccacgugaucgaggaggugaugaacaucgugcugaucgcccugagccugcuggccauccugaagggcguguacaacguggccaccugcggcaucaucggccuggugaccuuccuguuccugugcggcagaagcugcagccugaucuacaagggcagcuacgagcugcagacccuggagcugaacauggagacccugaacaugugcaugccccugagcugcaccaagaacagcagccaccacuacaucagagugggcaacgagaccggccuggagcugacccugaccaacaccagcaucaucaaccacaaguucugcaaccugagcgacgcccacaagagaaaccuguacgaccacgcccugaugagcauccugagcaccuuccaccugagcauccccaacuucaaccaguacgaggccaugagcugcgacuucaacggcggcaagaucagcgugcaguacaaccugagccacgccuacgccguggacgccgccgagcacugcggcaccguggccaacggcgugcugcagaccuucaugagaauggccuggggcggcagcuacaucgcccuggacagcggcagaggcaacugggacugcaucaugaccagcuaccaguaccugaucauccagaacaccaccugggaggaccacugccaguucagcagacccagccccaucggcuaccugggccugcugagccagagaaccagagacaucuacaucagcagaagacugcugggcaccuucaccuggacccugagcgacagcgagggcaacgagacccccggcggcuacugccugaccagauggaugcugaucgaggccgagcugaagugcuucggcaacaccgccguggccaagugcaacgagaagcacgacgaggaguucugcgacaugcugagacuguucgacuucugcaagcaggccauccagagacugaagagcgaggcccagaugagcauccagcugaucaacaaggccgugaacgcccugaucaacgaccagcugaucaugaagaaccaccugagagacaugaugggcauccccuacugcaacuacagcaaguacugguaccugaaccacaccagcagcggcagaaccagccugcccaagugcuggcuggugagcaacggcagcuaccugaacgagacccacuucagcgacgacaucgagcagcaggccgacaacaugaucaccgagaugcugcagaaggaguacaucgacagacagggcaagaccccccugggccugguggaccuguucguguucagcaccagcuucuaccugaucagcaucuuccugcaccugaucaagauccccacccacagacacaucgugggcaagcccugccccaagccccacagacugaaccacaugggcaucugcagcugcggccuguacaagcagcccggcgugcccaccagauggaagagaugaggacuagucccuguucccagagcccacuuuuuuuucuuuuuuugaaauaaaauagccugucuuucagaucucaaaggcucuuuucagagccaccaaaaaaaaaaaaaaaaaaaaaaaaaaaaaaaaaaaaaaaaaaaaaaaaaaaaaaaaaaaaaaaaaaaaaaaaaaaaaaaaaaaaaaaaaaaaaaaaaaaaa

SEQ ID NO: 37259 - RNA, 1764 nt, Artificial Sequence
  mRNA product Design a-2 (hSL-A100) comprising derived and/or modified sequence from LASV(KAK-428;Clade n.d. (VII))__ANH09740__GPCmut10 (opt4)
aggagaguccgcucagccagguugcagaagcggcuuagcguguguccuaaucuucucucugcguguagguaggccugugccgcaaacaagcuuaccaugggccagaucgugaccuucuuccaggaggugccccacgugaucgaggaggugaugaacaucgugcugaucgcccugagccugcuggccauccugaagggccuguacaacuucgccaccugcggcgugaucggccugaucaccuuccugcugcugugcggcagaagcugcagcgccaccuacaagggccaguacgagcugcagacccuggagcugaacauggagagccugaacaugugcaugccccugagcugcaccaagaacaacagccaccacuacaucagagccggcaacaacaccggccuggagcugacccugaccaacaccagcaucaucagccacaaguucugcaaccugagcgacgcccacaagaagaaccuguacgaccacacccugaugagcaucaucaccaccuuccaccugagcauccccaacuucaaccaguacgaggccaugagcugcgacuucaacggcggcaagaucagcauccaguacaaccugagccacagcuacgccggcgacgccgcccagcacugcggcaccguggccaacggcgugcugcagaccuucaugagaauggccuggggcggcagcuaccuggcccuggacagcggcagaagaggcugggacugcaucaucagcagcuaccaguaccugaucauccagaacaccaccugggacgaccacugccaguucagcagacccagccccaucggcuaccugggcuucgugagccagaagaccagagacaucuacaucagcagaagacugcugggcaccuucaccuggacccugagcgacagcgagggccacgacaugcccggcggcuacugccugaccagauggaugcugaucgaggccgaccugaagugcuucggcaacaccgccguggccaagugcaacgagaagcacgacgaggaguucugcgacauguggagacuguucgacuucugcaagcaggccauccagagacugaaggccgaggcccagaugaacauccagcugaucaacaaggccgugaacgcccugaucaacgaccagcugaugaugaagaaccaccugagagacaucaugggcauccccuacugcaacuacagcaaguucugguaccugaacaacaccaccaccggcagaaccagccugcccagaugcuggcugaucagcaacggcagcuaccugaacgagacccacuucagcgacgacaucgagcagcaggccgacaacaugaucaccgagaugcugcagaaggaguacauggacagacagggcaagaccccccugggccugguggaccuguucguguucagcaccagcuucuaccugaucaccaucuuccugcaccuggugaagauccccacccacagacacaucgugggcaagcccugccccaagccccacagacugaaccacaugggcaucugcagcugcggccuguacaagcagcccggcgugcccgugagauggaagagaugaggacuagucccuguucccagagcccacuuuuuuuucuuuuuuugaaauaaaauagccugucuuucagaucucaaaggcucuuuucagagccaccaaaaaaaaaaaaaaaaaaaaaaaaaaaaaaaaaaaaaaaaaaaaaaaaaaaaaaaaaaaaaaaaaaaaaaaaaaaaaaaaaaaaaaaaaaaaaaaaaaaaa

SEQ ID NO: 37260 - RNA, 1764 nt, Artificial Sequence; identical to SEQ ID NO: 37254
  mRNA product Design a-2 (hSL-A100) comprising derived and/or modified sequence from LASV(Pinneo-NIG-1969;Clade I)__AIT17836__GPCmut10 (opt4)

SEQ ID NO: 37261 - RNA, 1764 nt, Artificial Sequence
  mRNA product Design a-2 (hSL-A100) comprising derived and/or modified sequence from LASV(ISTH0009-NIG-2011;Clade II)__AIT17404__GPCmut10 (opt4)
aggagaguccgcucagccagguugcagaagcggcuuagcguguguccuaaucuucucucugcguguagguaggccugugccgcaaacaagcuuaccaugggccagaucaucaccuucuuccaggaggugccccacgugaucgaggaggugaugaacaucgugcugaucgcccugagccugcuggccauccugaagggcaucuacaacguggccaccugcggccuguucggccuggugagcuuccugcugcugugcggcagaagcugcagcaccaccuacaagggcguguacgagcugcagacccuggagcuggacauggccagccugaacaugugcaugccccugagcugcaccaagaacaacagccaccacuacaucauggugggcaacgagaccggccuggagcugacccugaccaacaccagcaucaucaaccacaaguucugcaaccugagcgacgcccacaagaagaaccuguacgaccacgcccugaugagcaucaucagcaccuuccaccugagcauccccaacuucaaccaguacgaggccaugagcugcgacuucaacggcggcaagaucagcgugcaguacaaccugagccacgccuacgccguggacgccgccaaccacugcggcaccaucgccaacggcgugcugcagaccuucaugagaauggccuggggcggcagcuacaucgcccuggacagcggcaagggcagcugggacugcaucaugaccagcuaccaguaccugaucauccagaacaccaccugggaggaccacugccaguucagcagacccagccccaucggcuaccugggccugcugagccagagaaccagagacaucuacaucagcagaagacugcugggcaccuucaccuggacccugagcgacagcgagggcaacgagacccccggcggcuacugccugaccagauggaugcugaucgaggccgagcugaagugcuucggcaacaccgccguggccaagugcaacgagaagcacgacgaggaguucugcgacaugcugagacuguucgacuucugcaagcaggccaucagaagacugaagaccgaggcccagaugagcauccagcugaucaacaaggccgugaacgcccugaucaacgaccagcugaucaugaagaaccaccugagagacaucaugggcauccccuacugcaacuacagcaaguacugguaccugaaccacaccgugaccggcaagaccagccugcccagaugcuggcuggugagcaacggcagcuaccugaacgagacccacuucagcgacgacaucgagcagcaggccgacaacaugaucaccgagcugcugcagaaggaguacauggacagacagggcaagaccccccugggccugguggaccuguucguguucagcaccagcuucuaccugaucagcaucuuccugcaccugaucaagauccccacccacagacacaucaccggcaagcccugccccaagccccacagacugaaccacaugggcaucugcagcugcggccuguacaagcaccccggcgugcccgugaaguggaagagaugaggacuagucccuguucccagagcccacuuuuuuuucuuuuuuugaaauaaaauagccugucuuucagaucucaaaggcucuuuucagagccaccaaaaaaaaaaaaaaaaaaaaaaaaaaaaaaaaaaaaaaaaaaaaaaaaaaaaaaaaaaaaaaaaaaaaaaaaaaaaaaaaaaaaaaaaaaaaaaaaaaaaa

SEQ ID NO: 37262 - RNA, 1764 nt, Artificial Sequence
  mRNA product Design a-2 (hSL-A100) comprising derived and/or modified sequence from LASV(ISTH2010-NIG-2012;Clade II)__AIT17482__GPCmut10 (opt4)
aggagaguccgcucagccagguugcagaagcggcuuagcguguguccuaaucuucucucugcguguagguaggccugugccgcaaacaagcuuaccaugggccagaucaucaccuucuuccaggaggugccccacgugaucgaggaggugaugaacaucgugcugaucgcccugagccugcuggccauccugaagggcaucuacaacguggccaccugcggccuguucggccuggugagcuuccugcugcugugcggcagaagcugcagcaccaccuacaagggcguguacgagcugcagacccuggagcuggacauggccagccugaacaugugcaugccccugagcugcaccaagaacaacagccaccacuacaucauggugggcaacgagaccggccuggagcugacccugaccaacaccagcaucaucaaccacaaguucugcaaccugagcgacgcccacaagaagaaccuguacgaccacgcccugaugagcaucaucagcaccuuccaccugagcauccccaacuucaaccaguacgaggccaugagcugcgacuucaacggcggcaagaucagcgugcaguacaaccugagccacgccuacgccguggacgccgccaaccacugcggcaccaucgccaacggcgugcugcagaccuucaugagaauggccuggggcggcagcuacaucgcccuggacagcggcaagggcagcugggacugcaucaugaccagcuaccaguaccugaucauccagaacaucaccugggaggaccacugccaguucagcagacccagccccaucggcuaccugggccugcugagccagagaaccagagacaucuacaucagcagaagacugcugggcaccuucaccuggacccugagcgacagcgagggcaacgagacccccggcggcuacugccugaccagauggaugcugaucgaggccgagcugaagugcuucggcaacaccgccguggccaagugcaacgagaagcacgacgaggaguucugcgacaugcugagacuguucgacuucugcaagcaggccaucagaagacugaagaccgaggcccagaugagcauccagcugaucaacaaggccgugaacgcccugaucaacgaccagcugaucaugaagaaccaccugagagacaucaugggcauccccuacugcaacuacagcaaguacugguaccugaaccacaccgugaccggcaagaccagccugcccagaugcuggcuggugagcaacggcagcuaccugaacgagacccacuucagcgacgacaucgagcagcaggccgacaacaugaucaccgagcugcugcagaaggaguacaucgacagacagggcaagaccccccugggccugguggaccuguucguguucagcaccagcuucuaccugaucagcaucuuccugcaccuggugaagauccccacccacagacacguggugggcaagcccugccccaagccccacagacugaaccacaugggcaucugcagcugcggccuguacaagcaccccggcgugcccgugaaguggaagagaugaggacuagucccuguucccagagcccacuuuuuuuucuuuuuuugaaauaaaauagccugucuuucagaucucaaaggcucuuuucagagccaccaaaaaaaaaaaaaaaaaaaaaaaaaaaaaaaaaaaaaaaaaaaaaaaaaaaaaaaaaaaaaaaaaaaaaaaaaaaaaaaaaaaaaaaaaaaaaaaaaaaaa

SEQ ID NO: 37263 - RNA, 1764 nt, Artificial Sequence
  mRNA product Design a-2 (hSL-A100) comprising derived and/or modified sequence from LASV(Lassa virus/H.sapiens-wt/NGA/2015/ISTH_0543;Clade II)__AVO03639__GPCmut10 (opt4)
aggagaguccgcucagccagguugcagaagcggcuuagcguguguccuaaucuucucucugcguguagguaggccugugccgcaaacaagcuuaccaugggccagaucaucaccuucuuccaggaggugccccacgugaucgaggaggugaugaacaucgugcugaucgcccugagccugcuggccauccugaagggcaucuacaacguggccaccugcggccuguucggccuggugagcuuccugcugcugugcggcagaagcugcagcaccaccuacaagggcguguacgagcugcagacccuggagcuggacauggccaaccugaacaugugcaugccccugagcugcaccaagaacaacagccaccacuacaucauggugggcaacgagaccggccuggagcugacccugaccaacaccagcaucaucaaccacaaguucugcaaccugagcgacgcccacaagaagaaccuguacgaccacgcccugaugagcaucaucagcaccuuccaccugagcauccccaacuucaaccaguacgaggccaugagcugcgacuucaacggcggcaagaucagcgugcaguacaaccugagccacaccuacgccguggacgccgccaaccacugcggcaccaucgccaacggcgugcugcagaccuucaugagaauggccuggggcggcagcuacaucgcccuggacagcggcaagggcagcugggacugcaucaugaccagcuaccaguaccuggugauccagaacaccaccugggaggaccacugccaguucagcagacccagccccaucggcuaccugggccugcugagccagagaaccagagacaucuacaucagcagaagacugcugggcaccuucaccuggacccugagcgacagcgagggcaacgagacccccggcggcuacugccugaccagauggaugcugaucgaggccgagcugaagugcuucggcaacaccgccguggccaagugcaacgagaagcacgacgaggaguucugcgacaugcugagacuguucgacuucugcaagcaggccaucagaagacugaagaccgaggcccagaugagcauccagcugaucaacaaggccgugaacgcccugaucaacgaccagcugaucaugaagaaccaccugagagacaucaugggcauccccuacugcaacuacagcaaguacugguaccugaaccacaccgugaccggcaagaccagccugcccagaugcuggcuggugagcaacggcagcuaccugaacgagacccacuucagcgacgacaucgagcagcaggccgacaacaugaucaccgagcugcugcagaaggaguacaucgacagacagggcaagaccccccugggccugguggaccuguucguguucagcaccagcuucuaccugaucagcaucuuccugcaccuggugaagauccccacccacagacacaucaccggcaagcccugccccaagccccacagacugaaccacaugggcaucugcagcugcggccuguacaagcaccccggcgugcccgugaaguggaagagaugaggacuagucccuguucccagagcccacuuuuuuuucuuuuuuugaaauaaaauagccugucuuucagaucucaaaggcucuuuucagagccaccaaaaaaaaaaaaaaaaaaaaaaaaaaaaaaaaaaaaaaaaaaaaaaaaaaaaaaaaaaaaaaaaaaaaaaaaaaaaaaaaaaaaaaaaaaaaaaaaaaaaa

SEQ ID NO: 37264 - RNA, 1764 nt, Artificial Sequence
  mRNA product Design a-2 (hSL-A100) comprising derived and/or modified sequence from LASV(Lassa virus/H.sapiens-wt/NGA/2016/ISTH_0009;Clade II)__AVO03571__GPCmut10 (opt4)
aggagaguccgcucagccagguugcagaagcggcuuagcguguguccuaaucuucucucugcguguagguaggccugugccgcaaacaagcuuaccaugggccagaucaucaccuucuuccaggaggugccccacgugaucgaggaggugaugaacaucgugcugaucgcccugagccugcuggccauccugaagggcaucuacaacguggccaccugcggccugcugggccuggugagcuuccugcugcugugcggcagaagcugcagcaccaccuacaagggcguguacgagcugcagacccuggagcuggacauggccagccugaacaugugcaugccccugagcugcaccaagaacaacagccaccacuacaucauggugggcaacgagaccggccuggagcugacccugaccaacaccagcaucaucaaccacaaguucugcaaccugagcgacgcccacaagaagaaccuguacgaccacgcccugaugagcaucaucagcaccuuccaccugagcauccccaacuucaaccaguacgaggccaugagcugcgacuucaacggcggcagaaucagcgugcaguacaaccugagccacagcuacgccguggacgccgccaaccacugcggcaccaucgccaacggcgugcugcagaccuucaugagaauggccuggggcggcagcuacaucgcccuggacagcggcaagggcagcugggacugcaucaugaccagcuaccaguaccugaucauccagaacaccaccugggaggaccacugccaguucagcagacccagccccaucggcuaccugggccugcugagccagagaaccagagacaucuacaucagcagaagacugcugggcaccuucaccuggacccugagcgacagcgagggcaacgagacccccggcggcuacugccugaccagauggaugcugaucgaggccgagcugaagugcuucggcaacaccgccguggccaagugcaacgagaagcacgacgaggaguucugcgacaugcugagacuguucgacuucugcaagcaggccaucagaagacugaagaccgaggcccagaugagcauccagcugaucaacaaggccgugaacgcccugaucaacgaccagcugaucaugaagaaccaccugagagacaucaugggcauccccuacugcaacuacagcaaguacugguaccugaaccacaccgugaccggcaagaccagccugcccagaugcuggcuggugagcaacggcagcuaccugaacgagacccacuucagcgacgacaucgagcagcaggccgacaacaugaucaccgagcugcugcagaaggaguacaucgacagacagggcaagaccccccugggccugguggaccuguucguguucagcaccagcuucuaccugaucagcaucuuccugcaccuggugaagauccccacccacagacacaucaccggcaagcccugccccaagccccacagacugaaccacaugggcaucugcagcugcggccuguacaaccaccccggcgugcccgugaaguggaagagaugaggacuagucccuguucccagagcccacuuuuuuuucuuuuuuugaaauaaaauagccugucuuucagaucucaaaggcucuuuucagagccaccaaaaaaaaaaaaaaaaaaaaaaaaaaaaaaaaaaaaaaaaaaaaaaaaaaaaaaaaaaaaaaaaaaaaaaaaaaaaaaaaaaaaaaaaaaaaaaaaaaaaa

SEQ ID NO: 37265 - RNA, 1764 nt, Artificial Sequence
  mRNA product Design a-2 (hSL-A100) comprising derived and/or modified sequence from LASV(Lassa virus/H.sapiens-wt/NGA/2016/ISTH_0017;Clade II)__AVO03567__GPCmut10 (opt4)
aggagaguccgcucagccagguugcagaagcggcuuagcguguguccuaaucuucucucugcguguagguaggccugugccgcaaacaagcuuaccaugggccagaucaucaccuucuuccaggaggugccccacgugaucgaggaggugaugaacaucgugcugaucgcccugagccugcuggccauccugaagggcaucuacaacguggccaccugcggccuguucggccuggugagcuuccugcugcugugcggcagaagcugcagcaccaccuacaagggcguguacgagcugcagacccuggagcuggacauggccagccugaacaugugcaugccccugagcugcaccaagaacaacagccaccacuacaucauggugggcaacgagaccggccuggagcugacccugaccaacaccagcaucaucaaccacaaguucugcaaccugagcgacgcccacaagaagaaccuguacgaccacgcccugaugagcaucaucagcaccuuccaccugagcauccccaacuucaaccaguacgaggccaugagcugcgacuucaacggcggcaagaucagcgugcaguacaaccugagccacaccuacgccaucgacgccgccaaccacugcggcaccaucgccaacggcgugcugcagaccuucaugagaauggccuggggcggcagcuacaucgcccuggacagcggcaagggcagcugggacugcaucaugaccagcuaccaguaccugaucauccagaacaccaccugggaggaccacugccaguucagcagacccagccccaucggcuaccugggccugcugagccagagaaccagagacaucuacaucagcagaagacugcugggcaccuucaccuggacccugagcgacagcgagggcaacgagacccccggcggcuacugccugaccagauggaugcugaucgaggccgagcugaagugcuucggcaacaccgccguggccaagugcaacgagaagcacgacgaggaguucugcgacaugcugagacuguucgacuucugcaagcaggccaucagaagacugaagaccgaggcccagaugagcauccagcugaucaacaaggccgugaacgcccugaucaacgaccagcugaucaugaagaaccaccugagagacaucaugggcauccccuacugcaacuacagcaaguacugguaccugaaccacaccgugaccggcaagaccagccugcccagaugcuggcuggugagcaacggcagcuaccugaacgagacccacuucagcgacgacaucgagcagcaggccgacaacaugaucaccgagcugcugcagaaggaguacauggacagacagggcaagaccccccugggccugguggaccuguucguguucagcaccagcuucuaccugaucagcaucuuccugcaccuggugagaauccccacccacagacacgugaucggcaagcccugccccaagccccacagacugaaccacaugggcaucugcagcugcggccuguacaagcaccccggcgugcccgugaaguggaagagaugaggacuagucccuguucccagagcccacuuuuuuuucuuuuuuugaaauaaaauagccugucuuucagaucucaaaggcucuuuucagagccaccaaaaaaaaaaaaaaaaaaaaaaaaaaaaaaaaaaaaaaaaaaaaaaaaaaaaaaaaaaaaaaaaaaaaaaaaaaaaaaaaaaaaaaaaaaaaaaaaaaaaa

SEQ ID NO: 37266 - RNA, 1764 nt, Artificial Sequence
  mRNA product Design a-2 (hSL-A100) comprising derived and/or modified sequence from LASV(Lassa virus/H.sapiens-wt/NGA/2018/ISTH_0959;Clade II)__AVV65099__GPCmut10 (opt4)
aggagaguccgcucagccagguugcagaagcggcuuagcguguguccuaaucuucucucugcguguagguaggccugugccgcaaacaagcuuaccaugggccagaucaucaccuucuuccaggaggugccccacgugaucgaggaggugaugaacaucgugcugaucgcccugagccugcuggccauccugaagggcaucuacaacguggugaccugcggccuguucggccuggugagcuuccugcugcugugcggcagaagcugcagcaccaccuacaagggcguguacgagcugcagacccuggagcuggacauggccagccugaacaugugcaugccccugagcugcaccaagaacaacagccaccacuacaucauggugggcaacgagaccggccuggagcugacccugaccaacaccagcaucaucaaccacaaguucugcaaccugagcgacgcccacaagaagaaccuguacgaccacgcccugaugagcaucaucagcaccuuccaccugagcauccccaacuucaaccaguacgaggccaugagcugcgacuucaacggcggcaagaucagcgugcaguacaaccugagccacgccuacgccaucgacgccgccaaccacugcggcaccaucgccaacggcgugcugcagaccuucaugagaauggccuggggcggcagcuacaucgcccuggacagcggcaagggcagcugggacugcaucaugaccagcuaccaguaccugaucauccagaacaccaccugggaggaccacugccaguucagcagacccagccccaucggcuaccugggccugcugagccagagaaccagagacaucuacaucagcagaagacugcugggcaccuucaccuggacccugagcgacagcgagggcaacgagacccccggcggcuacugccugaccagauggaugcugaucgaggccgagcugaagugcuucggcaacaccgccguggccaagugcaacgagaagcacgacgaggaguucugcgacaugcugagacuguucgacuucugcaagcaggccaucagaagacugaagaccgaggcccagaugagcauccagcugaucaacaaggccgugaacgcccugaucaacgaccagcugaucaugaagaaccaccugagagacaucaugggcauccccuacugcaacuacagcaaguacugguaccugaaccacaccgugaccggcaagaccagccugcccagaugcuggcuggugagcaacggcagcuaccugaacgagacccacuucagcgacgacaucgagcagcaggccgacaacaugaucaccgagcugcugcagaaggaguacaucgacagacagggcaagaccccccugggccugguggaccuguucguguucagcaccagcuucuaccugaucagcaucuuccugcaccuggugaagauccccacccacagacacgugaucggcaagcccugccccaagccccacagacugaaccacaugggcaucugcagcugcggccuguacaagcaccccggcgugcccgugaaguggaagagaugaggacuagucccuguucccagagcccacuuuuuuuucuuuuuuugaaauaaaauagccugucuuucagaucucaaaggcucuuuucagagccaccaaaaaaaaaaaaaaaaaaaaaaaaaaaaaaaaaaaaaaaaaaaaaaaaaaaaaaaaaaaaaaaaaaaaaaaaaaaaaaaaaaaaaaaaaaaaaaaaaaaaa

SEQ ID NO: 37267 - RNA, 1764 nt, Artificial Sequence
  mRNA product Design a-2 (hSL-A100) comprising derived and/or modified sequence from LASV(LASV003-NIG-2008;Clade II)__AIT17580__GPCmut10 (opt4)
aggagaguccgcucagccagguugcagaagcggcuuagcguguguccuaaucuucucucugcguguagguaggccugugccgcaaacaagcuuaccaugggccagaucaucaccuucuuccaggaggugccccacgugaucgaggaggugaugaacaucgugcugaucgcccugagccugcuggccauccugaagggcaucuacaacguggccaccugcggccuguucggccuggugagcuuccugcugcugugcggcagaagcugcagcaccaccuacaagggcguguacgagcugcagacccuggagcuggacauggccagccugaacaugugcaugccccugagcugcaccaagaacaacagccaccacuacaucauggugggcaacgagaccggccuggagcugacccugaccaacaccagcaucaucaaccacaaguucugcaaccugagcgacgcccacaagaagaaccuguacgaccacgcccugaugagcaucaucagcaccuuccaccugagcauccccaacuucaaccaguacgaggccaugagcugcgacuucaacggcggcaagaucagcgugcaguacaaccugagccacaccuacgccguggacgccgccaaccacugcggcaccaucgccaacggcgugcugcagaccuucaugagaauggccuggggcggcagcuacaucgcccuggacagcggcaagggcagcugggacugcaucaugaccagcuaccaguaccugaucauccagaacaccaccugggaggaccacugccaguucagcagacccagccccaucggcuaccugggccugcugagccagagaaccagagacaucuacaucagcagaagacugcugggcaccuucaccuggacccugagcgacagcgagagcaacgagacccccggcggcuacugccugaccagauggaugcugaucgaggccgagcugaagugcuucggcaacaccgccguggccaagugcaacgagaagcacgacgaggaguucugcgacaugcugagacuguucgacuucugcaagcaggccaucagaagacugaaggccgaggcccagaugagcauccagcugaucaacaaggccgugaacgcccugaucaacgaccagcugaucaugaagaaccaccugagagacaucaugggcauccccuacugcaacuacagcaaguacugguaccugaaccacaccgugaccggcagaaccagccugcccagaugcuggcuggugagcaacggcagcuaccugaacgagacccacuucagcgacgacaucgagcagcaggccgacaacaugaucaccgagcugcugcagaaggaguacauggacagacagggcaagaccccccugggccugguggaccuguucguguucagcaccagcuucuaccugaucagcaucuuccugcaccuggugaagauccccacccacagacacgugaucggcaagcccugccccaagccccacagacugaaccacaugggcaucugcagcugcggccuguacaagcaccccggcgugcccgugaaguggaagagaugaggacuagucccuguucccagagcccacuuuuuuuucuuuuuuugaaauaaaauagccugucuuucagaucucaaaggcucuuuucagagccaccaaaaaaaaaaaaaaaaaaaaaaaaaaaaaaaaaaaaaaaaaaaaaaaaaaaaaaaaaaaaaaaaaaaaaaaaaaaaaaaaaaaaaaaaaaaaaaaaaaaaa

SEQ ID NO: 37268 - RNA, 1764 nt, Artificial Sequence
  mRNA product Design a-2 (hSL-A100) comprising derived and/or modified sequence from LASV(LASV035-NIG-2009;Clade II)__AIT17588__GPCmut10 (opt4)
aggagaguccgcucagccagguugcagaagcggcuuagcguguguccuaaucuucucucugcguguagguaggccugugccgcaaacaagcuuaccaugggccagaucaucaccuucuuccaggaggugccccacgugaucgaggaggugaugaacaucgugcugaucgcccugagccugcuggccauccugaagggcaucuacaacguggccaccugcggccuguucggccuggugagcuuccugcugcugugcggcagaagcugcagcaccaccuacaagggcguguacgagcugcagacccuggagcuggacauggccagccugaacaugugcaugccccugagcugcaccaagaacaacagccaccacuacaucauggugggcaacgagaccggccuggagcugacccugaccaacaccagcaucaucaaccacaaguucugcaaccugagcgacgcccacaagaagaaccuguacgaccacgcccugaugagcaucaucagcaccuuccaccugagcauccccaacuucaaccaguacgaggccaugagcugcgacuucaacggcggcaagaucagcgugcaguacaaccugagccacgccuacgccguggacgccgccaaccacugcggcaccaucgccaacggcgugcugcagaccuucaugagaauggccuggggcggcagcuacaucgcccuggacagcggcaagggcagcugggacugcaucaugaccagcuaccaguaccugaucauccagaacaccaccugggaggaccacugccaguucagcagacccagccccaucggcuaccugggccugcugagccagagaaccagagacaucuacaucagcagaagacugcugggcaccuucaccuggacccugagcgacagcgagggcaacgagacccccggcggcuacugccugaccagauggaugcugaucgaggccgagcugaagugcuucggcaacaccgccguggccaagugcaacgagaagcacgacgaggaguucugcgacaugcugagacuguucgacuucugcaagcaggccaucagaagacugaaggccgaggcccagaugagcauccagcugaucaacaaggccgugaacgcccugaucaacgaccagcugaucaugaagaaccaccugagagacaucaugggcauccccuacugcaacuacagcaaguacugguaccugaaccacaccgugaccggcaagaccagccugcccagaugcuggcuggugagcaacggcagcuaccugaacgagacccacuucagcgacgacaucgagcagcaggccgacaacaugaucaccgagcugcugcagaaggaguacaucgacagacagggcaagaccccccugggccugguggaccuguucguguucagcaccagcuucuaccugaucagcaucuuccugcaccuggugaagauccccacccacagacacgugaucggcaagcccugccccaagccccacagacugaaccacaugggcaucugcagcugcggccuguacaagcaccccggcgugcccgugaaguggaagagaugaggacuagucccuguucccagagcccacuuuuuuuucuuuuuuugaaauaaaauagccugucuuucagaucucaaaggcucuuuucagagccaccaaaaaaaaaaaaaaaaaaaaaaaaaaaaaaaaaaaaaaaaaaaaaaaaaaaaaaaaaaaaaaaaaaaaaaaaaaaaaaaaaaaaaaaaaaaaaaaaaaaaa

SEQ ID NO: 37269 - RNA, 1764 nt, Artificial Sequence
  mRNA product Design a-2 (hSL-A100) comprising derived and/or modified sequence from LASV(LASV1000-NIG-2009;Clade II)__AIT17782__GPCmut10 (opt4)
aggagaguccgcucagccagguugcagaagcggcuuagcguguguccuaaucuucucucugcguguagguaggccugugccgcaaacaagcuuaccaugggccagaucaucaccuucuuccaggaggugccccacgugaucgaggaggugaugaacaucgugcugaucgcccugagccugcuggccauccugaagggcaucuacaacguggccaccugcggccuguucggccuggugagcuuccugcugcugugcggcagaagcugcagcaccaccuacaagggcguguacgagcugcagacccuggagcuggacauggccagccugaacaugugcaugccccugagcugcaccaagaacaacagccaccacuacaucauggugggcaacgagaccggccuggagcugacccugaccaacaccagcaucaucaaccacaaguucugcaaccugagcgacgcccacaagaagaaccuguacgaccacgcccugaugagcaucaucagcaccuuccaccugagcauccccaacuucaaccaguacgaggccaugagcugcgacuucaacggcggcaagaucagcgugcaguacaaccugagccacaccuacgccguggacgccgccaaccacugcggcaccaucgccaacggcgugcugcagaccuucaugagaauggccuggggcggcagcuacaucgcccuggacagcggcaagggcagcugggacugcaucaugaccagcuaccaguaccugaucauccagaacaccaccugggaggaccacugccaguucagcagacccagccccaucggcuaccugggccugcugagccagagaaccagagacaucuacaucagcagaagacugcugggcaccuucaccuggacccugagcgacagcgagggcaacgagacccccggcggcuacugccugaccagauggaugcugaucgaggccgagcugaagugcuucggcaacaccgccguggccaagugcaacgagaagcacgacgaggaguucugcgacaugcugagacuguucgacuucugcaagcaggccaucaagagacugaagaccgaggcccagaugagcauccagcugaucaacaaggccgugaacgcccugaucaacgaccagcugaucaugaagaaccaccugagagacaucaugggcauccccuacugcaacuacagcaaguacugguaccugaaccacaccgugaccggcaagaccagccugcccagaugcuggcuggugagcaacggcagcuaccugaacgagacccacuucagcgacgacaucgagcagcaggccgacaacaugaucaccgagcugcugcagaaggaguacaucgacagacagggcaagaccccccugggccugguggaccuguucguguucagcaccagcuucuaccugaucagcaucuuccugcaccuggugaagauccccacccacagacacguggugggcaagcccugccccaagccccacagacugaaccacaugggcaucugcagcugcggccuguacaagcaccccggcgugcccgugaaguggaagagaugaggacuagucccuguucccagagcccacuuuuuuuucuuuuuuugaaauaaaauagccugucuuucagaucucaaaggcucuuuucagagccaccaaaaaaaaaaaaaaaaaaaaaaaaaaaaaaaaaaaaaaaaaaaaaaaaaaaaaaaaaaaaaaaaaaaaaaaaaaaaaaaaaaaaaaaaaaaaaaaaaaaaa

SEQ ID NO: 37270 - RNA, 1764 nt, Artificial Sequence
  mRNA product Design a-2 (hSL-A100) comprising derived and/or modified sequence from LASV(LASV221-NIG-2010;Clade II)__AIT17624__GPCmut10 (opt4)
aggagaguccgcucagccagguugcagaagcggcuuagcguguguccuaaucuucucucugcguguagguaggccugugccgcaaacaagcuuaccaugggccagaucaucaccuucuuccaggaggugccccacgugaucgaggaggugaugaacaucgugcugaucgcccugagccugcuggccauccugaagggcaucuacaacguggccaccugcggccuguucggccuggugagcuuccugcugcugugcggcagaagcugcagcaccaccuacaagggcguguacgagcugcagacccuggagcuggacauggccagccugaacaugugcaugccccugagcugcaccaagaacaacagccaccacuacaucauggugggcaacgagaccggccuggagcugacccugaccaacaccagcaucaucaaccacaaguucugcaaccugagcgacgcccacaagaagaaccuguacgaccacgcccugaugagcaucaucagcaccuuccaccugagcauccccaacuucaaccaguacgaggccaugagcugcgacuucaacggcggcaagaucagcgugcaguacaaccugagccacaccuacgccaucgacgccgccaaccacugcggcaccaucgccaacggcgugcugcagaccuucaugagaauggccuggggcggcagcuacaucgcccuggacagcggcaagggcagcugggacugcaucaugaccagcuaccaguaccugaucauccagaacaccaccugggaggaccacugccaguucagcagacccagccccaucggcuaccugggccugcugagccagagaaccagagacaucuacaucagcagaagacugcugggcaccuucaccuggacccugagcgacagcgagggcaacgagacccccggcggcuacugccugaccagauggaugcugaucgaggccgagcugaagugcuucggcaacaccgccguggccaagugcaacgagaagcacgacgaggaguucugcgacaugcugagacuguucgacuucugcaagcaggccaucagaagacugaagaccgaggcccagaugagcauccagcugaucaacaaggccgugaacgcccugaucaacgaccagcugaucaugaagaaccaccugagagacaucaugggcauccccuacugcaacuacagcaaguacugguaccugaaccacaccgugaccggcaagaccagccugcccagaugcuggcuggugagcaacggcagcuaccugaacgagacccacuucagcgacgacaucgagcagcaggccgacaacaugaucaccgagaugcugcagaaggaguacauggacagacagggcaagaccccccugggccugguggaccuguucguguucagcaccagcuucuaccugaucagcaucuuccugcaccuggugaagauccccacccacagacacgugaucggcaagcccugccccaagccccacagacugaaccacaugggcaucugcagcugcggccuguacaagcaccccggcgugcccgugaaguggaagagaugaggacuagucccuguucccagagcccacuuuuuuuucuuuuuuugaaauaaaauagccugucuuucagaucucaaaggcucuuuucagagccaccaaaaaaaaaaaaaaaaaaaaaaaaaaaaaaaaaaaaaaaaaaaaaaaaaaaaaaaaaaaaaaaaaaaaaaaaaaaaaaaaaaaaaaaaaaaaaaaaaaaaa

SEQ ID NO: 37271 - RNA, 1764 nt, Artificial Sequence
  mRNA product Design a-2 (hSL-A100) comprising derived and/or modified sequence from LASV(LASV237-NIG-2010;Clade II)__AIT17638__GPCmut10 (opt4)
aggagaguccgcucagccagguugcagaagcggcuuagcguguguccuaaucuucucucugcguguagguaggccugugccgcaaacaagcuuaccaugggccagaucaucaccuucuuccaggaggugccccacgugaucgaggaggugaugaacaucgugcugaucgcccugagccugcuggccauccugaagggcaucuacaacguggccaccugcggccuguucggccuggugagcuuccugcugcugugcggcagaagcugcagcaccaccuacaagggcguguacgagcugcagacccuggagcuggacauggccagccugaacaugugcaugccccugagcugcaccaagaacaacagccaccacuacaucauggugggcaacgagaccggccuggagcugacccugaccaacaccagcaucaucaaccacaaguucugcaaccugagcgacgcccacaagaaggaccuguacgaccacgcccugaugagcaucaucagcaccuuccaccugagcauccccaacuucaaccaguacgaggccaugagcugcgacuucaacggcggcaagaucagcgugcaguacaaccugagccacaccuacgccguggacgccgccaaccacugcggcaccaucgccaacggcgugcugcagaccuucaugagaauggccuggggcggcagcuacaucgcccuggacagcggcaagggcagcugggacugcaucaugaccagcuaccaguaccugaucauccagaacaccaccugggaggaccacugccaguucagcagacccagccccaucggcuaccugggccugcugagccagagaaccagagacaucuacaucagcagaagacugcugggcaccuucaccuggacccugagcgacagcgagggcaacgagacccccggcggcuacugccugaccagauggaugcugaucgaggccgagcugaagugcuucggcaacaccgccguggccaagugcaacgagaagcacgacgaggaguucugcgacaugcugagacuguucgacuucugcaagcaggccaucagaagacugaagaccgaggcccagaugagcauccagcugaucaacaaggccgugaacgcccugaucaacgaccagcugaucaugaagaaccaccugagagacaucaugggcauccccuacugcaacuacagcaaguacugguaccugaaccacaccgugaccggcaagaccagccugcccagaugcuggcuggugagcaacggcagcuaccugaacgagacccacuucagcgacgacaucgagcagcaggccgacaacaugaucaccgagcugcugcagaaggaguacauggacagacagggcaagaccccccugggccugguggaccuguucguguucagcaccagcuucuaccugaucagcaucuuccugcaccugaucaagauccccacccacagacacaucaccggcaagcccugccccaagccccacagacugaaccacaugggcaucugcagcugcggccuguacaagcaccccggcgugcccgugaaguggaagagaugaggacuagucccuguucccagagcccacuuuuuuuucuuuuuuugaaauaaaauagccugucuuucagaucucaaaggcucuuuucagagccaccaaaaaaaaaaaaaaaaaaaaaaaaaaaaaaaaaaaaaaaaaaaaaaaaaaaaaaaaaaaaaaaaaaaaaaaaaaaaaaaaaaaaaaaaaaaaaaaaaaaaa

SEQ ID NO: 37272 - RNA, 1764 nt, Artificial Sequence
  mRNA product Design a-2 (hSL-A100) comprising derived and/or modified sequence from LASV(LASV253-NIG-2011;Clade II)__AIT17670__GPCmut10 (opt4)
aggagaguccgcucagccagguugcagaagcggcuuagcguguguccuaaucuucucucugcguguagguaggccugugccgcaaacaagcuuaccaugggccagaucaucaccuucuuccaggaggugccccacgugaucgaggaggugaugaacaucgugcugaucgcccugagccugcuggccauccugaagggcaucuacaacguggccaccugcggccuguucggccuggugagcuuccugcugcugugcggcagaagcugcagcaccaccuacaagggcguguacgagcugcagacccuggagcuggacauggccagccugaacaugugcaugccccugagcugcaccaagaacaacagccaccacuacaucauggugggcaacgagaccggccuggagcugacccugaccaacaccagcaucaucaaccacaaguucugcaaccugagcgacgcccacaagaagaaccuguacgaccacgcccugaugagcaucaucagcaccuuccaccugagcauccccaacuucaaccaguacgaggccaugagcugcgacuucaacggcggcaagaucagcgugcaguacaaccugagccacaccuacgccguggacgccgccaaccacugcggcaccaucgccaacggcgugcugcagaccuucaugagaauggccuggggcggcagcuacaucgcccuggacagcggcaagggcagcugggacugcaucaugaccagcuaccaguaccugaucauccagaacaccaccugggaggaccacugccaguucagcagacccagccccaucggcuaccugggccugcugagccagagaaccagagacaucuacaucagcagaagacugcugggcaccuucaccuggacccugagcgacagcgagggcaacgagacccccggcggcuacugccugaccagauggaugcugaucgaggccgagcugaagugcuucggcaacaccgccguggccaagugcaacgagaagcacgacgaggaguucugcgacaugcugagacuguucgacuucugcaagcaggccaucagaagacugaaggccgaggcccagaugagcauccagcugaucaacaaggccgugaacgcccugaucaacgaccagcugaucaugaagaaccaccugagagacaucaugggcauccccuacugcaacuacagcaaguacugguaccugaaccacaccgugaccggcagaaccagccugcccagaugcuggcuggugagcaacggcagcuaccugaacgagacccacuucagcgacgacaucgagcagcaggccgacaacaugaucaccgagcugcugcagaaggaguacaucgacagacagggcaagaccccccugggccugguggaccuguucguguucagcaccagcuucuaccugaucagcaucuuccugcaccuggugaagauccccacccacagacacaucaucggcaagcccugccccaagccccacagacugaaccacaugggcaucugcagcugcggccuguacaagcaccccggcgugcccgugaaguggaagagaugaggacuagucccuguucccagagcccacuuuuuuuucuuuuuuugaaauaaaauagccugucuuucagaucucaaaggcucuuuucagagccaccaaaaaaaaaaaaaaaaaaaaaaaaaaaaaaaaaaaaaaaaaaaaaaaaaaaaaaaaaaaaaaaaaaaaaaaaaaaaaaaaaaaaaaaaaaaaaaaaaaaaa

SEQ ID NO: 37273 - RNA, 1764 nt, Artificial Sequence
  mRNA product Design a-2 (hSL-A100) comprising derived and/or modified sequence from LASV(LASV254-NIG-2011;Clade II)__AIT17674__GPCmut10 (opt4)
aggagaguccgcucagccagguugcagaagcggcuuagcguguguccuaaucuucucucugcguguagguaggccugugccgcaaacaagcuuaccaugggccagaucaucaccuucuuccaggaggugccccacgugaucgaggaggugaugaacaucgugcugaucgcccugagccugcuggccauccugaagggcaucuacaacguggccaccugcggccuguucggccuggugagcuuccugcugcugugcggcagaagcugcagcaccaccuacaagggcguguacgagcugcagacccuggagcuggacaugaccaaccugaacaugugcaugccccugagcugcaccaagaacaacagccaccacuacaucauggugggcaacgagaccggccuggagcugacccugaccaacaccagcaucaucaaccacaaguucugcaaccugagcgacgcccacaagaagaaccuguacaaccacgcccugaugagcaucaucagcaccuuccaccugagcauccccaacuucaaccaguacgaggccaugagcugcgacuucaacggcggcaagaucagcgugcaguacaaccugagccacagcuacgccguggacgccgccaaccacugcggcaccaucgccaacggcgugcugcagaccuucaugagaauggccuggggcggcagcuacaucgcccuggacagcggcaagggcaacugggacugcaucaugaccagcuaccaguaccugaucauccagaacaccaccugggaggaccacugccaguucagcagacccagccccaucggcuaccugggccugcugagccagagaaccagagacaucuacaucagcagaagacugcugggcaccuucaccuggacccugagcgacagcgagggcaacgagacccccggcggcuacugccugaccagauggaugcugaucgaggccgagcugaagugcuucggcaacaccgccguggccaagugcaacgagaagcacgacgaggaguucugcgacaugcugagacuguucgacuucugcaagcaggccaucagaagacugaagaccgaggcccaggccaacauccagcugaucaacaaggccgugaacgcccugaucaacgaccagcugaucaugaagaaccaccugagagacaucaugggcauccccuacugcaacuacagcaaguacugguaccugaaccacaccgugaccggcaagaccagccugcccagaugcuggcuggugagcaacggcagcuaccugaacgagacccacuucagcgacgacaucgagcagcaggccgacaacaugaucaccgagcugcugcagaaggaguacauggacagacagggcaagaccccccugggccugguggaccuguucguguucagcaccagcuucuaccugaucagcaucuuccugcaccuggugaagauccccacccacagacacgugaucggcaagcccugccccaagccccacagacugaaccacaugggcaucugcagcugcggccuguacaagcaccccggcgugcccgugaaguggaagagaugaggacuagucccuguucccagagcccacuuuuuuuucuuuuuuugaaauaaaauagccugucuuucagaucucaaaggcucuuuucagagccaccaaaaaaaaaaaaaaaaaaaaaaaaaaaaaaaaaaaaaaaaaaaaaaaaaaaaaaaaaaaaaaaaaaaaaaaaaaaaaaaaaaaaaaaaaaaaaaaaaaaaa

SEQ ID NO: 37274 - RNA, 1764 nt, Artificial Sequence
  mRNA product Design a-2 (hSL-A100) comprising derived and/or modified sequence from LASV(Nig08-A19;Clade III)__ADU56618__GPCmut10 (opt4)
aggagaguccgcucagccagguugcagaagcggcuuagcguguguccuaaucuucucucugcguguagguaggccugugccgcaaacaagcuuaccaugggccagaucgugaccuucuuccaggaggugccccacgugaucgaggaggugaugaacaucgugcugaucgcccugagcauccuggccauccugaagggccuguacaacaucgccaccugcggccugaucggccuggugaccuuccugcugcugagcggcagaagcugcagcaugaccuacaagggcguguacgagcugcagacccuggagcugaacaugaacacccugaacaugugcaugccccugagcugcaccaagaacaacagccaccacuacaucauggugggcaacgagaccggccuggagcugacccugaccaacaccagccugcugcaccacaaguucugcaaccugagcgacgcccacaagaagaaccuguacgaccacacccugaugagcaucaucagcaccuuccaccugagcauccccaacuucaaccaguacgaggccaugagcugcgacuucaacggcggcaagaucaccgugcaguacaaccugagccacagcuacgccaucgacgccgccaaccacugcggcaccguggccaacggcgugcugcagaccuucaugagaauggccuggggcggcagcuacaucgcccuggacagcggcagaggcaagugggacugcaucaugaccagcuaccaguaccugaucauccagaacaccaccugggaggaccacugccaguucagcagacccagccccaucggcuaccugggccugcugagccagagaaccagagacaucuacaucagcagaagacugcugggcaccuucaccuggacccugagcgacagcgagggcaacgagacccccggcggcuacugccugaccagauggaugcugaucgaggccgagcugaagugcuucggcaacaccgccguggccaagugcaacgagaagcacgacgaggaguucugcgacaugcugagacuguucgacuucugcaagcaggccaucagaagacugaaggccgaggcccagaugagcauccagcugaucaacaaggccgugaacgcccugaucaacgaccagcugaucaugaagaaccaccugagagacaucaugggcauccccuacugcaacuacagcaaguacugguaccugaaccacaccagcaccggcagaaccagccugcccagaugcuggcuggugagcaacggcagcuaccugaacgagacccacuucagcgacgacaucgagcagcaggccgacaacaugaucaccgagaugcugcagaaggaguaccuggacagacagggcaagaccccccugggccugguggaccuguucguguucagcaccagcuucuaccugaucagcaucuuccugcaccuggugaagauccccacccacagacacaucgugggcaagcccugccccaagccccacagacugaaccacaugggcaucugcagcugcggccuguacaagcagcccggcgugcccgugagauggaagagaugaggacuagucccuguucccagagcccacuuuuuuuucuuuuuuugaaauaaaauagccugucuuucagaucucaaaggcucuuuucagagccaccaaaaaaaaaaaaaaaaaaaaaaaaaaaaaaaaaaaaaaaaaaaaaaaaaaaaaaaaaaaaaaaaaaaaaaaaaaaaaaaaaaaaaaaaaaaaaaaaaaaaa

SEQ ID NO: 37275 - RNA, 1767 nt, Artificial Sequence
  mRNA product Design a-2 (hSL-A100) comprising derived and/or modified sequence from LASV(G1180-SLE-2010;Clade IV)__AIT17168__GPCmut10 (opt4)
aggagaguccgcucagccagguugcagaagcggcuuagcguguguccuaaucuucucucugcguguagguaggccugugccgcaaacaagcuuaccaugggccagaucgugaccuucuuccaggaggugccccacgugaucgaggaggugaugaacaucgugcugaucgcccugagcauccuggccgugcugaagggccuguacaacuucgccaccugcggccuggugggccugcugaccuuccugcugcugugcggcagaagcugcaccgccagcagauacaagggcguguacgagcugcagacccuggagcugaacauggagacccugaacaugugcaugccccugagcugcaccaagaacaacagccaccacuacaucauggugggcaacgagaccggccuggagcugacccugaccaacaccagcaucaucaaccacaaguucugcaaccugagcgacgcccacaagaagaaccuguacgaccacgcccugaugagcaucaucagcaccuuccaccugagcauccccaacuucaaccaguacgaggccaugagcugcgacuucaacggcggcaagaucagcgugcaguacaaccugagccacagcuacgccggcgacgccgccaaccacugcggcaccguggccaacggcgugcugcagaccuucaugagaauggccuggggcggcagcuacaucgcccuggacagcggccacggcagcugggacugcaucaugaccagcuaccaguaccugaucauccagaacaccaccugggaggaccacugccaguucagcagacccagccccaucggcuaccugggccugcugagccagagaaccagagacaucuacaucagcagaagacugcugggcaccuucaccuggacccugagcgacagcgagggcaaggacacccccggcggcuacugccugaccagauggaugcugaucgaggccgagcugaagugcuucggcaacaccgccguggccaagugcaacgagaagcacgacgaggaguucugcgacaugcugagacuguucgacuucugcaagcaggccauccagagacugaaggccgaggcccagaugagcauccagcugaucaacaaggccgugaacgcccugaucaacgaccagcugaucaugaagaaccaccugagagacaucaugggcauccccuacugcaacuacagcaaguacugguaccugaaccacaccaccaccggcaagaccagccugcccaagugcuggcuggugagcaacggcagcuaccugaacgagacccacuucagcgacgacaucgagcagcaggccgacaacaugaucaccgagaugcugcagaaggaguacauggagagacagggcaagaccccccugggccugguggaccuguucguguucagcaccagcuucuaccugaucagcaucuuccugcaccuggugaagauccccacccacagacacaucgugggcaagagcugccccaagccccacagacugaaccacaugggcaucugcagcugcggccuguacaagcagcccggcgugcccgugaaguggaagagaugaggacuagucccuguucccagagcccacuuuuuuuucuuuuuuugaaauaaaauagccugucuuucagaucucaaaggcucuuuucagagccaccaaaaaaaaaaaaaaaaaaaaaaaaaaaaaaaaaaaaaaaaaaaaaaaaaaaaaaaaaaaaaaaaaaaaaaaaaaaaaaaaaaaaaaaaaaaaaaaaaaaaa

SEQ ID NO: 37276 - RNA, 1767 nt, Artificial Sequence
  mRNA product Design a-2 (hSL-A100) comprising derived and/or modified sequence from LASV(G1442-SLE-2011;Clade IV)__AIT17180__GPCmut10 (opt4)
aggagaguccgcucagccagguugcagaagcggcuuagcguguguccuaaucuucucucugcguguagguaggccugugccgcaaacaagcuuaccaugggccagaucgugaccuucuuccaggaggugccccacgugaucgaggaggugaugaacaucgugcugaucgcccugagcauccuggccgugcugaagggccuguacaacguggccaccugcggccugaucggccuggugaccuuccugcugcugugcggcagaagcugcaccaccacccuguacaagggcguguacgagcugcagacccuggagcugaacauggagacccugaacaugugcaugccccugagcugcaccaagaacaacagccaccacuacaucagagugggcaacgagaccggccuggagcugacccugaccaacaccagcaucaucaaccacaaguucugcaaccugagcgacgcccacaagaagaaccuguacgaccacgcccugaugagcaucaucagcaccuuccaccugagcauccccaacuucaaccaguacgaggccaugagcugcgacuucaacggcggcaagaucagcgugcaguacaaccugagccacagcuacgccggcgacgccgccaaccacugcggcaccguggccaacggcgugcugcagaccuucaugagaauggccuggggcggcagcuacaucgcccuggacagcggcagaggcaacugggacugcaucaugaccagcuaccaguaccugaucauccagaacaccaccugggacgaccacugccaguucagcagacccagccccaucggcuaccugggccugcugagccagagaaccagagacguguacaucagcagaagacugcugggcaccuucaccuggacccugagcgacagcgagggcaaggacacccccggcggcuacugccugaccagauggaugcugaucgaggccgagcugaagugcuucggcaacaccgccguggccaagugcaacgagaagcacgacgaggaguucugcgacaugcugagacuguucgacuucugcaagcaggccauccagagacugaaggccgaggcccagaugagcauccagcugaucaacaaggccgugaacgcccugaucaacgaccagcugaucaugaagaaccaccugagagacaucaugggcauccccuacugcaacuacagcaaguacugguaccugaacaacaccgccaccggcaagaccagccugcccaagugcuggcugaucagcaacggcagcuaccugaacgagacccacuucagcgacgacaucgagcaggaggccgacaacaugaucaccgagaugcugcagaaggaguacauggagagacagggcaagaccccccugggccugguggaccuguucguguucagcaccagcuucuaccugaucagcaucuuccugcaccuggugaagauccccacccacagacacaucgugggcaagagcugccccaagccccacagacugaaccacaugggcaucugcagcugcggccuguacaagcagcccggcgugcccgugagauggaagagaugaggacuagucccuguucccagagcccacuuuuuuuucuuuuuuugaaauaaaauagccugucuuucagaucucaaaggcucuuuucagagccaccaaaaaaaaaaaaaaaaaaaaaaaaaaaaaaaaaaaaaaaaaaaaaaaaaaaaaaaaaaaaaaaaaaaaaaaaaaaaaaaaaaaaaaaaaaaaaaaaaaaaa

SEQ ID NO: 37277 - RNA, 1767 nt, Artificial Sequence
  mRNA product Design a-2 (hSL-A100) comprising derived and/or modified sequence from LASV(G3010-SLE-2013;Clade IV)__AIT17344__GPCmut10 (opt4)
aggagaguccgcucagccagguugcagaagcggcuuagcguguguccuaaucuucucucugcguguagguaggccugugccgcaaacaagcuuaccaugggccagaucgugaccuucuuccaggaggugccccacgugaucgaggaggugaugaacaucgugcugaucgcccugagcauccuggccgugcugaagggccuguacaacuucgccaccugcggccuggugggccuggugaccuuccugcugcugugcggcagaagcugcaccaccagccuguacaagggcguguacgagcugcagacccuggagcugaacauggagacccugaacaugugcaugccccugagcugcaccaagaacaacagccaccacuacaucauggugggcaacgagaccggccuggagcugacccugaccaacaccagcaucaucaaccacaaguucugcaaccugagcgacgcccacaagaagaaccuguacaaccacgcccugaugagcaucaucagcaccuuccaccugagcauccccaacuucaaccaguacgaggccaugagcugcgacuucaacggcggcaagaucagcgugcaguacaaccugagccacagcuacgccggcgacgccgccagccacugcggcaccguggccaacggcgugcugcagaccuucaugagaauggccuggggcggcagcuacaucgcccuggacagcggcuacggcaagugggacugcaucaugaccagcuaccaguaccugaucauccagaacaccaccugggaggaccacugccaguucagcagacccagccccaucggcuaccugggccugcugagccagagaaccagagacaucuacaucagcagaagacugcugggcaccuucaccuggacccugagcgacagcgagggcaaggacacccccggcggcuacugccugaccagauggaugcugaucgaggccgagcugaagugcuucggcaacaccgccguggccaagugcaacgagaagcacgacgaggaguucugcgacaugcugagacuguucgacuucugcaagcaggccauccagagacugaagaccgaggcccagaugagcauccagcugaucaacaaggccgugaacgcccugaucaacgaccagcugaucaugaagaaccaccugagagacaucaugggcauccccuacugcaacuacagcaaguacugguaccugaaccacaccaccaccggcaagaccagccugcccaagugcuggcuggugagcaacggcagcuaccugaacgagacccacuucagcgacgacaucgagcagcaggccgacaacaugaucaccgagaugcugcagaaggaguacauggagagacagggcaagaccccccugggccugguggaccuguucguguucagcaccagcuucuaccugaucagcaucuuccugcaccuggugaagauccccacccacagacacaucgugggcaagagcugccccaagccccacagacugaaccacaugggcaucugcagcugcggccuguacaagcagcccggcgugcccgugagauggaagagaugaggacuagucccuguucccagagcccacuuuuuuuucuuuuuuugaaauaaaauagccugucuuucagaucucaaaggcucuuuucagagccaccaaaaaaaaaaaaaaaaaaaaaaaaaaaaaaaaaaaaaaaaaaaaaaaaaaaaaaaaaaaaaaaaaaaaaaaaaaaaaaaaaaaaaaaaaaaaaaaaaaaaa

SEQ ID NO: 37278 - RNA, 1767 nt, Artificial Sequence
  mRNA product Design a-2 (hSL-A100) comprising derived and/or modified sequence from LASV(G502-SLE-2009;Clade IV)__AIT17126__GPCmut10 (opt4)
aggagaguccgcucagccagguugcagaagcggcuuagcguguguccuaaucuucucucugcguguagguaggccugugccgcaaacaagcuuaccaugggccagaucgugaccuucuuccaggaggugccccacgugaucgaggaggugaugaacaucgugcugaucgcccugagcauccuggccgugcugaagggccuguacaacuucgccaccugcggccuggugggccugcugaccuuccugcugcugugcggcagaagcugcaccaccggccuguacaagggcguguacgagcugcagacccuggagcugaacauggagacccugaacaugugcaugccccugagcugcaccaagaacaacagccaccacuacaucauggugggcaacgagaccggccuggagcugacccugaccaacaccagcaucaucaaccacaaguucugcaaccugagcgacgcccacaagaagaaccuguacgaccacgcccugaugagcaucaucagcaccuuccaccugagcauccccaacuucaaccaguacgaggccaugagcugcgacuucaacggcggcaagaucagcgugcaguacaaccugagccacagcuacgccggcgacgccgccgaccacugcggcaccguggccaacggcgugcugcagaccuucaugagaauggccuggggcggcagcuacaucgcccuggacagcggcagaggcagaugggacugcaucaugaccagcuaccaguaccugaucauccagaacaccaccugggaggaccacugccaguucagcagacccagccccaucggcuaccugggccugcugagccagagaaccagagacaucuacaucagcagaagacugcugggcaccuucaccuggacccugagcgacagcgagggcaaggacacccccggcggcuacugccugaccagauggaugcugaucgaggccgagcugaagugcuucggcaacaccgccguggccaagugcaacgagaagcacgacgaggaguucugcgacaugcugagacuguucgacuucugcaagcaggccauccagagacugaaggccgaggcccagaugagcauccagcugaucaacaaggccgugaacgcccugaucaacgaccagcuggugaugaagaaccaccugagagacaucaugggcauccccuacugcaacuacagcagauacugguaccugaaccacaccaccaccggcagaaccagccugcccaagugcuggcuggugagcaacggcagcuaccugaacgagacccacuucagcgacgacaucgagcagcaggccgacaacaugaucaccgagaugcugcagaaggaguacauggagagacagggcaagaccccccugggccugguggaccuguucguguucagcaccagcuucuaccugaucagcaucuuccugcaccuggugaagauccccacccacagacacaucgugggcaagagcugccccaagccccacagacugaaccacaugggcaucugcagcugcggccuguacaagcagcccggcgugcccgugaaguggaagagaugaggacuagucccuguucccagagcccacuuuuuuuucuuuuuuugaaauaaaauagccugucuuucagaucucaaaggcucuuuucagagccaccaaaaaaaaaaaaaaaaaaaaaaaaaaaaaaaaaaaaaaaaaaaaaaaaaaaaaaaaaaaaaaaaaaaaaaaaaaaaaaaaaaaaaaaaaaaaaaaaaaaaa

SEQ ID NO: 37279 - RNA, 1767 nt, Artificial Sequence
  mRNA product Design a-2 (hSL-A100) comprising derived and/or modified sequence from LASV(G733-SLE-2010;Clade IV)__AIT17154__GPCmut10 (opt4)
aggagaguccgcucagccagguugcagaagcggcuuagcguguguccuaaucuucucucugcguguagguaggccugugccgcaaacaagcuuaccaugggccagaucgugaccuucuuccaggaggugccccacgugaucgaggaggugaugaacaucgugcugaucgcccugagcauccuggccgugcugaagggccuguacaacuucgccaccugcggcaucgugggccuggugagcuuccugcugcugugcggcagaagcugcaccaccagccuguacaagggcguguacgagcugcagacccuggagcugaacauggagacccugaacaugugcaugccccugagcugcaccaagaacaacagccaccacuacaucauggugggcaacgagaccggccuggagcugacccugaccaacaccagcaucaucaaccacaaguucugcaaccugagcgacgcccacaagaagaaccuguacgaccacgcccugaugagcaucaucagcaccuuccaccugagcauccccaacuucaaccaguacgaggccaugagcugcgacuucaacggcggcaagaucagcgugcaguacaaccugagccacagcuacgccggcgacgccgccaaccacugcggcaccaucgccaacggcgugcugcagaccuucaugagaauggccuggggcggcagcuacaucgcccuggacagcggcagagacagaugggacugcaucaugaccagcuaccaguaccugaucauccagaacaccaccugggaggaccacugccaguucagcagacccagccccaucggcuaccugggccugcugagccagagaaccagagacaucuacaucagcagaagacugcugggcaccuucaccuggacccugagcgacagcgagggcaaggacacccccggcggcuacugccugaccagauggaugcugaucgaggccgagcugaagugcuucggcaacaccgccguggccaagugcaacgagaagcacgacgaggaguucugcgacaugcugagacuguucgacuucugcaagcaggccauccagagacugaaggccgaggcccagaugagcauccagcugaucaacaaggccgugaacgcccugaucaacgaccagcugaucaugaagaaccaccugagagacaucaugggcauccccuacugcaacuacagcaaguacugguaccugaaccacaccaccaccggcaagaccagccugcccaagugcuggcuggugagcaacggcagcuaccugaacgagacccacuucagcgacgacaucgagcagcaggccgacaacaugaucaccgagaugcugcagaaggaguacauggagagacagggcaagaccccccugggccugguggaccuguucguguucagcaccagcuucuaccugaucagcaucuuccugcaccuggugaagauccccacccacagacacguggugggcaagagcugccccaagccccacagacugaaccacaugggcaucugcagcugcggccuguacggccagcccggcgugcccgugaaguggaagagaugaggacuagucccuguucccagagcccacuuuuuuuucuuuuuuugaaauaaaauagccugucuuucagaucucaaaggcucuuuucagagccaccaaaaaaaaaaaaaaaaaaaaaaaaaaaaaaaaaaaaaaaaaaaaaaaaaaaaaaaaaaaaaaaaaaaaaaaaaaaaaaaaaaaaaaaaaaaaaaaaaaaaa

SEQ ID NO: 37280 - RNA, 1767 nt, Artificial Sequence
  mRNA product Design a-2 (hSL-A100) comprising derived and/or modified sequence from MOPV/LASV reassortant(IGS-1;Clade IV)__AFY05576__GPCmut10 (opt4)
aggagaguccgcucagccagguugcagaagcggcuuagcguguguccuaaucuucucucugcguguagguaggccugugccgcaaacaagcuuaccaugggccagaucgugaccuucuuccaggaggugccccacgugaucgaggaggugaugaacaucgugcugaucgcccugagcgugcuggccgugcugaagggccuguacaacuucgccaccugcggccuggugggccuggugaccuuccugcugcugugcggcagaagcugcaccaccagccuguacaagggcguguacgagcugcagacccuggagcugaacauggagacccugaacaugugcaugccccugagcugcaccaagaacaacagccaccacuacaucauggugggcaacgagaccggccuggagcugacccugaccaacaccagcaucaucaaccacaaguucugcaaccugagcgacgcccacaagaagaaccuguacgaccacgcccugaugagcaucaucagcaccuuccaccugagcauccccaacuucaaccaguacgaggccaugagcugcgacuucaacggcggcaagaucagcgugcaguacaaccugagccacagcuacgccggcgacgccgccaaccacugcggcaccguggccaacggcgugcugcagaccuucaugagaauggccuggggcggcagcuacaucgcccuggacagcggcagaggcaacugggacugcaucaugaccagcuaccaguaccugaucauccagaacaccaccugggaggaccacugccaguucagcagacccagccccaucggcuaccugggccugcugagccagagaaccagagacaucuacaucagcagaagacugcugggcaccuucaccuggacccugagcgacagcgagggcgaggacacccccggcggcuacugccugaccagauggaugcugaucgaggccgagcugaagugcuucggcaacaccgccguggccaagugcaacgagaagcacgacgaggaguucugcgacaugcugagacuguucgacuucugcaagcaggccauccagagacugaaggccgaggcccagaugagcauccagcugaucaacaaggccgugaacgcccugaucaacgaccagcugaucaugaagaaccaccugagagacaucaugggcauccccuacugcaacuacagcaaguacugguaccugaaccacaccaccaccggcagaaccagccugcccaagugcuggcuggugagcaacggcagcuaccugaacgagacccacuucagcgacgacaucgagcagcaggccgacaacaugaucaccgagaugcugcagaaggaguacauggagagacagggcaagaccccccugggccugguggaccuguucguguucagcaccagcuucuaccugaucagcaucuuccugcaccuggugaagauccccacccacagacacaucgugggcaagagcugccccaagccccacagacugaaccacaugggcaucugcagcugcggccuguacaagcagcccggcgugcccgugaaguggaagagaugaggacuagucccuguucccagagcccacuuuuuuuucuuuuuuugaaauaaaauagccugucuuucagaucucaaaggcucuuuucagagccaccaaaaaaaaaaaaaaaaaaaaaaaaaaaaaaaaaaaaaaaaaaaaaaaaaaaaaaaaaaaaaaaaaaaaaaaaaaaaaaaaaaaaaaaaaaaaaaaaaaaaa

SEQ ID NO: 37281 - RNA, 1767 nt, Artificial Sequence
  mRNA product Design a-2 (hSL-A100) comprising derived and/or modified sequence from LASV(LM765-SLE-2012;Clade IV)__AIT17814__GPCmut10 (opt4)
aggagaguccgcucagccagguugcagaagcggcuuagcguguguccuaaucuucucucugcguguagguaggccugugccgcaaacaagcuuaccaugggccagaucgugaccuucuuccaggaggugccccacgugaucgaggaggugaugaacaucgugcugaucgcccugagcauccuggccgugcugaagggccuguacaacuucgccaccugcggccuggugggccuggugaccuuccugcugcugugcggcagaagcugcaccaccagccuguacaagggcguguacgagcugcagacccuggagcugaacauggagacccugaacaugugcaugccccugagcugcaccaagaacaacagccaccacuacaucauggugggcaacgagaccggccuggagcugacccugaccaacaccagcaucaucgaccacaaguucugcaaccugagcgacgcccacagaaagaaccuguacgaccacgcccugaugagcaucaucagcaccuuccaccugagcauccccaacuucaaccaguacgaggccaugagcugcgacuucaacggcggcaagaucagcgugcaguacaaccugagccacagcuacgccaaggacgccgccgaccacugcggcaccguggccaacggcgugcugcagaccuucaugagaauggccuggggcggcagcuacaucgcccuggacagcggcagaggcagaugggacugcaucaugaccagcuaccaguaccugaucauccagaacaccaccugggaggaccacugccaguucagcagacccagccccaucggcuaccugggccugcugagccagagaaccagagacaucuacaucagcagaagacugcugggcaccuucaccuggacccugagcgacagcgagggcaaggacacccccggcggcuacugccugaccagauggaugcugaucgaggccgagcugaagugcuucggcaacaccgccguggccaagugcaacgagaagcacgacgaggaguucugcgacaugcugagacuguucgacuucugcaagcaggccauccagagacugaaggccgaggcccagaugagcauccagcugaucaacaaggccgugaacgcccugaucaacgaccagcugaucaugaagaaccaccugagagacaucaugggcauccccuacugcaacuacagcaaguacugguaccugaaccacaccaccaccggcaagaccagccugcccaagugcuggcuggugagcaacggcagcuaccugaacgagacccacuucagcgacgacaucgagcagcaggccgacaacaugaucaccgagaugcugcagaaggaguacauggagagacagggcaagaccccccugggccugguggaccuguucguguucagcaccagcuucuaccugaucagcaucuuccugcaccuggugaagauccccacccacagacacaucgugggcaagcccugccccaagccccacagacugaaccacaugggcaucugcagcugcggccuguacaagcagcccggcgugcccgugaaguggaagagaugaggacuagucccuguucccagagcccacuuuuuuuucuuuuuuugaaauaaaauagccugucuuucagaucucaaaggcucuuuucagagccaccaaaaaaaaaaaaaaaaaaaaaaaaaaaaaaaaaaaaaaaaaaaaaaaaaaaaaaaaaaaaaaaaaaaaaaaaaaaaaaaaaaaaaaaaaaaaaaaaaaaaa

SEQ ID NO: 37282 - RNA, 1767 nt, Artificial Sequence
  mRNA product Design a-2 (hSL-A100) comprising derived and/or modified sequence from LASV(LM776-SLE-2012;Clade IV)__AIT17824__GPCmut10 (opt4)
aggagaguccgcucagccagguugcagaagcggcuuagcguguguccuaaucuucucucugcguguagguaggccugugccgcaaacaagcuuaccaugggccagaucgugaccuucuuccaggaggugccccacgugaucgaggaggugaugaacaucgugcugaucgcccugagcauccuggccgugcugaagggccuguacaacuucgccaccugcggccuggugggccuggugaccuuccugcugcugugcggcagaagcugcaccaccagcguguacaagggcguguacgagcugcagacccuggagcugaacauggagacccugaacaugugcaugccccugagcugcaccaagaacaacagccaccacuacaucauggugggcaacgagaccggccuggagcugacccugaccaacaccagcaucaucaaccacaaguucugcaaccugagcgacgcccacaagaagaaccuguacgaccacgcccugaugagcaucaucagcaccuuccaccugagcauccccaacuucaaccaguacgaggccaugagcugcgacuucaacggcggcaagaucagcgugcaguacaaccugagccacagcuacgccggcgacgccgccaaccacugcggcaccguggccaacggcgugcugcagaccuucaugagaauggccuggggcggcagcuacaucgcccuggacagcggccacggcaagugggacugcaucaugaccagcuaccaguaccugaucauccagaacaccaccugggaggaccacugccaguucagcagacccagccccaucggcuaccugggccugcugagccagagaaccagagacaucuacaucagcagaagacugcugggcaccuucaccuggacccugagcgacagcgagggcaaggacacccccggcggcuacugccugaccagauggaugcugaucgaggccgagcugaagugcuucggcaacaccgccguggccaagugcaacgagaagcacgacgaggaguucugcgacaugcugagacuguucgacuucugcaagcaggccauccagagacugaaggccgaggcccagaugagcauccagcugaucaacaaggccgugaacgcccugaucaacgaccagcugaucaugaagaaccaccugagagacaucaugggcauccccuacugcaacuacagcaaguacugguaccugaaccacaccaccaccggcaagaccagccugcccaagugcuggcuggugagcaacggcagcuaccugaacgagacccacuucagcgacgacaucgagcagcaggccgacaacaugaucaccgagaugcugcagaaggaguacauggagagacagggcaagaccccccugggccugguggaccuguucguguucagcaccagcuucuaccugaucagcaucuuccugcaccuggugaagauccccacccacagacacaucgugggcaagagcugccccaagccccacagacugaaccacaugggcaucugcagcugcggccuguacaagcagcccggcgugcccgugagauggaagagaugaggacuagucccuguucccagagcccacuuuuuuuucuuuuuuugaaauaaaauagccugucuuucagaucucaaaggcucuuuucagagccaccaaaaaaaaaaaaaaaaaaaaaaaaaaaaaaaaaaaaaaaaaaaaaaaaaaaaaaaaaaaaaaaaaaaaaaaaaaaaaaaaaaaaaaaaaaaaaaaaaaaaa

SEQ ID NO: 37283 - RNA, 1767 nt, Artificial Sequence
  mRNA product Design a-2 (hSL-A100) comprising derived and/or modified sequence from LASV(Mad39;Clade IV)__ANH09722__GPCmut10 (opt4)
aggagaguccgcucagccagguugcagaagcggcuuagcguguguccuaaucuucucucugcguguagguaggccugugccgcaaacaagcuuaccaugggccagaucgugaccuucuuccaggaggugccccacgugaucgaggaggugaugaacaucgugcugaucgcccugagcauccuggccgugcugaagggccuguacaacguggccaccugcggccugaucggccuggugaccuuccugcugcugugcggcagaagcugcaccaccacccuguacaagggcguguacgagcugcaggcccuggagcugaacauggagacccugaacaugugcaugccccugagcugcaccaagaacaacagccaccacuacaucagagugggcaacgagaccggccuggagcugacccugaccaacaccagccugaucaaccacaaguucugcaaccugagcgacgcccacaagaagaaccuguacgaccacgcccugaugagcaucaucagcaccuuccaccugagcauccccaacuucaaccaguacgaggccaugagcugcgacuucaacgacggcaagaucagcgugcaguacaaccugagccacaccuacgccggcgacaccgccaaccacugcggcaccguggccaacggcgugcugcagaccuucaugagaauggccuggggcggcagcuacaucgcccuggacagcggcagaggcggcugggacugcaucaugaccagcuaccaguaccugaucauccagaacaccaccugggaggaccacugccaguucagcagacccagccccaucggcuaccugggccugcugagccagagaaccagagacaucuacaucagcagaagacugcugggcaccuucaccuggacccugagcgacagcgagggcaaggacacccccggcggcuacugccugaccagauggaugcugaucgaggccgagcugaagugcuucggcaacaccgccguggccaagugcaacgagaagcacgacgaggaguucugcgacaugcugagacuguucgacuucugcaagcaggccauccagagacugaaggccgaggcccagaugagcauccagcugaucaacaaggccgugaacgcccugaucaacgaccagcugaucaugaagaaccaccugagagacaucaugggcauccccuacugcaacuacagcaaguacugguaccugaaccacaccgugaccggcaagaccagccugcccaagugcuggcuggugagcaacggcagcuaccugaacgagacccacuucagcgacgacaucgagcagcaggccgacaacaugaucaccgagaugcugcagaaggaguacauggagagacagggcaagaccccccugggccugguggaccuguucguguucagcaccagcuucuaccugaucagcaucuuccugcaccuggugaagauccccacccacagacacguggugggcaagcccugccccaagccccacagacugaaccacaugggcaucugcagcugcggcuucuacaagcagcccggcgugcccgugagauggaagagaugaggacuagucccuguucccagagcccacuuuuuuuucuuuuuuugaaauaaaauagccugucuuucagaucucaaaggcucuuuucagagccaccaaaaaaaaaaaaaaaaaaaaaaaaaaaaaaaaaaaaaaaaaaaaaaaaaaaaaaaaaaaaaaaaaaaaaaaaaaaaaaaaaaaaaaaaaaaaaaaaaaaaa

SEQ ID NO: 37284 - RNA, 1767 nt, Artificial Sequence
  mRNA product Design a-2 (hSL-A100) comprising derived and/or modified sequence from LASV(Z0947-SLE-2011;Clade IV)__AIT17840__GPCmut10 (opt4)
aggagaguccgcucagccagguugcagaagcggcuuagcguguguccuaaucuucucucugcguguagguaggccugugccgcaaacaagcuuaccaugggccagaucgugaccuucuuccaggaggugccccacgugaucgaggaggugaugaacaucgugcugaucgcccugagcauccuggccgugcugaagggccuguacaacuucgccaccugcggccuggugggccuggugaccuuccugcugcugugcggcagaagcugcaccaucagccuguacaagggcguguacgagcugcagacccuggagcugaacauggagacccugaacaugugcaugccccugagcugcaccaagaacaacagccaccacuacaucauggugggcaacgagaccggccuggagcugacccugaccaacaccagcaucaucaaccacaaguucugcaaccugagcgacgcccacaagaagaaccuguacgaccacgcccugaugagcaucaucagcaccuuccaccugagcauccccaacuucaaccaguacgaggccaugagcugcgacuucaacggcggcaagaucagcgugcaguacaaccugagccacagcuacgccggcgacgccgccaaccacugcggcaccguggccaacggcgugcugcagaccuucaugagaauggccuggggcggcagcuacaucgcccuggacagcggcagagacagaugggacugcaucaugaccagcuaccaguaccugaucauccagaacaccaccugggaggaccacugccaguucagcagacccagccccaucggcuaccugggccugcugagccagagaaccagagacaucuacaucagcagaagacugcugggcaccuucaccuggacccugagcgacagcgagggcaaggacacccccggcggcuacugccugaccagauggaugcugaucgaggccgagcugaagugcuucggcaacaccgccguggccaagugcaacgagaagcacgacgaggaguucugcgacaugcugagacuguucgacuucugcaagcaggccauccagagacugaaggccgaggcccagaugagcauccagcugaucaacaaggccgugaacgcccugaucaacgaccagcugaucaugaagaaccaccugagagacaucaugggcauccccuacugcaacuacagcaaguacugguaccugaaccacaccaccaccggcaagaccagccugcccaagugcuggcuggugagcaacggcagcuaccugaacgagacccacuucagcgacgacaucgagcagcaggccgacaacaugaucaccgagaugcugcagaaggaguacauggagagacagggcaagaccccccugggccugguggaccuguucguguucagcaccagcuucuaccugaucagcaucuuccugcaccuggugaagauccccacccacagacacaucgugggcaagcccugccccaagccccacagacugaaccacaugggcaucugcagcugcggccuguacaagcagcccggcgugcccgugaaguggaagagaugaggacuagucccuguucccagagcccacuuuuuuuucuuuuuuugaaauaaaauagccugucuuucagaucucaaaggcucuuuucagagccaccaaaaaaaaaaaaaaaaaaaaaaaaaaaaaaaaaaaaaaaaaaaaaaaaaaaaaaaaaaaaaaaaaaaaaaaaaaaaaaaaaaaaaaaaaaaaaaaaaaaaa

SEQ ID NO: 37285 - RNA, 1767 nt, Artificial Sequence
  mRNA product Design a-2 (hSL-A100) comprising derived and/or modified sequence from LASV(Josiah;Clade IV)__NP_694870__GPCmut10 (opt5)
aggagaguccgcucagccagguugcagaagcggcuuagcguguguccuaaucuucucucugcguguagguaggccugugccgcaaacaagcuuaccaugggccagaucgugaccuucuuucaagaggucccccacguuauugaagaggugaugaacaucgugcugauugcccucagcguccuggcugugcuuaaggggcuguacaauuucgccacaugcggacucguuggccuggugacguuucuucugcucugugggagauccugcaccacaucucuguauaaaggagucuacgaacugcagacccucgagcugaacauggaaacacuuaauauguguaugccucugagcugcaccaagaacaauucccaucacuauaucauggugggcaacgagacagggcucgagcugacccuuacgaauaccucuauuaucaaccauaaauucuguaaucugagcgacgcgcacaagaaaaaccucuacgaucaugcucugauguccaucauuucuacauuucaccugagcaucccgaauuucaaccaguaugaagccauguccugcgacuuuaauggaggcaagauuagcguucaguacaaccucucucacuccuaugccggcgaugcugccaaucauugugggaccguggcuaacggaguccugcaaacauucaugcggauggccuggggcgggagcuacaucgcgcuugacucuggacgcggcaacugggauugcauuaugaccuccuaccaguaucugaucauucagaauacgacaugggaggaccacugucaguuuagcagacccucuccuaucggguaccucggacugcuuucccaacggacccgcgauaucuauauuagcagacggcugcucggcacauucaccuggacccuguccgacucugaaggcaaggauacacccgggggauacugccugacgcgcuggaugcucaucgaggccgagcugaaauguuuuggcaacaccgcuguggccaagugcaaugaaaaacaugacgaggaguucugcgauaugcuuagacuguuugacuucuguaagcaggcuauucagcggcucaaagccgaagcgcagaugagcauccaacugauuaacaaggccgugaaugcucuuaucaacgaucagcugaucaugaagaaucaccuccgcgacauuauggggaucccuuauugcaacuacuccaaauauugguaccugaaucacacaaccacaggaagaaccagccugcccaaguguuggcucgucucuaacggcuccuaccugaaugaaacgcauuucagcgacgauauugagcagcaagccgacaacaugaucacagagaugcuucagaaagaauauauggagcggcaggggaagaccccucugggacucguugaucuguuuguguucucuaccagcuuuuaccugauuuccaucuuccuucaccucgugaaaaucccgacacaucgccacauugucggcaagucuugccccaaaccucauagacugaaucacaugggcaucuguagcugcgggcuguauaagcagcccggagugccuguuaaguggaaacggugaggacuagucccuguucccagagcccacuuuuuuuucuuuuuuugaaauaaaauagccugucuuucagaucucaaaggcucuuuucagagccaccaaaaaaaaaaaaaaaaaaaaaaaaaaaaaaaaaaaaaaaaaaaaaaaaaaaaaaaaaaaaaaaaaaaaaaaaaaaaaaaaaaaaaaaaaaaaaaaaaaaaa

SEQ ID NO: 37286 - RNA, 1764 nt, Artificial Sequence
  mRNA product Design a-2 (hSL-A100) comprising derived and/or modified sequence from LASV(LP;Clade I)__AAF86701__GPCmut10 (opt5)
aggagaguccgcucagccagguugcagaagcggcuuagcguguguccuaaucuucucucugcguguagguaggccugugccgcaaacaagcuuaccaugggccagaucauuaccuucuuucaagaggugccccacgucaucgaagagguuaugaacauugugcugaucgcccucagccugcuugcuauucugaaggggcucuacaauaucgccacaugcggaaucauuggccugguggcguuccuuuuucugugugggaaauccugcucucucacgcugaagggaggcuaugaacugcagacccucgagcugaacauggaaacacuuaauauguguaugccucugagcugcaccaaaaacuccucucaucacuacaucagagucgggaaugagacaggacucgagcugacccuuacaaacaccagcauuaucaaucauaaguucuguaaccuguccgacgcucacaaaaagaaucucuaugaucaugcccugaugucuauuaucagcacguuucaccuguccauuccgaacuucaaucaguacgaagccaugagcugcgacuuuaacggcggcaagaucucugugcaguauaaucucucccacagcuacgcuggggaugccgcugagcauuguggaaccguugccaacggcgugcugcaaacauucaugcggauggcguggggagggcgcuauaucgcccuugacucuggcaaagggaauugggauugcauuaugaccuccuaccaguaccugaucauucagaacacaaccugggaagaccacugucaguuuagcagacccucuccuaucggauaucucggccugcuuucccaacggacgcgcgauauuuacaucagcagacggcugcucggcacauucaccuggacacuguccgacucugaggggaacgagacccccggaggcuauugccugacccgcuggaugcucaucgaagcugagcugaaguguuuugggaauacagccgucgcuaaaugcaacgaaaagcaugaugaggaguucugcgacaugcuuagacuguuugauuucuguaaacaggccauucggcgccucaaggcggaagcccagaugagcauccagcugauuaauaaggcugugaacgcccuuaucaaugaccaacugauuaugaaaaaccaccucagagauaucaugggaaucccuuacugcaauuauuccaaguacugguaucugaaccacacgagcucuggccggaccucccugcccaaauguuggcucauuagcaaugggucuuaccugaacgagacacaguucagcgacgacaucgaacagcaagcugauaauaugauuaccgagaugcuucagaaggaauacaucgagcgccagggaaaaacaccucugggccucguugacauuuuuaucuucuccaccucuuuuuaucugauuagcaucuuccugcaucuuaucaagauuccgacgcacagacauaucgugggcaaacccugcccuaagccccaccggcucaaccauaugggggucuguuccugcggacuguacaagcacccuggcgugcccacaaaauggaagcgcugaggacuagucccuguucccagagcccacuuuuuuuucuuuuuuugaaauaaaauagccugucuuucagaucucaaaggcucuuuucagagccaccaaaaaaaaaaaaaaaaaaaaaaaaaaaaaaaaaaaaaaaaaaaaaaaaaaaaaaaaaaaaaaaaaaaaaaaaaaaaaaaaaaaaaaaaaaaaaaaaaaaaa

SEQ ID NO: 37287 - RNA, 1764 nt, Artificial Sequence
  mRNA product Design a-2 (hSL-A100) comprising derived and/or modified sequence from LASV(803213;Clade II)__AAF86703__GPCmut10 (opt5)
aggagaguccgcucagccagguugcagaagcggcuuagcguguguccuaaucuucucucugcguguagguaggccugugccgcaaacaagcuuaccaugggccagaucauuaccuucuuucaagaggugccccacgucaucgaagagguuaugaacauugugcugaucgcccucagccugcuugcuauucugaaggggaucuacaauguggccacaugcggacucuucggccugaucuccuuucuucugcucugugggagaucuugcagcgucacguauaaaggaguguacgaacugcagacccuggagcucaacauggcgaaucugaacauguguaugccucuuuccugcacaaagaauaacucucaucacuauauuaugguuggcaaugaaaccgggcuggagcucacacugaccaacacaagcaucauuaaucauaaauucuguaaccuuuccgacgcucacaagaaaaaucuguacgaucaugcccucaugucuaucauuagcaccuuucaccuguccaucccgaacuucaaucaguaugaggccaugagcugcgacuuuaacggaggcaagauuucugugcaguacaaucugucccacagcuucgcugucgaugccgcuaaccauuguggcacgaucgccaacggggugcuccaaaccuuuaugcggauggcguggggaggcucuuauaucgcccuggacuccgggaagggaaauugggauugcauuaugacaagcuaccaguaccuuaucauucagaacaccacaugggaagaccacugucaguucucucgccccuccccuaucggcuaucuggggcuccugagccaaagaacccgggauauuuacaucucccgcagacuucugggaacguuuacauggacccucucugacagcgagggcaaugaagcucccggcggguauugccugacacgguggaugcugaucgaggccgagcucaaauguuucggaaacaccgcuguugccaagugcaaugaaaaacaugaugaggaauuuugcgacaugcugcgccuuuucgauuucuguaagcaggcgauuaaaagacugaagaccgaggcccagauguccauccagcucauuaacaaggcugugaaugcccugaucaacgaccaacuuauuaugaaaaaucaucugcgggauaucaugggcaucccuuacugcaacuauagccgcuacugguaucucaaucacacagucacggggaagaccucucugcccagauguuggcugguguccaacggaagcuaccucaaugaaacacacuuuucugacgacauugagcagcaggcugauaacaugaucaccgagaugcugcaaaaagaauacauggaccggcagggcaagacaccucuugggcugguggaucucuucgucuuuagcaccuccuucuaucugauuucuaucuuucugcaccuuguuaaaauuccgacgcaucgccacaucgugggaaagcccugcccuaaaccccauagacucaaucacaugggcauuuguagcugcggccuguacaagcacccuggggugcccgucaaguggaaacggugaggacuagucccuguucccagagcccacuuuuuuuucuuuuuuugaaauaaaauagccugucuuucagaucucaaaggcucuuuucagagccaccaaaaaaaaaaaaaaaaaaaaaaaaaaaaaaaaaaaaaaaaaaaaaaaaaaaaaaaaaaaaaaaaaaaaaaaaaaaaaaaaaaaaaaaaaaaaaaaaaaaaa

SEQ ID NO: 37288 - RNA, 1764 nt, Artificial Sequence
  mRNA product Design a-2 (hSL-A100) comprising derived and/or modified sequence from LASV(GA391;Clade III)__CAA36645__GPCmut10 (opt5)
aggagaguccgcucagccagguugcagaagcggcuuagcguguguccuaaucuucucucugcguguagguaggccugugccgcaaacaagcuuaccaugggccagaucgugaccuucuuucaagaggucccccacguuauugaagaggugaugaacaucgugcugauugcccucagcauccuggcuauucuuaaggggcuguacaaugucgccacaugcggacucaucggccuggugacguuccuucugcucuccgggagaucuuguagccugaucuauaaaggaaccuacgaacugcagacacucgagcugaacauggaaacccuuaauaugugcaugccucuguccuguacaaagaacaauucucaucacuauauucggguuggcaacgagaccgggcucgagcugacacuuaccaauacgagcauccugaaccauaaauuuugcaaucucuccgacgcgcacaagcgcaaccuguacgaucauucucugaugagcauuaucuccaccuuccaccucagcauuccgaauuuuaaccaguaugaagcuaugucuugugacuucaauggaggcaaaaucacagugcaguacaaccugucccacagcuuugccgucgaugccgcuggccauugcgggacccuugccaauggagugcugcaaacauucaugagaauggcuuggggcgggucuuauauugcccucgacuccggacggggcaacugggauuguaucaugaccagcuaccaguaccugaucauucagaacacgacaugggacgaucacugccaguuuucucgccccuccccuaucggguaucuuggacugcucagccaaagaacccgggacauuuacaucucccgcagacugcugggcacauucaccuggacccucucugauagcgagggcaaugaaacacccgggggauauugucugacgcgguggaugcuuauugaggcggagcugaagugcuuuggcaacaccgccguugcuaaguguaaugaaaaacaugacgaggaguucugcgauaugcuccgccuguuugacuucugcaagcaggccaucagacggcuuaaaacagaagcucagauguccauccagcugauuaacaaggccgugaaugcgcucaucaacgaucaacugauuaugaaaaaucaucugcgcgacaucauggggauuccuuacuguaacuauagcagauacugguaucucaaucacaccucuacaggaaagaccucccugccccggugcuggcuuaucagcaacggcucuuaccugaaugaaacgaaguucagcgacgauaucgagcagcaggccgacaacaugauuacagagaugcuccaaaaagaauacaucgaucgccaggggaagaccccucugggacuggucgaccuuuuuguguucuccaccucuuuuuaucucauuagcaucuuccugcaccuggugaaaauuccgacacacagacauaucgucggcaagcccuguccuaaaccccaccggcucaaucauaugggcauuugcuccugugggcuguacaagcagccuggaguucccgugagauggaaacgcugaggacuagucccuguucccagagcccacuuuuuuuucuuuuuuugaaauaaaauagccugucuuucagaucucaaaggcucuuuucagagccaccaaaaaaaaaaaaaaaaaaaaaaaaaaaaaaaaaaaaaaaaaaaaaaaaaaaaaaaaaaaaaaaaaaaaaaaaaaaaaaaaaaaaaaaaaaaaaaaaaaaaa

SEQ ID NO: 37289 - RNA, 1767 nt, Artificial Sequence
  mRNA product Design a-2 (hSL-A100) comprising derived and/or modified sequence from LASV(AV;Clade V)__CCA30314__GPCmut10 (opt5)
aggagaguccgcucagccagguugcagaagcggcuuagcguguguccuaaucuucucucugcguguagguaggccugugccgcaaacaagcuuaccaugggccagaucgugaccuucuuucaagaggucccccacguuauugaagaggugaugaacaucgugcugauugcccucagcauccuggcuguccuuaaggggcuguacaauauugccacaugcggacucaucggccugaucacguuccuucugcucugugggagauccugcucuagcaaccuguauaaaggaguguacgaacugcagucccucgaccugaauauggagacccuuaacauguguaugccucugucuugcacaaagaauaacagccaucacuauauucggguuggcaaugauaccgggcucgaacugacacuuaccaacacauccauccugaaucauaaauuuuguaaccucucugacgcgcacaagaaagaucuguacgaccaugcucugaugagcauuaucuccaccuuccaccucagcauuccgaauuuuaaccaguaugaggccaugucuugcgauuucaauggaggcaagaucuccgugcaguacaaccugagccacucuuaugccauugacgcugccaaucauuguggcacggucgcuaacgggauccuucaaaccuuuaugcgcauggccuggggaggcuccuacaucgcgcuggauagcgggagaggaaacugggacugcauuaugacaucuuaccaguaucucaucauucagaauaccacaugggagaaccacugucaguucucccggcccagcccuaucggcuaccuggggcuucugucccaacgcaccagagauauuuauaucucucggcgccuccugggaacguuuacauggacccugagcgacuccgaaggcaaugccacacccggcggguacugccucaccagauggaugcugaucgaggcugaacuuaaguguuucggaaacaccgccguggcuaaaugcaaugagaagcaugaugaggaauuuugcgacaugcugcgccucuucgauuuuuguaaacaggccauuagccggcugaagucugaggcgcagauguccauccagcuuauuaacaaagccguuaaugcucugaucaacgaccaacucauuaugaagaaucaccugagagacaucaugggcaucccuuauugcaacuacagcaaguauugguaccugaaucacacaauuacggggaaaaccucucuccccaaguguuggcuggugagcaacggauccuaccuuaaugaaacacauuucucugaugacaucgagcagcaggccgauaacaugauuaccgaaaugcugcaaaaagaguauauggagcggcagggcaagacaccucucgggcuggucgaccuguucguguuuagcaccuccuucuaccuuaucagcauuuuucuccgccuggugaaaaucccgacgcacagacauauugucggaaagcccugcccuaaaccccaccggcugaaucauaugggcaucuguucuugcggccucuauaagcagccugggguucccgugcgcuggaagagaugaggacuagucccuguucccagagcccacuuuuuuuucuuuuuuugaaauaaaauagccugucuuucagaucucaaaggcucuuuucagagccaccaaaaaaaaaaaaaaaaaaaaaaaaaaaaaaaaaaaaaaaaaaaaaaaaaaaaaaaaaaaaaaaaaaaaaaaaaaaaaaaaaaaaaaaaaaaaaaaaaaaaa

SEQ ID NO: 37290 - RNA, 1764 nt, Artificial Sequence
  mRNA product Design a-2 (hSL-A100) comprising derived and/or modified sequence from LASV(Togo/2016/7082;Clade VI)__AMR44577__GPCmut10 (opt5)
aggagaguccgcucagccagguugcagaagcggcuuagcguguguccuaaucuucucucugcguguagguaggccugugccgcaaacaagcuuaccaugggccagaucauuaccuucuuucaagaggugccccacgucaucgaagagguuaugaacauugugcugaucgcccucagccugcuugcuauucugaaggggguguacaaugucgccacaugcggaaucaucggccucgugacguuccuguuucuuugugggagauccugcucucugauuuauaaaggaagcuacgaacuccagacccuggagcugaacauggaaacacucaauauguguaugccucuguccugcaccaagaacucuagccaucacuauauccggguuggcaaugagacagggcuugagcugacccucacaaacaccuccauuaucaaucauaaauucuguaaccugucugacgcgcacaagcgcaaucuuuacgaucaugcucugaugagcauucucuccacguuucaccugagcaucccgaacuucaaucaguaugaagccaugucuugcgacuuuaacggaggcaaaauuuccgugcaguacaaucugagccacgccuaugcugucgaugccgcugagcauuguggcaccguggccaacgggguucuccaaacauucaugagaauggcguggggaggcucuuacaucgcccuggacuccgggcggggaaauugggauugcaucaugaccagcuaccaguaucuuauuauccagaacacaaccugggaagaccacugucaguuuucucgccccuccccuauuggcuaccuggggcuccugagccaaagaacgcgggauaucuauauuucccgcagacuucugggaacauucaccuggacacucucugacagcgagggcaacgagacccccggcggguacugccugacccgguggaugcugaucgaagcugagcucaaguguuuuggaaauacagccguggcuaagugcaacgaaaaacaugaugaggaguucugcgacaugcugcgccuuuuugauuucuguaagcaggccauccagagacugaaauccgaagcgcagaugagcauucaacucaucaauaaggccgucaacgcucugauuaaugaccagcuuaucaugaaaaaccaucugcgggauaugaugggcauuccuuauugcaauuacucuaaguauugguaccucaaccacacguccagcgggcgcaccucucugcccaaguguuggcuggugagcaauggauccuaccucaacgagacacacuucucugacgacaucgaacagcaagccgauaauaugaucaccgagaugcugcagaaagaauauauugacagacagggcaagacaccucuugggcugguggaucucuuugucuucagcaccuccuuuuaccugaucagcauuuuccugcaccuuaucaaaauuccgacgcaucggcacaucguuggaaagcccugcccuaaaccccaucgccucaaccacaugggcauuuguucuugcggccuguauaagcagccuggggugcccacaagauggaaacggugaggacuagucccuguucccagagcccacuuuuuuuucuuuuuuugaaauaaaauagccugucuuucagaucucaaaggcucuuuucagagccaccaaaaaaaaaaaaaaaaaaaaaaaaaaaaaaaaaaaaaaaaaaaaaaaaaaaaaaaaaaaaaaaaaaaaaaaaaaaaaaaaaaaaaaaaaaaaaaaaaaaaa

SEQ ID NO: 37291 - RNA, 1764 nt, Artificial Sequence
  mRNA product Design a-2 (hSL-A100) comprising derived and/or modified sequence from LASV(KAK-428;Clade n.d. (VII))__ANH09740__GPCmut10 (opt5)
aggagaguccgcucagccagguugcagaagcggcuuagcguguguccuaaucuucucucugcguguagguaggccugugccgcaaacaagcuuaccaugggccagaucgugaccuucuuucaagaggucccccacguuauugaagaggugaugaacaucgugcugauugcccucagccugcuugcuauccugaaggggcucuacaauuucgccacaugcggagucauuggccugaucacguuucuucugcucugugggagauccugcucugcgaccuauaaaggacaguacgaacugcagacacuggagcucaacauggaaagccugaauauguguaugccucuuuccugcaccaagaacaauucucaucacuauauccgggcuggcaacaauacagggcuggagcucacccugacaaacaccagcauuaucucccauaaauucuguaaucuuucugacgcccacaagaaaaaccuguacgaucauacgcucaugagcauuaucaccacauuucaccuguccauuccgaauuucaaccaguaugaggccaugagcugcgacuuuaauggaggcaagaucucuauucaauacaaccugucccacagcuaugcuggcgaugccgcucagcauugugggaccguggccaauggaguucuccagacauucaugcgcauggcguggggcgggucuuaccuggcccuugacuccggaagacggggcugggauugcaucaucagcucuuaccaguaucugauuauccaaaacaccacgugggacgaucacugucaguuuucccgccccagcccuauuggguaccucggauucgugucccagaagacaagagacaucuauauuucucggcgccugcuuggcaccuuuacauggacccugagcgauuccgaaggccaugacaugcccgggggauacugccucaccagauggaugcugaucgaggcugaucugaaauguuucggcaacacagccgucgcuaagugcaaugaaaaacacgacgaggaguuuugcgauauguggcgccucuucgacuucuguaagcaggccauccaacggcugaaagcggaagcccagaugaacauucagcuuaucaauaaggcugugaacgcccugauuaaugaccaacucaugaugaagaaccaccugagagauaucauggggauuccuuauugcaauuacagcaaauuuugguaucuuaacaauacgaccacaggacggaccucucugccccgcuguuggcucaucuccaacggcagcuaccugaaugagacacauuucucugacgauaucgaacagcaggcugacaacaugauuaccgagaugcugcagaaggaauacauggauagacaagggaaaacgccucucggacugguugaccuuuuuguguucagcacauccuuuuaucugaucaccauuuuccuccaccuggucaagaucccgacccaucggcacauugugggcaaacccugcccuaagccccaucgccugaaucacaugggcaucuguucuugcgggcuuuacaaacagccuggagugcccgucagauggaagcggugaggacuagucccuguucccagagcccacuuuuuuuucuuuuuuugaaauaaaauagccugucuuucagaucucaaaggcucuuuucagagccaccaaaaaaaaaaaaaaaaaaaaaaaaaaaaaaaaaaaaaaaaaaaaaaaaaaaaaaaaaaaaaaaaaaaaaaaaaaaaaaaaaaaaaaaaaaaaaaaaaaaaa

SEQ ID NO: 37292 - RNA, 1764 nt, Artificial Sequence; identical to SEQ ID NO: 37286
  mRNA product Design a-2 (hSL-A100) comprising derived and/or modified sequence from LASV(Pinneo-NIG-1969;Clade I)__AIT17836__GPCmut10 (opt5)

SEQ ID NO: 37293 - RNA, 1764 nt, Artificial Sequence
  mRNA product Design a-2 (hSL-A100) comprising derived and/or modified sequence from LASV(ISTH0009-NIG-2011;Clade II)__AIT17404__GPCmut10 (opt5)
aggagaguccgcucagccagguugcagaagcggcuuagcguguguccuaaucuucucucugcguguagguaggccugugccgcaaacaagcuuaccaugggccagaucauuaccuucuuucaagaggugccccacgucaucgaagagguuaugaacauugugcugaucgcccucagccugcuugcuauucugaaggggaucuacaauguggccacaugcggacucuucggccuggucuccuuucuucugcucugugggagaucuugcagcacgaccuauaaaggaguguacgaacugcagacacuggagcucgacauggcgucccugaacauguguaugccucuuucuugcaccaagaauaacagccaucacuauaucaugguuggcaaugaaacagggcuggagcucacccugacaaacaccuccauuaucaaucauaaauucuguaaccuuucugaugcucacaagaaaaaucuguacgaccaugcccucaugagcauuaucuccacguuucaccugagcauuccgaacuucaaucaguaugaggccaugucuugcgauuuuaacggaggcaagaucuccgugcaguacaaucugagccacgcuuaugccgucgacgcugccaaccauuguggcaccauugcgaauggggugcuccaaacauucaugcggauggccuggggaggcucuuacaucgcucuggauuccgggaagggaagcugggacugcaucaugaccucuuaccaguaucuuauuauccagaacacaaccugggaagaucacugucaguuuucccgccccagcccuauuggcuaccuggggcuccugucccaaagaacgcgggacaucuauauuucucgcagacuucugggaacauucaccuggacacucagcgauuccgagggcaacgaaacccccggcggguacugccugacccgguggaugcugaucgaggccgagcucaaauguuuuggaaauacagcuguugccaagugcaacgaaaaacaugacgaggaguucugcgauaugcugcgccuuuuugacuucuguaagcaggcgaucagacggcugaaaacggaagcccagaugagcauucagcucaucaauaaggcugugaacgcccugauuaaugaucaacuuaucaugaagaaccaucugcgcgacauuaugggcaucccuuauugcaauuacucuaaauauugguaccucaaccacaccgucacagggaagaccucccugcccagauguuggcuggugagcaauggaucuuaccucaacgaaacacacuucagcgacgauaucgagcagcaggcugacaauaugauuaccgagcugcuucaaaaagaauauauggaucggcagggcaagacgccucuggggcucguggaccuguuugucuucuccacaucuuuuuaccugaucagcauuuuccuucaccucaucaaaauuccgacccaucgccacaucaccggaaagcccugcccuaaaccccauagacugaaccacaugggcauuuguuccugcggccuguauaagcacccugggguucccgugaaguggaaacggugaggacuagucccuguucccagagcccacuuuuuuuucuuuuuuugaaauaaaauagccugucuuucagaucucaaaggcucuuuucagagccaccaaaaaaaaaaaaaaaaaaaaaaaaaaaaaaaaaaaaaaaaaaaaaaaaaaaaaaaaaaaaaaaaaaaaaaaaaaaaaaaaaaaaaaaaaaaaaaaaaaaaa

SEQ ID NO: 37294 - RNA, 1764 nt, Artificial Sequence
  mRNA product Design a-2 (hSL-A100) comprising derived and/or modified sequence from LASV(ISTH2010-NIG-2012;Clade II)__AIT17482__GPCmut10 (opt5)
aggagaguccgcucagccagguugcagaagcggcuuagcguguguccuaaucuucucucugcguguagguaggccugugccgcaaacaagcuuaccaugggccagaucauuaccuucuuucaagaggugccccacgucaucgaagagguuaugaacauugugcugaucgcccucagccugcuugcuauucugaaggggaucuacaauguggccacaugcggacucuucggccuggucuccuuucuucugcucugugggagaucuugcagcacgaccuauaaaggaguguacgaacugcagacacuggagcucgacauggcgucccugaacauguguaugccucuuucuugcaccaagaauaacagccaucacuauaucaugguuggcaaugaaacagggcuggagcucacccugacaaacaccuccauuaucaaucauaaauucuguaaccuuucugaugcucacaagaaaaaucuguacgaccaugcccucaugagcauuaucuccacguuucaccugagcauuccgaacuucaaucaguaugaggccaugucuugcgauuuuaacggaggcaagaucuccgugcaguacaaucugagccacgcuuaugccgucgacgcugccaaccauuguggcaccauugcgaauggggugcuccaaacauucaugcggauggccuggggaggcucuuacaucgcucuggauuccgggaagggaagcugggacugcaucaugaccucuuaccaguaucuuauuauccagaacauuacaugggaagaucacugucaguuuucccgccccagcccuaucggcuaccuggggcuccugucccaaagaacccgggacauuuauaucucucgcagacuucugggaacguucacauggacccucagcgauuccgagggcaacgaaacacccggcggguacugccugacccgguggaugcugaucgaggccgagcucaaauguuuuggaaauaccgcuguugccaagugcaacgaaaaacaugacgaggaguucugcgauaugcugcgccuuuuugacuucuguaagcaggcgauuagacggcugaaaacagaagcccagaugagcauccagcucauuaauaaggcugugaacgcccugaucaaugaucaacuuauuaugaagaaccaucugcgcgacaucaugggcaucccuuauugcaauuacucuaaauauugguaccucaaccacacggucaccgggaagacaucccugcccagauguuggcuggugagcaauggaucuuaccucaacgaaacccacuucagcgacgauauugagcagcaggcugacaauaugaucacagagcugcuucaaaaagaauauauugaucggcagggcaagaccccucuggggcucguggaccuguuugucuucuccacgucuuuuuaccugaucagcauuuuccuucaccucguuaaaaucccgacacaucgccacguggugggaaagcccugcccuaaaccccauagacugaaccacaugggcauuuguuccugcggccuguauaagcacccugggguccccgugaaguggaaacggugaggacuagucccuguucccagagcccacuuuuuuuucuuuuuuugaaauaaaauagccugucuuucagaucucaaaggcucuuuucagagccaccaaaaaaaaaaaaaaaaaaaaaaaaaaaaaaaaaaaaaaaaaaaaaaaaaaaaaaaaaaaaaaaaaaaaaaaaaaaaaaaaaaaaaaaaaaaaaaaaaaaaa

SEQ ID NO: 37295 - RNA, 1764 nt, Artificial Sequence
  mRNA product Design a-2 (hSL-A100) comprising derived and/or modified sequence from LASV(Lassa virus/H.sapiens-wt/NGA/2015/ISTH_0543;Clade II)__AVO03639__GPCmut10 (opt5)
aggagaguccgcucagccagguugcagaagcggcuuagcguguguccuaaucuucucucugcguguagguaggccugugccgcaaacaagcuuaccaugggccagaucauuaccuucuuucaagaggugccccacgucaucgaagagguuaugaacauugugcugaucgcccucagccugcuugcuauucugaaggggaucuacaauguggccacaugcggacucuucggccuggucuccuuucuucugcucugugggagaucuugcagcacgaccuauaaaggaguguacgaacugcagacacuggagcucgacauggcgaaccugaauauguguaugccucuuuccugcaccaagaacaauucucaucacuauaucaugguuggcaacgaaacagggcuggagcucacccugacaaauaccagcauuaucaaccauaaauucuguaaucuuuccgaugcucacaagaaaaaccuguacgaccaugcccucaugucuauuaucagcacguuucaccuguccauuccgaauuucaaccaguaugaggccaugagcugcgauuuuaauggaggcaagaucucugugcaguacaaccugucccacaccuaugcugucgacgccgcuaaucauuguggcacaauugccaacggggugcuccaaaccuucaugcggauggcguggggaggcagcuacaucgcccuggauucugggaagggauccugggacugcaucaugacaagcuaccaguaucuuguuauucagaacaccacgugggaagaucacugucaguuuucucgccccuccccuaucggcuaccuggggcuccugagccaaagaacacgggacauuuauaucucccgcagacuucugggaaccuucacauggacccucucugauagcgagggcaaugaaacccccggcggguacugccugacacgguggaugcugauugaggcugagcucaaauguuuuggaaacacggccguggcuaagugcaaugaaaaacaugacgaggaguucugcgauaugcugcgccuuuuugacuucuguaagcaggccaucagacggcugaaaaccgaagcgcagauguccauccagcucauuaacaaggccgucaaugcucugaucaacgaucaacuuauuaugaagaaucaucugcgcgacaucaugggcauuccuuauugcaacuacagcaaauauugguaccucaaucacacagugaccgggaagacaucucugcccagauguuggcugguguccaacggaagcuaccucaaugaaacccacuucucugacgauaucgagcagcaggccgacaacaugaucacggagcugcuucaaaaagaauauauugaucggcagggcaagacaccucuggggcucgucgaccuguuuguuuucagcaccuccuuuuaccugaucucuauuuuccuucaccucgugaaaaucccgacccaucgccacauuacaggaaagcccugcccuaaaccccauagacugaaucacaugggcaucuguagcugcggccuguauaagcacccuggggugcccgucaaguggaaacggugaggacuagucccuguucccagagcccacuuuuuuuucuuuuuuugaaauaaaauagccugucuuucagaucucaaaggcucuuuucagagccaccaaaaaaaaaaaaaaaaaaaaaaaaaaaaaaaaaaaaaaaaaaaaaaaaaaaaaaaaaaaaaaaaaaaaaaaaaaaaaaaaaaaaaaaaaaaaaaaaaaaaa

SEQ ID NO: 37296 - RNA, 1764 nt, Artificial Sequence
  mRNA product Design a-2 (hSL-A100) comprising derived and/or modified sequence from LASV(Lassa virus/H.sapiens-wt/NGA/2016/ISTH_0009;Clade II)__AVO03571__GPCmut10 (opt5)
aggagaguccgcucagccagguugcagaagcggcuuagcguguguccuaaucuucucucugcguguagguaggccugugccgcaaacaagcuuaccaugggccagaucauuaccuucuuucaagaggugccccacgucaucgaagagguuaugaacauugugcugaucgcccucagccugcuugcuauucugaaggggaucuacaauguggccacaugcggacuccugggccuugucuccuuccugcuccugugugggagaucuugcagcacgaccuauaaaggaguguacgaacugcagacacucgagcuggacauggcgucccuuaacauguguaugccucugucuugcaccaagaauaacagccaucacuauaucaugguuggcaaugaaacagggcucgagcugacccuuacaaacaccuccauuaucaaucauaaauuuuguaaccugucugaugcucacaagaaaaaucucuacgaccaugcccugaugagcauuaucuccacguuccaccugagcauuccgaacuuuaaucaguaugaggccaugucuugcgauuucaacggaggccggaucuccgugcaguacaaucucagccacucuuaugcugucgacgccgcuaaccauuguggcaccauugccaauggggugcugcaaacauuuaugcgcauggcguggggaggcuccuacaucgcccuugauagcgggaagggaucuugggacugcaucaugaccuccuaccaguaucugauuauccagaacacaaccugggaagaucacugucaguucagcagacccuccccuauuggcuaccucgggcugcuuucucaacggacgcgcgacaucuauauuagcagacggcugcucggaacauuuaccuggacacuguccgauagcgagggcaacgaaacccccggcggguacugccugacccgcuggaugcucaucgaggcugagcugaaguguuucggaaauacagccguugcuaaaugcaacgaaaagcaugacgaggaauuuugcgauaugcuuagacuguucgacuuuuguaaacaggccauccggcgccucaagacggaggcgcagaugucuauucagcugaucaauaaagccgugaacgcucuuauuaaugaucaacugaucaugaagaaccaccucagagacauuaugggcaucccuuauugcaauuacuccaaguauugguaccugaaccacaccgucacagggaaaaccagccugccccgguguuggcucgugucuaauggaagcuaccugaacgaaacacauuucuccgacgauaucgagcagcaggccgacaauaugauuaccgagcuucugcaaaaggaauauaucgaucgccagggcaaaacgccucucgggcugguggaccuguucgucuuuucuaccagcuucuaccuuauuuccaucuuucuccaccugguuaagauuccgacacauagacacaucaccggaaaacccugcccuaagccccaucggcugaaccacaugggcauuuguagcugcggccucuauaaucacccuggggugcccgugaaauggaagcgcugaggacuagucccuguucccagagcccacuuuuuuuucuuuuuuugaaauaaaauagccugucuuucagaucucaaaggcucuuuucagagccaccaaaaaaaaaaaaaaaaaaaaaaaaaaaaaaaaaaaaaaaaaaaaaaaaaaaaaaaaaaaaaaaaaaaaaaaaaaaaaaaaaaaaaaaaaaaaaaaaaaaaa

SEQ ID NO: 37297 - RNA, 1764 nt, Artificial Sequence
  mRNA product Design a-2 (hSL-A100) comprising derived and/or modified sequence from LASV(Lassa virus/H.sapiens-wt/NGA/2016/ISTH_0017;Clade II)__AVO03567__GPCmut10 (opt5)
aggagaguccgcucagccagguugcagaagcggcuuagcguguguccuaaucuucucucugcguguagguaggccugugccgcaaacaagcuuaccaugggccagaucauuaccuucuuucaagaggugccccacgucaucgaagagguuaugaacauugugcugaucgcccucagccugcuugcuauucugaaggggaucuacaauguggccacaugcggacucuucggccuggucuccuuucuucugcucugugggagaucuugcagcacgaccuauaaaggaguguacgaacugcagacacuggagcucgacauggcgucccugaacauguguaugccucuuucuugcaccaagaauaacagccaucacuauaucaugguuggcaaugaaacagggcuggagcucacccugacaaacaccuccauuaucaaucauaaauucuguaaccuuucugaugcucacaagaaaaaucuguacgaccaugcccucaugagcauuaucuccacguuucaccugagcauuccgaacuucaaucaguaugaggccaugucuugcgauuuuaacggaggcaagaucuccgugcaguacaaucugagccacaccuaugcuauugacgccgcuaaccauuguggcacaaucgccaaugggguccuccaaaccuucaugcggauggcguggggaggcucuuacaucgcccuggauuccgggaagggaagcugggacugcauuaugacaucuuaccaguaucuuaucauucagaacaccacgugggaagaucacugucaguuuucccgccccagcccuaucggcuaccuggggcuccugucccaaagaacacgggacauuuauaucucucgcagacuucugggaaccuucacauggacccucagcgauuccgagggcaacgaaacccccggcggguacugccugacacgguggaugcugaucgaggcugagcucaaauguuuuggaaauacggccguggcuaagugcaacgaaaaacaugacgaggaguucugcgauaugcugcgccuuuuugacuucuguaagcaggccauuagacggcugaaaaccgaagcgcagaugagcauccagcucauuaauaaggccguuaacgcucugaucaaugaucaacuuauuaugaagaaccaucugcgcgacaucaugggcaucccuuauugcaauuacucuaaauauugguaccucaaccacacagugaccgggaagacaucccugcccagauguuggcuggucagcaauggaucuuaccucaacgaaacccacuucagcgacgauauugagcagcaggccgacaauaugaucacggagcugcuucaaaaagaauauauggaucggcagggcaagacaccucuggggcucguggaccuguuuguguucuccaccucuuuuuaccugauuagcaucuuccuucaccucguccgcauuccgacccauagacacguuaucggaaaacccugcccuaagccccaucggcugaaccacaugggcauuuguuccugcggccuguauaaacacccuggggugcccgugaaguggaagcgcugaggacuagucccuguucccagagcccacuuuuuuuucuuuuuuugaaauaaaauagccugucuuucagaucucaaaggcucuuuucagagccaccaaaaaaaaaaaaaaaaaaaaaaaaaaaaaaaaaaaaaaaaaaaaaaaaaaaaaaaaaaaaaaaaaaaaaaaaaaaaaaaaaaaaaaaaaaaaaaaaaaaaa

SEQ ID NO: 37298 - RNA, 1764 nt, Artificial Sequence
  mRNA product Design a-2 (hSL-A100) comprising derived and/or modified sequence from LASV(Lassa virus/H.sapiens-wt/NGA/2018/ISTH_0959;Clade II)__AVV65099__GPCmut10 (opt5)
aggagaguccgcucagccagguugcagaagcggcuuagcguguguccuaaucuucucucugcguguagguaggccugugccgcaaacaagcuuaccaugggccagaucauuaccuucuuucaagaggugccccacgucaucgaagagguuaugaacauugugcugaucgcccucagccugcuugcuauucugaaggggaucuacaauguggucacaugcggacucuucggccugguguccuuucuucugcucugugggagaucuugcagcacgaccuauaaaggaguuuacgaacugcagacacuggagcucgacauggccucccugaacauguguaugccucuuucuugcaccaagaauaacagccaucacuauaucauggugggcaaugaaacagggcuggagcucacccugacaaacaccuccauuaucaaucauaaauucuguaaccuuucugaugcgcacaagaaaaaucuguacgaccaugcucucaugagcauuaucuccacguuucaccugagcauuccgaacuucaaucaguaugaggccaugucuugcgauuuuaacggaggcaagaucuccguccaguacaaucugagccacgccuaugcuauugacgccgcuaaccauuguggcaccaucgccaauggggugcuccaaacauucaugcggauggcguggggaggcucuuacaucgcccuggauuccgggaagggaagcugggacugcauuaugaccucuuaccaguaucuuaucauucagaacacaaccugggaagaucacugucaguuuucccgccccagcccuaucggcuaccuggggcuccugucccaaagaacgcgggacauuuauaucucucgcagacuucugggaacauucaccuggacacucagcgauuccgagggcaacgaaacccccggcggguacugccugacccgguggaugcugaucgaggcugagcucaaauguuuuggaaauacagccguugcuaagugcaacgaaaaacaugacgaggaguucugcgauaugcugcgccuuuuugacuucuguaagcaggccauuagacggcugaaaacggaagcgcagaugagcauccagcucauuaauaaggccgugaacgcucugaucaaugaucaacuuauuaugaagaaccaucugcgcgacaucaugggcaucccuuauugcaauuacucuaaauauugguaccucaaccacaccgucacagggaagaccucccugcccagauguuggcuggugagcaauggaucuuaccucaacgaaacacacuucagcgacgauauugagcagcaggccgacaauaugaucaccgagcugcuucaaaaagaauauauugaucggcagggcaagacgccucuggggcucguggaccuguuugucuucuccacaucuuuuuaccugaucagcauuuuccuucaccucguuaaaaucccgacccaucgccacgugauuggaaagcccugcccuaaaccccauagacugaaccacaugggcaucuguuccugcggccuguauaagcacccuggggugcccgucaaguggaaacggugaggacuagucccuguucccagagcccacuuuuuuuucuuuuuuugaaauaaaauagccugucuuucagaucucaaaggcucuuuucagagccaccaaaaaaaaaaaaaaaaaaaaaaaaaaaaaaaaaaaaaaaaaaaaaaaaaaaaaaaaaaaaaaaaaaaaaaaaaaaaaaaaaaaaaaaaaaaaaaaaaaaaa

SEQ ID NO: 37299 - RNA, 1764 nt, Artificial Sequence
  mRNA product Design a-2 (hSL-A100) comprising derived and/or modified sequence from LASV(LASV003-NIG-2008;Clade II)__AIT17580__GPCmut10 (opt5)
aggagaguccgcucagccagguugcagaagcggcuuagcguguguccuaaucuucucucugcguguagguaggccugugccgcaaacaagcuuaccaugggccagaucauuaccuucuuucaagaggugccccacgucaucgaagagguuaugaacauugugcugaucgcccucagccugcuugcuauucugaaggggaucuacaauguggccacaugcggacucuucggccuggucuccuuucuucugcucugugggagaucuugcagcacgaccuauaaaggaguguacgaacugcagacacuggagcucgacauggcgucccugaacauguguaugccucuuucuugcaccaagaauaacagccaucacuauaucaugguuggcaaugaaacagggcuggagcucacccugacaaacaccuccauuaucaaucauaaauucuguaaccuuucugaugcucacaagaaaaaucuguacgaccaugcccucaugagcauuaucuccacguuucaccugagcauuccgaacuucaaucaguaugaggccaugucuugcgauuuuaacggaggcaagaucuccgugcaguacaaucugagccacaccuaugcugucgacgccgcuaaccauuguggcacaauugccaauggggugcuccaaaccuucaugcggauggcguggggaggcucuuacaucgcccuggauuccgggaagggaagcugggacugcaucaugacaucuuaccaguaucuuauuauccagaacaccacgugggaagaucacugucaguuuucccgccccagcccuauuggcuaccuggggcuccugucccaaagaacacgggacaucuauauuucucgcagacuucugggaaccuucacauggacccucagcgauuccgagagcaacgaaacccccggcggcuacugccugacacgguggaugcugaucgaggcugagcucaaauguuuugggaauacggccguugcuaagugcaacgaaaaacaugacgaggaguucugcgauaugcugcgccuuuuugacuucuguaagcaggccaucagacggcugaaagcggaagcccagaugucuauucagcucaucaauaaggcugugaacgcccugauuaaugaucaacuuaucaugaagaaccaucugcgcgacauuaugggaaucccuuauugcaauuacuccaaauauugguaccucaaccacaccgucacaggcagaaccagccugccccgguguuggcuggugucuaaugggagcuaccucaacgaaacacacuucuccgacgauaucgagcagcaggcugacaauaugauuaccgagcugcuucaaaaggaauauauggaucgccagggaaaaacgccucugggccucguggaccuguuugucuucucuaccagcuuuuaccugaucuccauuuuccuucaccucguuaagaucccgacacauagacacgugauugggaaacccugcccuaagccccaucggcugaaccacaugggaaucuguagcugcggccuguauaaacacccuggcgugcccgucaaguggaagcgcugaggacuagucccuguucccagagcccacuuuuuuuucuuuuuuugaaauaaaauagccugucuuucagaucucaaaggcucuuuucagagccaccaaaaaaaaaaaaaaaaaaaaaaaaaaaaaaaaaaaaaaaaaaaaaaaaaaaaaaaaaaaaaaaaaaaaaaaaaaaaaaaaaaaaaaaaaaaaaaaaaaaaa

SEQ ID NO: 37300 - RNA, 1764 nt, Artificial Sequence
  mRNA product Design a-2 (hSL-A100) comprising derived and/or modified sequence from LASV(LASV035-NIG-2009;Clade II)__AIT17588__GPCmut10 (opt5)
aggagaguccgcucagccagguugcagaagcggcuuagcguguguccuaaucuucucucugcguguagguaggccugugccgcaaacaagcuuaccaugggccagaucauuaccuucuuucaagaggugccccacgucaucgaagagguuaugaacauugugcugaucgcccucagccugcuugcuauucugaaggggaucuacaauguggccacaugcggacucuucggccuggucuccuuucuucugcucugugggagaucuugcagcacgaccuauaaaggaguguacgaacugcagacacuggagcucgacauggcgucccugaacauguguaugccucuuucuugcaccaagaauaacagccaucacuauaucaugguuggcaaugaaacagggcuggagcucacccugacaaacaccuccauuaucaaucauaaauucuguaaccuuucugaugcucacaagaaaaaucuguacgaccaugcccucaugagcauuaucuccacguuucaccugagcauuccgaacuucaaucaguaugaggccaugucuugcgauuuuaacggaggcaagaucuccgugcaguacaaucugagccacgcuuaugccgucgacgcugccaaccauuguggcaccauugcgaauggggugcuccaaacauucaugcggauggccuggggaggcucuuacaucgcucuggauuccgggaagggaagcugggacugcaucaugaccucuuaccaguaucuuauuauccagaacacaaccugggaagaucacugucaguuuucccgccccagcccuauuggcuaccuggggcuccugucccaaagaacgcgggacaucuauauuucucgcagacuucugggaacauucaccuggacacucagcgauuccgagggcaacgaaacccccggcggguacugccugacccgguggaugcugaucgaggccgagcucaaauguuuuggaaauacagcuguugccaagugcaacgaaaaacaugacgaggaguucugcgauaugcugcgccuuuuugacuucuguaagcaggcgaucagacggcugaaagccgaagcucagaugagcauucagcucaucaauaaggccgugaacgcucugauuaaugaucaacuuaucaugaagaaccaucugcgcgacauuaugggcaucccuuauugcaauuacucuaaauauugguaccucaaccacacggucaccgggaagacaucccugcccagauguuggcuggugagcaauggaucuuaccucaacgaaacccacuucagcgacgauaucgagcagcaggccgacaauaugauuacagagcugcuucaaaaagaauauaucgaucggcagggcaagaccccucuggggcucguggaccuguuugucuucuccacgucuuuuuaccugauuagcaucuuccuucaccucguuaaaauuccgacacaucgccacgugaucggaaagcccugcccuaaaccccauagacugaaccacaugggcauuuguuccugcggccuguauaagcacccuggggugcccgucaaguggaaacggugaggacuagucccuguucccagagcccacuuuuuuuucuuuuuuugaaauaaaauagccugucuuucagaucucaaaggcucuuuucagagccaccaaaaaaaaaaaaaaaaaaaaaaaaaaaaaaaaaaaaaaaaaaaaaaaaaaaaaaaaaaaaaaaaaaaaaaaaaaaaaaaaaaaaaaaaaaaaaaaaaaaaa

SEQ ID NO: 37301 - RNA, 1764 nt, Artificial Sequence
  mRNA product Design a-2 (hSL-A100) comprising derived and/or modified sequence from LASV(LASV1000-NIG-2009;Clade II)__AIT17782__GPCmut10 (opt5)
aggagaguccgcucagccagguugcagaagcggcuuagcguguguccuaaucuucucucugcguguagguaggccugugccgcaaacaagcuuaccaugggccagaucauuaccuucuuucaagaggugccccacgucaucgaagagguuaugaacauugugcugaucgcccucagccugcuugcuauucugaaggggaucuacaauguggccacaugcggacucuucggccuggucuccuuucuucugcucugugggagaucuugcagcacgaccuauaaaggaguguacgaacugcagacacuggagcucgacauggcgucccugaacauguguaugccucuuucuugcaccaagaauaacagccaucacuauaucaugguuggcaaugaaacagggcuggagcucacccugacaaacaccuccauuaucaaucauaaauucuguaaccuuucugaugcucacaagaaaaaucuguacgaccaugcccucaugagcauuaucuccacguuucaccugagcauuccgaacuucaaucaguaugaggccaugucuugcgauuuuaacggaggcaagaucuccgugcaguacaaucugagccacaccuaugcugucgacgccgcuaaccauuguggcacaauugccaauggggugcuccaaaccuucaugcggauggcguggggaggcucuuacaucgcccuggauuccgggaagggaagcugggacugcaucaugacaucuuaccaguaucuuauuauccagaacaccacgugggaagaucacugucaguuuucccgccccagcccuauuggcuaccuggggcuccugucccaaagaacacgggacaucuauauuucucgcagacuucugggaaccuucacauggacccucagcgauuccgagggcaacgaaacccccggcggguacugccugacacgguggaugcugaucgaggcugagcucaaauguuuuggaaauacggccguugcuaagugcaacgaaaaacaugacgaggaguucugcgauaugcugcgccuuuuugacuucuguaagcaggccaucaaaagacugaagaccgaagcgcagaugagcauucagcucaucaauaaggccgugaacgcucugauuaaugaucaacuuaucaugaaaaaccaucugcgggacauuaugggcaucccuuauugcaauuacucuaaguauugguaccucaaccacacagucaccgggaaaacaucccugccccgcuguuggcuggugagcaauggaucuuaccucaacgaaacccacuucagcgacgauaucgagcagcaggccgacaauaugauuacggagcugcuucaaaaggaauauaucgauagacagggcaaaacaccucuggggcucguggaccuguuugucuucuccaccucuuuuuaccugauuagcaucuuccuucaccucguuaagauuccgacccaucggcacguggugggaaaacccugcccuaagccccaucgccugaaccacaugggcaucuguuccugcggccuguauaagcacccugggguccccgugaaauggaagagaugaggacuagucccuguucccagagcccacuuuuuuuucuuuuuuugaaauaaaauagccugucuuucagaucucaaaggcucuuuucagagccaccaaaaaaaaaaaaaaaaaaaaaaaaaaaaaaaaaaaaaaaaaaaaaaaaaaaaaaaaaaaaaaaaaaaaaaaaaaaaaaaaaaaaaaaaaaaaaaaaaaaaa

SEQ ID NO: 37302 - RNA, 1764 nt, Artificial Sequence
  mRNA product Design a-2 (hSL-A100) comprising derived and/or modified sequence from LASV(LASV221-NIG-2010;Clade II)__AIT17624__GPCmut10 (opt5)
aggagaguccgcucagccagguugcagaagcggcuuagcguguguccuaaucuucucucugcguguagguaggccugugccgcaaacaagcuuaccaugggccagaucauuaccuucuuucaagaggugccccacgucaucgaagagguuaugaacauugugcugaucgcccucagccugcuugcuauucugaaggggaucuacaauguggccacaugcggacucuucggccuggucuccuuucuucugcucugugggagaucuugcagcacgaccuauaaaggaguguacgaacugcagacacuggagcucgacauggcgucccugaacauguguaugccucuuucuugcaccaagaauaacagccaucacuauaucaugguuggcaaugaaacagggcuggagcucacccugacaaacaccuccauuaucaaucauaaauucuguaaccuuucugaugcucacaagaaaaaucuguacgaccaugcccucaugagcauuaucuccacguuucaccugagcauuccgaacuucaaucaguaugaggccaugucuugcgauuuuaacggaggcaagaucuccgugcaguacaaucugagccacaccuaugcuauugacgccgcuaaccauuguggcacaaucgccaaugggguccuccaaaccuucaugcggauggcguggggaggcucuuacaucgcccuggauuccgggaagggaagcugggacugcauuaugacaucuuaccaguaucuuaucauucagaacaccacgugggaagaucacugucaguuuucccgccccagcccuaucggcuaccuggggcuccugucccaaagaacacgggacauuuauaucucucgcagacuucugggaaccuucacauggacccucagcgauuccgagggcaacgaaacccccggcggguacugccugacacgguggaugcugaucgaggcugagcucaaauguuuuggaaauacggccguggcuaagugcaacgaaaaacaugacgaggaguucugcgauaugcugcgccuuuuugacuucuguaagcaggccauuagacggcugaaaaccgaagcgcagaugagcauccagcucauuaauaaggccguuaacgcucugaucaaugaucaacuuauuaugaagaaccaucugcgcgacaucaugggcaucccuuauugcaauuacucuaaauauugguaccucaaccacacagugaccgggaagacaucccugcccagauguuggcuggucagcaauggaucuuaccucaacgaaacccacuucagcgacgauauugagcagcaggccgacaauaugaucacggagaugcugcaaaaagaauauauggaucggcagggcaagacaccucuugggcugguggaccucuuuguguucuccaccucuuuuuaccugauuagcaucuuccugcaccuugucaaaauuccgacccaucgccacguuaucggaaagcccugcccuaaaccccauagacucaaccacaugggcauuuguuccugcggccuguauaagcacccuggggugcccgugaaguggaaacggugaggacuagucccuguucccagagcccacuuuuuuuucuuuuuuugaaauaaaauagccugucuuucagaucucaaaggcucuuuucagagccaccaaaaaaaaaaaaaaaaaaaaaaaaaaaaaaaaaaaaaaaaaaaaaaaaaaaaaaaaaaaaaaaaaaaaaaaaaaaaaaaaaaaaaaaaaaaaaaaaaaaaa

SEQ ID NO: 37303 - RNA, 1764 nt, Artificial Sequence
  mRNA product Design a-2 (hSL-A100) comprising derived and/or modified sequence from LASV(LASV237-NIG-2010;Clade II)__AIT17638__GPCmut10 (opt5)
aggagaguccgcucagccagguugcagaagcggcuuagcguguguccuaaucuucucucugcguguagguaggccugugccgcaaacaagcuuaccaugggccagaucauuaccuucuuucaagaggugccccacgucaucgaagagguuaugaacauugugcugaucgcccucagccugcuugcuauucugaaggggaucuacaauguggccacaugcggacucuucggccuggucuccuuucuucugcucugugggagaucuugcagcacgaccuauaaaggaguguacgaacugcagacacuggagcucgacauggcgucccugaacauguguaugccucuuucuugcaccaagaauaacagccaucacuauaucaugguuggcaaugaaacagggcuggagcucacccugacaaacaccuccauuaucaaucauaaauucuguaaccuuucugaugcucacaagaaagaccuguacgaucaugcccucaugagcauuaucuccacguuucaccugagcauuccgaauuucaaccaguaugaggccaugucuugcgacuuuaauggaggcaagaucuccgugcaguacaaccugagccacaccuaugcugucgaugccgcuaaucauuguggcacaauugccaacggggugcuccaaaccuucaugcggauggcguggggaggcucuuacaucgcccuggacuccgggaagggaagcugggauugcaucaugacaucuuaccaguaucuuauuauccagaauaccacgugggaagaccacugucaguuuucccgccccagcccuauuggcuaccuggggcuccugucccaaagaacacgggauaucuauauuucucgcagacuucugggaaccuucacauggacccucagcgacuccgagggcaacgaaacccccggcggguacugccugacacgguggaugcugaucgaggcugagcucaaauguuuuggaaacacggccguugcuaagugcaaugaaaaacaugaugaggaguucugcgacaugcugcgccuuuuugauuucuguaagcaggccaucagacggcugaaaaccgaagcgcagaugagcauucagcucaucaacaaggccgugaaugcucugauuaacgaccaacuuaucaugaagaaucaucugcgcgacauuaugggcaucccuuauugcaacuacucuaaauauugguaccucaaucacacagucaccgggaagacaucccugcccagauguuggcuggugagcaacggaucuuaccucaaugaaacccacuucagcgaugacaucgagcagcaggccgauaacaugauuacggagcugcuucaaaaagaauauauggaccggcagggcaagacaccucuggggcucguggaucuguuugucuucuccaccucuuuuuaccugaucagcauuuuccuucaccucaucaaaauuccgacccaucgccacaucacaggaaagcccugcccuaaaccccauagacugaaucacaugggcauuuguuccugcggccuguauaagcacccugggguucccgugaaguggaaacggugaggacuagucccuguucccagagcccacuuuuuuuucuuuuuuugaaauaaaauagccugucuuucagaucucaaaggcucuuuucagagccaccaaaaaaaaaaaaaaaaaaaaaaaaaaaaaaaaaaaaaaaaaaaaaaaaaaaaaaaaaaaaaaaaaaaaaaaaaaaaaaaaaaaaaaaaaaaaaaaaaaaaa

SEQ ID NO: 37304 - RNA, 1764 nt, Artificial Sequence
  mRNA product Design a-2 (hSL-A100) comprising derived and/or modified sequence from LASV(LASV253-NIG-2011;Clade II)__AIT17670__GPCmut10 (opt5)
aggagaguccgcucagccagguugcagaagcggcuuagcguguguccuaaucuucucucugcguguagguaggccugugccgcaaacaagcuuaccaugggccagaucauuaccuucuuucaagaggugccccacgucaucgaagagguuaugaacauugugcugaucgcccucagccugcuugcuauucugaaggggaucuacaauguggccacaugcggacucuucggccuggucuccuuucuucugcucugugggagaucuugcagcacgaccuauaaaggaguguacgaacugcagacacuggagcucgacauggcgucccugaacauguguaugccucuuucuugcaccaagaauaacagccaucacuauaucaugguuggcaaugaaacagggcuggagcucacccugacaaacaccuccauuaucaaucauaaauucuguaaccuuucugaugcucacaagaaaaaucuguacgaccaugcccucaugagcauuaucuccacguuucaccugagcauuccgaacuucaaucaguaugaggccaugucuugcgauuuuaacggaggcaagaucuccgugcaguacaaucugagccacaccuaugcugucgacgccgcuaaccauuguggcacaauugccaauggggugcuccaaaccuucaugcggauggcguggggaggcucuuacaucgcccuggauuccgggaagggaagcugggacugcaucaugacaucuuaccaguaucuuauuauccagaacaccacgugggaagaucacugucaguuuucccgccccagcccuauuggcuaccuggggcuccugucccaaagaacacgggacaucuauauuucucgcagacuucugggaaccuucacauggacccucagcgauuccgagggcaacgaaacccccggcggguacugccugacacgguggaugcugaucgaggcugagcucaaauguuuuggaaauacggccguugcuaagugcaacgaaaaacaugacgaggaguucugcgauaugcugcgccuuuuugacuucuguaagcaggccaucagacggcugaaagcggaagcccagaugagcauucagcucaucaauaaggcugugaacgcccugauuaaugaucaacuuaucaugaagaaccaucugcgcgacauuaugggcaucccuuauugcaauuacucuaaauauugguaccucaaccacaccgucacagggagaaccucccugccccgguguuggcuggugagcaauggaucuuaccucaacgaaacacacuucagcgacgauaucgagcagcaggcugacaauaugauuaccgagcugcuucaaaaggaauauaucgaucgccagggcaaaacgccucuggggcucguggaccuguuugucuucuccacaucuuuuuaccugauuagcaucuuccuucaccucguuaagauuccgacccauagacacaucauuggaaaacccugcccuaagccccaucggcugaaccacaugggcaucuguuccugcggccuguauaaacacccuggggugcccgugaaguggaagcgcugaggacuagucccuguucccagagcccacuuuuuuuucuuuuuuugaaauaaaauagccugucuuucagaucucaaaggcucuuuucagagccaccaaaaaaaaaaaaaaaaaaaaaaaaaaaaaaaaaaaaaaaaaaaaaaaaaaaaaaaaaaaaaaaaaaaaaaaaaaaaaaaaaaaaaaaaaaaaaaaaaaaaa

SEQ ID NO: 37305 - RNA, 1764 nt, Artificial Sequence
  mRNA product Design a-2 (hSL-A100) comprising derived and/or modified sequence from LASV(LASV254-NIG-2011;Clade II)__AIT17674__GPCmut10 (opt5)
aggagaguccgcucagccagguugcagaagcggcuuagcguguguccuaaucuucucucugcguguagguaggccugugccgcaaacaagcuuaccaugggccagaucauuaccuucuuucaagaggugccccacgucaucgaagagguuaugaacauugugcugaucgcccucagccugcuugcuauucugaaggggaucuacaauguggccacaugcggacucuucggccuggucuccuuucuucugcucugugggagaucuugcagcacgaccuauaaaggaguguacgaacugcagacacuggagcucgacaugaccaaccugaauauguguaugccucuuuccugcacaaagaacaauucucaucacuauaucaugguuggcaacgaaaccgggcuggagcucacacugaccaauacgagcauuaucaaccauaaauucuguaaucuuuccgaugcgcacaagaaaaaccuguacaaucaugcucucaugucuauuaucagcaccuuucaccuguccauuccgaacuucaaucaguaugaggccaugagcugcgacuuuaacggaggcaagaucucugugcaguacaaucugucccacagcuaugccgucgaugcugccaaccauuguggcacaauugcuaacggggugcuccaaaccuucaugcggauggccuggggaggcucuuacaucgcgcuggacuccgggaagggaaauugggauugcaucaugacaagcuaccaguaucuuauuauccagaacaccacgugggaagaccacugucaguuuucucgccccuccccuauuggcuaccuggggcuccugagccaaagaacacgggauaucuauauuucccgcagacuucugggaaccuucacauggacccucucugacagcgagggcaaugaaacccccggcggguacugccugacacgguggaugcugaucgaggccgagcucaaauguuuuggaaacacggcuguugccaagugcaaugaaaaacaugaugaggaguucugcgacaugcugcgccuuuuugauuucuguaagcaggcuaucagacggcugaaaaccgaagcccaggcgaacauucagcucaucaauaaggccgugaacgcucugauuaaugaccaacuuaucaugaagaaccaucugcgcgauauuaugggcaucccuuauugcaauuacuccaaauauugguaccucaaccacacagucaccgggaagacaagccugcccagauguuggcuggugucuaauggauccuaccucaacgaaacccacuucagcgacgacaucgagcagcaggccgauaauaugauuacggagcugcuucaaaaagaauauauggaccggcagggcaagacaccucuggggcucguggaucuguuugucuucucuaccagcuuuuaccugaucuccauuuuccuucaccucguuaaaaucccgacccaucgccacgugauuggaaagcccugcccuaaaccccauagacugaaccacaugggcaucuguucuugcggccuguauaagcacccuggggugcccgucaaguggaaacggugaggacuagucccuguucccagagcccacuuuuuuuucuuuuuuugaaauaaaauagccugucuuucagaucucaaaggcucuuuucagagccaccaaaaaaaaaaaaaaaaaaaaaaaaaaaaaaaaaaaaaaaaaaaaaaaaaaaaaaaaaaaaaaaaaaaaaaaaaaaaaaaaaaaaaaaaaaaaaaaaaaaaa

SEQ ID NO: 37306 - RNA, 1764 nt, Artificial Sequence
  mRNA product Design a-2 (hSL-A100) comprising derived and/or modified sequence from LASV(Nig08-A19;Clade III)__ADU56618__GPCmut10 (opt5)
aggagaguccgcucagccagguugcagaagcggcuuagcguguguccuaaucuucucucugcguguagguaggccugugccgcaaacaagcuuaccaugggccagaucgugaccuucuuucaagaggucccccacguuauugaagaggugaugaacaucgugcugauugcccucagcauccuggcuauucuuaaggggcuguacaauaucgccacaugcggacucaucggccuggucacguuccuucugcucuccgggagaucuuguagcaugaccuauaaaggaguguacgaacugcagacacuggagcucaacaugaauacccugaacaugugcaugccucuuuccuguacaaagaauaacucucaucacuauauuaugguuggcaaugaaaccgggcuggagcucacacugaccaacacgagccuucugcaucacaaauuuugcaaucucuccgacgcgcauaagaaaaaccuguacgaucacacccugaugucuaucauuagcacauuccaccucuccaucccgaauuuuaaccaguaugaggcuaugagcugugacuucaauggaggcaagauuaccgugcaguacaaccugucucauuccuaugccaucgaugccgcuaaucacugcggcacagucgccaacggggugcuucaaaccuuuaugcggauggcuuggggaggcagcuacauugcccuggacucugggcgcggaaagugggauuguaucaugacguccuaccaguaucucaucauucagaacacaaccugggaagaccauugccaguucagcagacccucuccuaucggcuaccuggggcuucugucccaacggacacgcgauauuuauaucagcagacggcuccugggaaccuuuaccuggacacuguccgacucugagggcaaugaaacgcccggcggguacugucucacccgcuggaugcugauugaggcggagcuuaaaugcuucggaaacacagccguugcuaaguguaaugaaaaacacgaugaggaauuuugcgacaugcugagacucuucgauuuuugcaagcaggccauccggcgccugaaagcugaggcccagaugagcauccagcuuauuaacaaggcggugaaugcccugaucaacgaccaacucauuaugaagaaucaccugagagauaucaugggcauuccuuauuguaacuacuccaaauauugguaccugaaucauaccagcacagggcggaccucucucccccgcugcuggcuggucuccaacggaagcuaccuuaaugaaacgcacuucucugacgacaucgagcagcaggcugauaacaugaucacagagaugcugcaaaaggaauaucucgacagacagggcaaaaccccucuggggcugguggaucuuuucguguuuagcaccuccuucuaccucauuucuaucuuucugcaucuggucaagauuccgacacaccggcauaucguuggaaaacccuguccuaagccccaccgccucaaucacaugggcauuugcagcuguggccuguauaaacagccuggggugcccgugagauggaagcggugaggacuagucccuguucccagagcccacuuuuuuuucuuuuuuugaaauaaaauagccugucuuucagaucucaaaggcucuuuucagagccaccaaaaaaaaaaaaaaaaaaaaaaaaaaaaaaaaaaaaaaaaaaaaaaaaaaaaaaaaaaaaaaaaaaaaaaaaaaaaaaaaaaaaaaaaaaaaaaaaaaaaa

SEQ ID NO: 37307 - RNA, 1767 nt, Artificial Sequence
  mRNA product Design a-2 (hSL-A100) comprising derived and/or modified sequence from LASV(G1180-SLE-2010;Clade IV)__AIT17168__GPCmut10 (opt5)
aggagaguccgcucagccagguugcagaagcggcuuagcguguguccuaaucuucucucugcguguagguaggccugugccgcaaacaagcuuaccaugggccagaucgugaccuucuuucaagaggucccccacguuauugaagaggugaugaacaucgugcugauugcccucagcauccuggcuguccuuaaggggcuguacaauuucgccacaugcggacucgugggccugcuuacguuucugcuccugugugggagauccugcaccgcgucucgguauaaaggaguuuacgaacugcagacacucgagcugaacauggaaacccuuaauauguguaugccucugagcugcacaaagaacaauucccaucacuauauuauggugggcaacgagaccgggcucgagcugacacuuaccaauacgucuaucaucaaccauaaauucuguaaucugagcgacgcucacaagaaaaaccucuacgaucaugcccugauguccauuaucucuaccuuucaccugagcauuccgaauuucaaccaguaugaagccauguccugcgacuuuaauggaggcaagaucagcguccaguacaaccucucucacuccuaugcuggcgaugccgcuaaucauugugggacaguggccaacggaguucugcaaaccuucaugcgcauggcguggggcgggagcuacauugcccuugacucuggacacggcuccugggauugcaucaugacaagcuaccaguaucugauuauccagaacaccacgugggaggaccauugucaguuuucuagacccuccccuaucggguaccucggacugcuuagccaacggacacgcgauauuuauaucuccagacggcugcucggcaccuucacauggacccugucugacagcgaaggcaaggauacccccgggggauacugccugacacgcuggaugcucauugaggcugagcugaaauguuuuggcaauacggccguggcuaagugcaacgaaaaacacgacgaggaguucugcgauaugcuuagacuguuugacuucuguaagcaggccauccagcggcucaaagcggaagcccagauguccauucaacugaucaauaaggcugucaacgcccuuaucaaugaucagcugauuaugaagaaccaccuccgcgacaucauggggauuccuuauugcaauuacagcaaauauugguaccugaaccauaccacaaccggaaagacaucucugcccaaauguuggcucguguccaauggcagcuaccugaacgaaacccacuucucugacgauaucgagcagcaagcugacaauaugauuacggagaugcuucagaaggaauauauggagagacaggggaaaacaccucugggacucguggaucuguuugucuucagcaccuccuuuuaccugaucucuaucuuccuucaucucguuaagauuccgacccaccggcauaucgugggcaaaagcugccccaagccucaccgccugaaccacaugggcauuuguuccugcgggcuguauaagcagcccggagugccugucaaauggaagagaugaggacuagucccuguucccagagcccacuuuuuuuucuuuuuuugaaauaaaauagccugucuuucagaucucaaaggcucuuuucagagccaccaaaaaaaaaaaaaaaaaaaaaaaaaaaaaaaaaaaaaaaaaaaaaaaaaaaaaaaaaaaaaaaaaaaaaaaaaaaaaaaaaaaaaaaaaaaaaaaaaaaaa

SEQ ID NO: 37308 - RNA, 1767 nt, Artificial Sequence
  mRNA product Design a-2 (hSL-A100) comprising derived and/or modified sequence from LASV(G1442-SLE-2011;Clade IV)__AIT17180__GPCmut10 (opt5)
aggagaguccgcucagccagguugcagaagcggcuuagcguguguccuaaucuucucucugcguguagguaggccugugccgcaaacaagcuuaccaugggccagaucgugaccuucuuucaagaggucccccacguuauugaagaggugaugaacaucgugcugauugcccucagcauccuggcuguccuuaaggggcuguacaauguggccacaugcggacucauuggccugguuacguuccuucugcucugugggagauccugcaccacaacccuguauaaaggaguguacgaacugcagacacucgagcugaacauggaaacccuuaauauguguaugccucugucuugcacaaagaacaauagccaucacuauauccgggucggcaacgagaccgggcucgagcugacgcuuaccaauacauccaucauuaaccauaaauuuuguaaucugucugacgcgcacaagaaaaaccucuacgaucaugcucugaugagcaucauuuccaccuuccaccugucuaucccgaauuuuaaccaguaugaagccaugagcugcgacuucaauggaggcaagauuuccgugcaguacaaccucagccacucuuaugccggcgaugcugccaaucauugugggacaguugcuaacggagugcugcaaaccuuuaugcgcauggccuggggcggguccuacaucgcgcuugacagcggaagaggcaacugggauugcauuaugacgucuuaccaguaucugaucauccagaauacaaccugggacgaucacugucaguucucccggcccagcccuauuggguaccucggacugcuuucucaacgcacaagagacgucuauaucucccggcgccugcucggcaccuuuaccuggacacugagcgauuccgagggcaaggacacgcccgggggauacugccugaccagauggaugcucauugaagccgagcugaaauguuucggcaacacagcuguggccaagugcaaugagaaacaugaugaagaguuuugcgacaugcuucggcuguucgauuuuuguaagcaggcuauccagcgccucaaagccgaagcgcagaugucuauucaacugaucaacaaggccgugaaugcucuuaucaacgaccagcugauuaugaagaaucaccucagagacaucauggggauuccuuauugcaacuacagcaaauauugguaccugaauaacaccgccacaggaaagaccucccugcccaaauguuggcucaucagcaauggcucuuaccugaacgagacgcacuucuccgaugacauugaacaggaggcugauaauaugaucacagagaugcuucaaaaggaauauauggagcggcaggggaaaaccccucugggacucgucgaccuguucguuuuuagcaccucuuucuaccugaucagcauuuuucuucaucucgugaagaucccgacacaccgccauauugugggcaaauccugccccaagccucacagacugaaccauaugggcaucuguucuugcgggcuguauaagcagcccggagucccugugcgguggaaacgcugaggacuagucccuguucccagagcccacuuuuuuuucuuuuuuugaaauaaaauagccugucuuucagaucucaaaggcucuuuucagagccaccaaaaaaaaaaaaaaaaaaaaaaaaaaaaaaaaaaaaaaaaaaaaaaaaaaaaaaaaaaaaaaaaaaaaaaaaaaaaaaaaaaaaaaaaaaaaaaaaaaaaa

SEQ ID NO: 37309 - RNA, 1767 nt, Artificial Sequence
  mRNA product Design a-2 (hSL-A100) comprising derived and/or modified sequence from LASV(G3010-SLE-2013;Clade IV)__AIT17344__GPCmut10 (opt5)
aggagaguccgcucagccagguugcagaagcggcuuagcguguguccuaaucuucucucugcguguagguaggccugugccgcaaacaagcuuaccaugggccagaucgugaccuucuuucaagaggucccccacguuauugaagaggugaugaacaucgugcugauugcccucagcauccuggcuguccuuaaggggcuguacaauuucgccacaugcggacucgugggccugguuacguuucuucugcucugugggagauccugcaccacaucucuguauaaaggaguguacgaacugcagacccucgagcugaacauggaaacacuuaauauguguaugccucugagcugcaccaagaacaauucccaucacuauauuauggucggcaacgagacagggcucgagcugacccuuacgaauaccucuaucaucaaccauaaauucuguaaucugagcgacgcgcacaagaaaaaccucuacaaucaugcucugauguccauuaucucuacauuucaccugagcauuccgaacuucaaucaguaugaagccauguccugcgauuuuaacggaggcaagaucagcgugcaguacaaucucucucacuccuaugccggcgacgcugccagccauugugggaccguugcuaacggagugcugcaaacauucaugcggauggccuggggcgggucuuacauugcgcuugauuccggauacggcaagugggacugcaucaugaccagcuaucaguaccugauuauccagaacacgacaugggaggaucacugucaguuuucucgccccuccccuaucggguaucucggacugcuuagccaaagaacccgggacauuuacaucucccgcagacugcucggcacauucaccuggacccugucugauagcgaaggcaaagacacacccgggggauauugccugacgcgguggaugcucauugaggccgagcugaaguguuuuggcaauaccgcugucgccaaaugcaacgaaaagcaugaugaggaguucugcgacaugcuucgccuguuugauuucuguaaacaggcuauccagagacucaagacagaagcccagauguccauucaacugaucaauaaggcggugaacgcccuuaucaaugaccagcugauuaugaaaaaccaccuccgggauaucauggggauuccuuacugcaauuauagcaaguacugguaccugaaccacaccacaaccggaaaaacgucucugcccaaguguuggcucguguccaauggcagcuaucugaacgaaacacauuucucugacgacaucgagcagcaagcugauaauaugauuaccgagaugcuucagaaagaauacauggagcgccaggggaagaccccucugggacucgucgaccuguuuguuuucagcacauccuuuuaucugaucucuaucuuccuucaccucgugaaaauuccgacccauagacacaucgugggcaagagcugccccaagccucaucggcugaaccacaugggcauuuguuccugcgggcuguacaaacagcccggagucccugugcgcuggaagagaugaggacuagucccuguucccagagcccacuuuuuuuucuuuuuuugaaauaaaauagccugucuuucagaucucaaaggcucuuuucagagccaccaaaaaaaaaaaaaaaaaaaaaaaaaaaaaaaaaaaaaaaaaaaaaaaaaaaaaaaaaaaaaaaaaaaaaaaaaaaaaaaaaaaaaaaaaaaaaaaaaaaaa

SEQ ID NO: 37310 - RNA, 1767 nt, Artificial Sequence
  mRNA product Design a-2 (hSL-A100) comprising derived and/or modified sequence from LASV(G502-SLE-2009;Clade IV)__AIT17126__GPCmut10 (opt5)
aggagaguccgcucagccagguugcagaagcggcuuagcguguguccuaaucuucucucugcguguagguaggccugugccgcaaacaagcuuaccaugggccagaucgugaccuucuuucaagaggucccccacguuauugaagaggugaugaacaucgugcugauugcccucagcauccuggcuguccuuaaggggcuguacaauuucgccacaugcggacucgugggccugcuuacguuucugcuccugugugggagauccugcaccacaggacuguauaaaggcguuuacgaacuccagacccuggagcuuaacauggaaacacugaauauguguaugccucucucuugcaccaagaacaauagccaucacuauauuaugguggggaacgagacaggacuggagcuuacccugacgaauaccuccaucaucaaccauaaauucuguaaucucucugacgcgcacaagaaaaaccuguacgaucaugcucugaugagcauuaucuccacauuucaccucucuauuccgaauuucaaccaguaugaagccaugagcugcgacuuuaauggcggcaagaucuccguccaguacaaccugagccacucuuaugccggggaugcugccgaccauuguggaaccguggcuaauggcguucuucaaacauucaugcggauggccuggggaggguccuacauugcgcuggauagcggccgcgggagaugggacugcaucaugaccucuuaccaguaucucauuauccagaacacgacaugggaggaucacugucaguuuucccggcccagcccuaucggauaccugggccuucugucucaacgcaccagagacauuuauaucucccggcgccuccugggcacauucaccuggacccugagcgauuccgaagggaaggacacacccggaggcuacugccucacgagauggaugcugauugaggccgagcuuaaauguuuugggaacaccgcuguggccaagugcaaugaaaaacaugaugaggaguucugcgacaugcugcggcucuuugauuucuguaagcaggcuauccagcgccugaaagccgaagcgcagaugucuauucaacuuaucaacaaggccgucaaugcucugaucaacgaccagcucgugaugaagaaucaccugagagacauuaugggaaucccuuauugcaacuacagccgguauugguaccugaaucacacaaccacaggccgcaccucccuccccaaauguuggcuggugagcaacgggucuuaccuuaaugaaacgcauuucuccgaugacauugagcagcaagccgauaacaugaucacagagaugcugcagaaggaauauauggagagacagggaaaaaccccucucggccuggucgaccuguuuguuuucagcaccucuuuuuaccuuauuagcaucuuccuccaccuggugaagaucccgacacaucggcacauugugggcaaauccugccccaagccucaucgccugaaucacauggggaucuguucuugcggacucuauaaacagcccggcgucccugugaaguggaagagaugaggacuagucccuguucccagagcccacuuuuuuuucuuuuuuugaaauaaaauagccugucuuucagaucucaaaggcucuuuucagagccaccaaaaaaaaaaaaaaaaaaaaaaaaaaaaaaaaaaaaaaaaaaaaaaaaaaaaaaaaaaaaaaaaaaaaaaaaaaaaaaaaaaaaaaaaaaaaaaaaaaaaa

SEQ ID NO: 37311 - RNA, 1767 nt, Artificial Sequence
  mRNA product Design a-2 (hSL-A100) comprising derived and/or modified sequence from LASV(G733-SLE-2010;Clade IV)__AIT17154__GPCmut10 (opt5)
aggagaguccgcucagccagguugcagaagcggcuuagcguguguccuaaucuucucucugcguguagguaggccugugccgcaaacaagcuuaccaugggccagaucgugaccuucuuucaagaggucccccacguuauugaagaggugaugaacaucgugcugauugcccucagcauccuggcuguccuuaaggggcuguacaauuucgccacaugcggaauugugggccucguuuccuuucugcuucugugugggagaucuugcacgaccagccucuauaaaggaguguacgaacugcagacacuggagcucaacauggaaacccugaauauguguaugccucuuuccugcacaaagaacaauucucaucacuauaucauggucggcaacgagaccgggcuggagcucacacugaccaauacgagcaucauuaaccauaaauucuguaaucuuuccgacgcgcacaagaaaaaccuguacgaucaugcucucaugucuaucauuagcaccuuucaccuguccaucccgaauuucaaccaguaugaagccaugagcugcgacuuuaauggaggcaagauuucugugcaguacaaccugucccacagcuaugccggcgaugcugccaaucauugugggacaaucgcuaacggaguucuccaaaccuucaugcggauggccuggggcgggucuuacauugcgcuggacuccggacgcgauagaugggacugcaucaugacaagcuaccaguaucuuaucauucagaacaccacgugggaggaucacugucaguuuucucggcccuccccuaucggcuaccuggggcuccugagccaacgcacaagagacauuuauaucucccggcgccuucugggaaccuucacauggacccucucugauagcgaaggcaaggacacccccggcggguacugccugacaagauggaugcugauugaggccgagcucaaauguuuuggaaauacggcuguggccaagugcaacgaaaaacaugaugaggaguucugcgacaugcugcggcuuuuugauuucuguaagcaggcuauccagcgccugaaagccgaagcgcagauguccauccaacucauuaauaaggccgucaacgcucugaucaaugaccagcuuauuaugaagaaccaccugagagacaucaugggcauuccuuauugcaauuacagcaaauauugguaccucaaccacaccacaaccgggaagacaucucugcccaaauguuggcugguguccaauggaagcuaccucaacgaaacccauuucucugaugacaucgagcagcaagccgauaauaugaucacggagaugcugcagaaggaauauauggagcggcagggcaaaacaccucuugggcugguggaccucuuugucuucagcaccuccuuuuaccugauuucuaucuuccugcaccuuguuaagauuccgacccaucgccacguggugggaaaaagcugccccaagccucauagacucaaccacaugggcaucuguuccugcggccuguaugggcagcccggagucccugugaaguggaaacggugaggacuagucccuguucccagagcccacuuuuuuuucuuuuuuugaaauaaaauagccugucuuucagaucucaaaggcucuuuucagagccaccaaaaaaaaaaaaaaaaaaaaaaaaaaaaaaaaaaaaaaaaaaaaaaaaaaaaaaaaaaaaaaaaaaaaaaaaaaaaaaaaaaaaaaaaaaaaaaaaaaaaa

SEQ ID NO: 37312 - RNA, 1767 nt, Artificial Sequence
  mRNA product Design a-2 (hSL-A100) comprising derived and/or modified sequence from MOPV/LASV reassortant(IGS-1;Clade IV)__AFY05576__GPCmut10 (opt5)
aggagaguccgcucagccagguugcagaagcggcuuagcguguguccuaaucuucucucugcguguagguaggccugugccgcaaacaagcuuaccaugggccagaucgugaccuucuuucaagaggucccccacguuauugaagaggugaugaacaucgugcugauugcccucagcguccuggcugugcuuaaggggcuguacaauuucgccacaugcggacucguuggccuggugacguuucuucugcucugugggagauccugcaccacaucucuguauaaaggagucuacgaacugcagacccucgagcugaacauggaaacacuuaauauguguaugccucugagcugcaccaagaacaauucccaucacuauaucauggugggcaacgagacagggcucgagcugacccuuacgaauaccucuauuaucaaccauaaauucuguaaucugagcgacgcgcacaagaaaaaccucuacgaucaugcucugauguccaucauuucuacauuucaccugagcaucccgaauuucaaccaguaugaagccauguccugcgacuuuaauggaggcaagauuagcguucaguacaaccucucucacuccuaugccggcgaugcugccaaucauugugggaccguggcuaacggaguccugcaaacauucaugcggauggccuggggcgggagcuacaucgcgcuugacucuggacgcggcaacugggauugcauuaugaccuccuaccaguaucugaucauucagaauacgacaugggaggaccacugucaguuuagcagacccucuccuaucggguaccucggacugcuuucccaacggacccgcgauaucuauauuagcagacggcugcucggcacauucaccuggacccuguccgacucugaaggcgaggauacacccgggggauacugccugacgcgcuggaugcucaucgaggccgaacugaaguguuuuggcaacaccgcuguggccaaaugcaaugagaagcaugacgaagaguucugcgauaugcuuagacuguuugacuucuguaaacaggcuauucagcggcucaaggccgaagcgcagaugagcauccaacugauuaacaaagccgugaaugcucuuaucaacgaucagcugaucaugaagaaucaccuccgcgacauuauggggaucccuuauugcaacuacuccaaguauugguaccugaaucacacaaccacaggaagaaccagccugcccaaauguuggcucgucucuaacggcuccuaccugaaugagacgcauuucagcgacgauauugagcagcaagccgacaacaugaucacagaaaugcuucagaaggaguauauggaacggcaggggaaaaccccucugggacucguugaucuguuuguguucucuaccagcuuuuaccugauuuccaucuuccuucaccucgugaagaucccgacacaucgccacauugucggcaaaucuugccccaagccucauagacugaaucacaugggcaucuguagcugcgggcuguauaaacagcccggagugccuguuaaguggaagcggugaggacuagucccuguucccagagcccacuuuuuuuucuuuuuuugaaauaaaauagccugucuuucagaucucaaaggcucuuuucagagccaccaaaaaaaaaaaaaaaaaaaaaaaaaaaaaaaaaaaaaaaaaaaaaaaaaaaaaaaaaaaaaaaaaaaaaaaaaaaaaaaaaaaaaaaaaaaaaaaaaaaaa

SEQ ID NO: 37313 - RNA, 1767 nt, Artificial Sequence
  mRNA product Design a-2 (hSL-A100) comprising derived and/or modified sequence from LASV(LM765-SLE-2012;Clade IV)__AIT17814__GPCmut10 (opt5)
aggagaguccgcucagccagguugcagaagcggcuuagcguguguccuaaucuucucucugcguguagguaggccugugccgcaaacaagcuuaccaugggccagaucgugaccuucuuucaagaggucccccacguuauugaagaggugaugaacaucgugcugauugcccucagcauccuggcuguccuuaaggggcuguacaauuucgccacaugcggacucgugggccugguuacguuucuucugcucugugggagauccugcaccacaucucuguauaaaggaguguacgaacugcagacccucgagcugaacauggaaacacuuaauauguguaugccucugagcugcaccaagaacaauucccaucacuauauuauggucggcaacgagacagggcucgagcugacccuuacgaauaccucuaucaucgaccauaaauucuguaaccugagcgaugcgcaccggaagaaucucuacgaccaugcucugauguccauuaucucuacauuucaccugagcauuccgaacuucaaucaguaugaagccauguccugcgauuuuaacggaggcaaaaucagcgugcaguacaaucucucucacuccuaugccaaggacgcugccgaucauuguggcaccguugcuaacggggugcugcaaacauucaugcgcauggccuggggaggcagcuacauugcgcuugacucugggagaggacggugggauugcaucaugaccuccuaccaguaucugauuauccagaauacgacaugggaggaccacugucaguuuagccgccccucuccuaucggcuaccucgggcugcuuucccaaagaacccgggauauuuauaucagccgcagacugcucggaacauucaccuggacccuguccgacucugaaggcaaggauacacccggcggguacugccugacgcgguggaugcucauugaggccgagcugaaauguuuuggaaacaccgcugucgccaagugcaacgaaaaacaugacgaggaguucugcgauaugcuucgccuguuugacuucuguaagcaggcuauccagagacucaaagccgaagcgcagaugagcauucaacugaucaauaaggccgugaacgcucuuaucaaugaccagcugauuaugaagaaccaccuccgggauaucaugggcauuccuuauugcaauuacuccaaauauugguaccugaaccacacaaccacagggaagaccagccugcccaaauguuggcucgugucuaauggauccuaccugaacgaaacgcauuucagcgacgauaucgagcagcaagccgacaauaugauuacagagaugcuucagaaggaauauauggagcgccagggcaaaaccccucuggggcucgucgaucuguuuguuuucucuaccagcuuuuaccugaucuccaucuuccuucaccucgugaagauuccgacacauagacacaucgugggaaaacccugcccuaagccccaucggcugaaccacaugggcauuuguucuugcggccuguauaagcagccugggguccccgugaaauggaagcgcugaggacuagucccuguucccagagcccacuuuuuuuucuuuuuuugaaauaaaauagccugucuuucagaucucaaaggcucuuuucagagccaccaaaaaaaaaaaaaaaaaaaaaaaaaaaaaaaaaaaaaaaaaaaaaaaaaaaaaaaaaaaaaaaaaaaaaaaaaaaaaaaaaaaaaaaaaaaaaaaaaaaaa

SEQ ID NO: 37314 - RNA, 1767 nt, Artificial Sequence
  mRNA product Design a-2 (hSL-A100) comprising derived and/or modified sequence from LASV(LM776-SLE-2012;Clade IV)__AIT17824__GPCmut10 (opt5)
aggagaguccgcucagccagguugcagaagcggcuuagcguguguccuaaucuucucucugcguguagguaggccugugccgcaaacaagcuuaccaugggccagaucgugaccuucuuucaagaggucccccacguuauugaagaggugaugaacaucgugcugauugcccucagcauccuggcuguccuuaaggggcuguacaauuucgccacaugcggacucgugggccugguuacguuucuucugcucugugggagauccugcaccacaucuguguauaaaggagucuacgaacugcagacccuggagcucaacauggaaacacugaauauguguaugccucuuagcugcaccaagaacaauucccaucacuauauuauggugggcaacgagacagggcuggagcucacccugacgaauaccucuaucaucaaccauaaauucuguaaucuuagcgacgcgcacaagaaaaaccuguacgaucaugcucucauguccauuaucucuacauuucaccugagcauuccgaauuucaaccaguaugaagccauguccugcgacuuuaauggaggcaagaucagcguucaguacaaccugucucacuccuaugccggcgaugcugccaaucauugugggaccguggcuaacggaguccuccaaacauucaugcggauggccuggggcgggagcuacauugcgcuggacucuggacacggcaagugggauugcaucaugaccuccuaccaguaucuuauuauccagaacacgacaugggaggaccauugucaguuuagccgccccucuccuaucggguaccugggacuccugucccaaagaacccgggauauuuauaucagccgcagacuucugggcacauucaccuggacccucuccgacucugaaggcaaagauacacccgggggauacugccugacgcgguggaugcugauugaggccgagcucaaguguuuuggcaauaccgcuguggccaaaugcaacgaaaagcacgacgaggaguucugcgauaugcugcgccuuuuugacuucuguaaacaggcuauccagagacugaaggccgaagcgcagaugagcauucaacucaucaauaaggccgugaacgcucugaucaaugaucagcuuauuaugaaaaaccaucugcgggacaucauggggauuccuuauugcaauuacuccaaguauugguaccucaaccacacaaccacaggaaaaaccagccugcccaaguguuggcuggucucuaauggcuccuaccucaacgaaacgcacuucagcgacgauaucgagcagcaagccgacaauaugauuacagagaugcugcagaaagaauauauggagcgccaggggaagaccccucuuggacugguugaucucuuuguguucucuaccagcuuuuaccugaucuccaucuuccugcaucuugugaaaauuccgacacacagacauaucgucggcaagucuugccccaagccucaccggcucaaccacaugggcauuuguagcugcgggcuguauaaacagcccggagugccuguucgcuggaagagaugaggacuagucccuguucccagagcccacuuuuuuuucuuuuuuugaaauaaaauagccugucuuucagaucucaaaggcucuuuucagagccaccaaaaaaaaaaaaaaaaaaaaaaaaaaaaaaaaaaaaaaaaaaaaaaaaaaaaaaaaaaaaaaaaaaaaaaaaaaaaaaaaaaaaaaaaaaaaaaaaaaaaa

SEQ ID NO: 37315 - RNA, 1767 nt, Artificial Sequence
  mRNA product Design a-2 (hSL-A100) comprising derived and/or modified sequence from LASV(Mad39;Clade IV)__ANH09722__GPCmut10 (opt5)
aggagaguccgcucagccagguugcagaagcggcuuagcguguguccuaaucuucucucugcguguagguaggccugugccgcaaacaagcuuaccaugggccagaucgugaccuucuuucaagaggucccccacguuauugaagaggugaugaacaucgugcugauugcccucagcauccuggcuguccuuaaggggcuguacaauguggccacaugcggacucauuggccugguuacguuccuucugcucugugggagauccugcaccacaacccuguauaaaggaguguacgaacugcaggcgcucgagcugaacauggaaacacuuaauauguguaugccucugucuugcaccaagaacaauagccaucacuauauccgggucggcaacgagacagggcucgagcugacccuuacgaauaccucccugaucaaccauaaauuuuguaaucucucugacgcucacaagaaaaaccuguacgaucaugcccugaugagcauuaucuccacauuccaccucucuauuccgaauuuuaaccaguaugaagccaugagcugcgacuucaaugauggaaagaucuccgugcaguacaaccugagccacaccuaugcuggcgacacagccaaucauuguggcaccguugcuaacggggugcuucaaacguuuaugcgcauggccuggggaggcucuuacauugcgcuggauuccgggagaggaggcugggacugcaucaugacaagcuaccaguaucucauuauccagaacaccacaugggaggaucacugucaguucucucggcccuccccuaucggguaccugggacuucugagccaacgcaccagagacauuuauaucucucggcgccuccugggcaccuuuacauggacgcuguccgauagcgaaggcaaggacacccccgggggauacugccucacaagauggaugcugauugaggccgagcuuaaauguuucggcaauaccgcugucgccaagugcaacgaaaaacaugaugaggaauuuugcgacaugcugcgccucuucgauuuuuguaagcaggcuauccagcggcugaaagccgaggcgcagauguccauucaacuuaucaauaaggccgugaacgcucugaucaaugaccagcucauuaugaagaaccaccugagagacaucauggggauuccuuauugcaauuacucuaaauauugguaccugaaccacacagugaccggaaagacgagccuccccaaauguuggcuggucuccaauggcagcuaccuuaacgaaacacauuucucugaugacaucgagcagcaagccgauaauaugauuaccgagaugcugcagaaggaauauauggagcggcaggggaaaaccccucucggacugguugaccuguucguguuuuccaccagcuucuaccuuaucucuaucuuucuccaccuggugaagauuccgacacaucgccacgucgugggcaaacccugcccuaagccccauagacugaaccacaugggcaucuguagcugcggguucuauaagcagccuggaguucccgugcgguggaaacgcugaggacuagucccuguucccagagcccacuuuuuuuucuuuuuuugaaauaaaauagccugucuuucagaucucaaaggcucuuuucagagccaccaaaaaaaaaaaaaaaaaaaaaaaaaaaaaaaaaaaaaaaaaaaaaaaaaaaaaaaaaaaaaaaaaaaaaaaaaaaaaaaaaaaaaaaaaaaaaaaaaaaaa

SEQ ID NO: 37316 - RNA, 1767 nt, Artificial Sequence
  mRNA product Design a-2 (hSL-A100) comprising derived and/or modified sequence from LASV(Z0947-SLE-2011;Clade IV)__AIT17840__GPCmut10 (opt5)
aggagaguccgcucagccagguugcagaagcggcuuagcguguguccuaaucuucucucugcguguagguaggccugugccgcaaacaagcuuaccaugggccagaucgugaccuucuuucaagaggucccccacguuauugaagaggugaugaacaucgugcugauugcccucagcauccuggcuguccuuaaggggcuguacaauuucgccacaugcggacucgugggccugguuacguuucuucugcucugugggagauccugcaccauuucucuguauaaaggaguguacgaacugcagacacucgagcugaacauggaaacccuuaauauguguaugccucugagcugcacaaagaacaauucccaucacuauaucauggucggcaacgagaccgggcucgagcugacacuuaccaauacgucuaucauuaaccauaaauucuguaaucugagcgacgcgcacaagaaaaaccucuacgaucaugcucugauguccaucauuucuaccuuucaccugagcaucccgaauuucaaccaguaugaagccauguccugcgacuuuaauggaggcaagauuagcgugcaguacaaccucucucacuccuaugccggcgaugcugccaaucauugugggacaguugcuaacggagugcugcaaaccuucaugcggauggccuggggcgggagcuacaucgcgcuugacucuggacgcgauagaugggacugcauuaugacauccuaccaguaucugaucauccagaacaccacgugggaggaucacugucaguuuagccggcccucuccuauuggcuaccucgggcugcuuucccaacgcacaagagacaucuauauuagccggcgccugcucggaaccuucacauggacccuguccgauucugaaggcaaggacacccccggcggguacugccugacaagauggaugcucaucgaggccgagcugaaauguuuuggaaauacggcugucgccaagugcaacgaaaaacaugaugaggaguucugcgacaugcuucggcuguuugauuucuguaagcaggcuauucagcgccucaaagccgaagcgcagaugagcauccaacugaucaauaaggccgugaacgcucuuauuaaugaccagcugaucaugaagaaccaccucagagacauuaugggcaucccuuauugcaauuacuccaaauauugguaccugaaccacaccacaaccgggaagacaagccugcccaaauguuggcucgugucuaauggauccuaccugaacgaaacccauuucagcgaugacauugagcagcaagccgauaauaugaucacggagaugcuucagaaggaauauauggagcggcagggcaaaacaccucuggggcucgucgaccuguuuguuuucucuaccagcuuuuaccugaucuccauuuuccuucaccucgugaagaucccgacccaucgccacauugugggaaaacccugcccuaagccccauagacugaaccacaugggcaucuguucuugcggccuguauaagcagccugggguccccgugaaauggaagcggugaggacuagucccuguucccagagcccacuuuuuuuucuuuuuuugaaauaaaauagccugucuuucagaucucaaaggcucuuuucagagccaccaaaaaaaaaaaaaaaaaaaaaaaaaaaaaaaaaaaaaaaaaaaaaaaaaaaaaaaaaaaaaaaaaaaaaaaaaaaaaaaaaaaaaaaaaaaaaaaaaaaaa

SEQ ID NO: 37317 - RNA, 1743 nt, Artificial Sequence
  mRNA product Design a-2 (A100) comprising derived and/or modified sequence from LASV(Josiah;Clade IV)__NP_694870__GPCmut10 (opt1)
aggagaguccgcucagccagguugcagaagcggcuuagcguguguccuaaucuucucucugcguguagguaggccugugccgcaaacaagcuuaccaugggccagaucgugaccuucuuccaggaggucccccacgugaucgaggaggugaugaacaucguccugaucgcccucagcgugcuggccgugcugaaggggcucuacaacuucgcgaccugcggccuggucgggcuggugacguuccuccugcugugcggccgcuccugcaccaccagccucuacaaggggguguacgagcugcagacccuggagcucaacauggagacgcugaacaugugcaugccgcuguccugcaccaagaacaacagccaccacuacaucauggucggcaacgagaccggccucgagcugacgcugaccaacaccuccaucaucaaccacaaguucugcaaccucagcgacgcccacaagaagaaccuguacgaccacgcccugauguccaucaucagcaccuuccaccucuccauccccaacuucaaccaguacgaggccaugagcugcgacuucaacgggggcaagaucuccgugcaguacaaccugagccacuccuacgccggggacgcggccaaccacugcggcacgguggccaacgggguccugcagaccuucaugcggauggccuggggcggcagcuacaucgcgcucgacuccgggcgcggcaacugggacugcaucaugaccagcuaccaguaccugaucauccagaacaccacgugggaggaccacugccaguucucccggcccagccccaucggguaccugggccuccugucccagcgcacccgggacaucuacaucagccgccggcugcucggcaccuucaccuggacgcugagcgacuccgaggggaaggacaccccgggcggguacugccugacccgcuggaugcucaucgaggccgagcugaagugcuucggcaacaccgccguggccaagugcaacgagaagcacgacgaggaguucugcgacaugcugcggcuguucgacuucugcaagcaggccauccagcgccugaaggcggaggcccagaugagcauccagcugaucaacaaggccgugaacgcccucaucaacgaccagcugaucaugaagaaccaccuccgggacaucauggggauccccuacugcaacuacuccaaguacugguaccucaaccacacgaccaccggccgcaccagccugcccaagugcuggcuggucuccaacggcagcuaccucaacgagacgcacuucuccgacgacaucgagcagcaggccgacaacaugaucaccgagaugcugcagaaggaguacauggagcggcaggggaagacgccccugggccucguggaccuguucguguucagcaccuccuucuaccugaucagcaucuuccugcaccucgucaagaucccgacccaccgccacaucguggggaaguccugccccaagccccaccggcugaaccacaugggcaucugcagcugcgggcuguacaagcagcccggcgugccggucaaguggaagcgcugaggacuagucccuguucccagagcccacuuuuuuuucuuuuuuugaaauaaaauagccugucuuucagaucuaaaaaaaaaaaaaaaaaaaaaaaaaaaaaaaaaaaaaaaaaaaaaaaaaaaaaaaaaaaaaaaaaaaaaaaaaaaaaaaaaaaaaaaaaaaaaaaaaaaa

SEQ ID NO: 37318 - RNA, 1740 nt, Artificial Sequence
  mRNA product Design a-2 (A100) comprising derived and/or modified sequence from LASV(LP;Clade I)__AAF86701__GPCmut10 (opt1)
aggagaguccgcucagccagguugcagaagcggcuuagcguguguccuaaucuucucucugcguguagguaggccugugccgcaaacaagcuuaccaugggccagaucaucaccuucuuccaggaggugccccacgucaucgaggaggugaugaacaucgugcugaucgcccucagccugcuggccauccucaaggggcuguacaacaucgcgaccugcggcaucaucgggcuggucgccuuccucuuccugugcggcaaguccugcagccugacgcucaagggcggguacgagcugcagacccuggagcucaacauggagacccugaacaugugcaugccgcuguccugcacgaagaacagcucccaccacuacauccgcgugggcaacgagaccgggcucgagcugacccugaccaacacgagcaucaucaaccacaaguucugcaaccucuccgacgcccacaagaagaaccuguacgaccacgcccugaugagcaucaucuccaccuuccaccucagcauccccaacuucaaccaguacgaggccauguccugcgacuucaacggcgggaagaucagcgugcaguacaaccugucccacagcuacgcgggcgacgccgccgagcacugcgggaccgucgccaacggcgugcugcagaccuucaugcggauggcguggggcgggcgcuacaucgcccucgacuccggcaaggggaacugggacugcaucaugacgagcuaccaguaccugaucauccagaacaccaccugggaggaccacugccaguucucccggcccagccccaucggcuaccugggccuccugucccagcgcacccgggacaucuacaucagccgccggcugcucgggacguucaccuggacccugagcgacuccgagggcaacgagacccccgggggcuacugccugacgcgcuggaugcucaucgaggccgagcugaagugcuucgggaacaccgccguggccaagugcaacgagaagcacgacgaggaguucugcgacaugcugcggcuguucgacuucugcaagcaggcgauccgccggcugaaggccgaggcccagaugagcauccagcugaucaacaaggccgucaacgcccucaucaacgaccagcugaucaugaagaaccaccuccgcgacaucaugggcauccccuacugcaacuacuccaaguacugguaccucaaccacaccagcuccggccggaccagccugcccaagugcuggcugaucuccaacgggagcuaccucaacgagacgcaguucuccgacgacaucgagcagcaggcggacaacaugaucaccgagaugcugcagaaggaguacaucgagcgccagggcaagaccccgcuggggcucguggacaucuucaucuucagcaccuccuucuaccugaucagcaucuuccugcaccugaucaagaucccgacgcaccggcacaucgugggcaagcccugccccaagccccaccgccucaaccacaugggggucugcuccugcggccuguacaagcacccgggcgugcccaccaaguggaagcggugaggacuagucccuguucccagagcccacuuuuuuuucuuuuuuugaaauaaaauagccugucuuucagaucuaaaaaaaaaaaaaaaaaaaaaaaaaaaaaaaaaaaaaaaaaaaaaaaaaaaaaaaaaaaaaaaaaaaaaaaaaaaaaaaaaaaaaaaaaaaaaaaaaaaa

SEQ ID NO: 37319 - RNA, 1740 nt, Artificial Sequence
  mRNA product Design a-2 (A100) comprising derived and/or modified sequence from LASV(803213;Clade II)__AAF86703__GPCmut10 (opt1)
aggagaguccgcucagccagguugcagaagcggcuuagcguguguccuaaucuucucucugcguguagguaggccugugccgcaaacaagcuuaccaugggccagaucaucaccuucuuccaggaggugccccacgucaucgaggaggugaugaacaucgugcugaucgcccucagccugcuggccauccucaaggggaucuacaacgucgcgaccugcggccuguucgggcugaucuccuuccuccugcugugcggccgcagcugcuccgugacguacaaggggguguacgagcuccagacccuggagcugaacauggccaaccucaacaugugcaugccgcugagcugcaccaagaacaacucccaccacuacaucauggucggcaacgagacgggccuggagcucacccugaccaacaccagcaucaucaaccacaaguucugcaaccuguccgacgcccacaagaagaaccucuacgaccacgcccugaugagcaucaucuccacguuccaccugagcauccccaacuucaaccaguacgaggccauguccugcgacuucaacgggggcaagaucagcgugcaguacaaccucucccacagcuucgcgguggacgccgccaaccacugcgggaccaucgccaacggcguccugcagaccuucaugcggauggcguggggcggguccuacaucgcccuggacagcggcaaggggaacugggacugcaucaugaccuccuaccaguaccucaucauccagaacacgaccugggaggaccacugccaguucagccgccccucccccaucggcuaccuggggcugcucagccagcggacccgcgacaucuacaucagccggcgccugcugggcaccuucacguggacccucuccgacagcgagggcaacgaggcccccgggggcuacugccugacccgguggaugcugaucgaggccgagcucaagugcuucgggaacaccgccguggcgaagugcaacgagaagcacgacgaggaguucugcgacaugcugcgccuguucgacuucugcaagcaggccaucaagcggcucaagacggaggcccagauguccauccagcugaucaacaaggccgugaacgcccugaucaacgaccagcucaucaugaagaaccaccuccgcgacaucaugggcauccccuacugcaacuacagccgguacugguaccugaaccacaccgucaccgggaagaccucccugccccgcugcuggcuggugagcaacggcuccuaccugaacgagacgcacuucagcgacgacaucgagcagcaggcggacaacaugaucaccgagaugcuccagaaggaguacauggaccggcagggcaagaccccgcuggggcugguggaccucuucgucuucuccaccagcuucuaccugaucuccaucuuccugcaccuggugaagaucccgacgcaccgccacaucgugggcaagcccugccccaagccccaccggcucaaccacauggggaucugcagcugcggccuguacaagcacccggggguccccgugaaguggaagcgcugaggacuagucccuguucccagagcccacuuuuuuuucuuuuuuugaaauaaaauagccugucuuucagaucuaaaaaaaaaaaaaaaaaaaaaaaaaaaaaaaaaaaaaaaaaaaaaaaaaaaaaaaaaaaaaaaaaaaaaaaaaaaaaaaaaaaaaaaaaaaaaaaaaaaa

SEQ ID NO: 37320 - RNA, 1740 nt, Artificial Sequence
  mRNA product Design a-2 (A100) comprising derived and/or modified sequence from LASV(GA391;Clade III)__CAA36645__GPCmut10 (opt1)
aggagaguccgcucagccagguugcagaagcggcuuagcguguguccuaaucuucucucugcguguagguaggccugugccgcaaacaagcuuaccaugggccagaucgugaccuucuuccaggaggucccccacgugaucgaggaggugaugaacaucguccugaucgcccucagcauccuggccauccugaaggggcucuacaacguggcgaccugcggccugaucgggcuggugacguuccuccugcuguccggccgcagcugcucccucaucuacaaggggaccuacgagcugcagacccuggagcucaacauggagacccugaacaugugcaugccgcugagcugcaccaagaacaacucccaccacuacauccgggucggcaacgagaccggccucgagcugacccugacgaacaccagcauccucaaccacaaguucugcaaccuguccgacgcccacaagcgcaaccuguacgaccacagccucauguccaucaucagcaccuuccaccuguccauccccaacuucaaccaguacgaggccaugagcugcgacuucaacgggggcaagaucaccgugcaguacaaccugucccacagcuucgccguggacgccgcggggcacugcggcacgcucgccaacgggguccugcagaccuucaugcggauggccuggggcggcuccuacaucgcccuggacagcgggcgcggcaacugggacugcaucaugaccuccuaccaguaccucaucauccagaacaccacgugggacgaccacugccaguucagccggcccucccccaucggguaccugggccugcucagccagcgcacccgggacaucuacaucagccgccggcugcugggcaccuucaccuggacgcucuccgacagcgaggggaacgagaccccgggcggguacugccugacccgcuggaugcugaucgaggcggagcucaagugcuucggcaacaccgccguggccaagugcaacgagaagcacgacgaggaguucugcgacaugcugcggcuguucgacuucugcaagcaggccauccgccggcucaagacggaggcccagauguccauccagcugaucaacaaggcggugaacgcccugaucaacgaccagcucaucaugaagaaccaccuccgcgacaucauggggauccccuacugcaacuacagccgguacugguaccugaaccacaccuccaccggcaagaccagccugccccgcugcuggcugaucuccaacggcagcuaccugaacgagacgaaguucuccgacgacaucgagcagcaggccgacaacaugaucaccgagaugcuccagaaggaguacaucgaccggcaggggaagacgccccugggccuggucgaccuguucguguucagcaccuccuucuaccucaucagcaucuuccugcaccuggugaagaucccgacccaccgccacaucgucgggaagcccugccccaagccccaccggcucaaccacaugggcaucugcuccugcgggcuguacaagcagccgggcgugcccgugcgcuggaagcggugaggacuagucccuguucccagagcccacuuuuuuuucuuuuuuugaaauaaaauagccugucuuucagaucuaaaaaaaaaaaaaaaaaaaaaaaaaaaaaaaaaaaaaaaaaaaaaaaaaaaaaaaaaaaaaaaaaaaaaaaaaaaaaaaaaaaaaaaaaaaaaaaaaaaa

SEQ ID NO: 37321 - RNA, 1743 nt, Artificial Sequence
  mRNA product Design a-2 (A100) comprising derived and/or modified sequence from LASV(AV;Clade V)__CCA30314__GPCmut10 (opt1)
aggagaguccgcucagccagguugcagaagcggcuuagcguguguccuaaucuucucucugcguguagguaggccugugccgcaaacaagcuuaccaugggccagaucgugaccuucuuccaggaggucccccacgugaucgaggaggugaugaacaucguccugaucgcccucagcauccuggccgugcugaaggggcucuacaacaucgcgaccugcggccugaucgggcugaucacguuccuccugcugugcggccgcuccugcagcuccaaccucuacaaggggguguacgagcugcagagccuggaccucaacauggagacccugaacaugugcaugccgcuguccugcaccaagaacaacagccaccacuacauccgggucggcaacgacacgggccucgagcugacccugaccaacaccuccauccucaaccacaaguucugcaaccugagcgacgcccacaagaaggaccuguacgaccacgcccucauguccaucaucagcacguuccaccuguccauccccaacuucaaccaguacgaggccaugagcugcgacuucaacgggggcaagaucuccgugcaguacaaccugagccacuccuacgccaucgacgcggccaaccacugcgggaccguggccaacggcauccuccagaccuucaugcgcauggccuggggcgggagcuacaucgcgcuggacuccggccgggggaacugggacugcaucaugaccagcuaccaguaccugaucauccagaacacgaccugggagaaccacugccaguucucccgccccagccccaucggcuaccucgggcugcugagccagcggacccgcgacaucuacaucucccggcgccuccugggcaccuucacguggacccugagcgacuccgagggcaacgccacccccgggggcuacugccucacccgguggaugcugaucgaggccgagcugaagugcuucgggaacacggccgucgccaagugcaacgagaagcacgacgaggaguucugcgacaugcuccgccuguucgacuucugcaagcaggcgaucagccggcugaaguccgaggcccagaugagcauccagcucaucaacaaggccgugaacgcccugaucaacgaccagcugaucaugaagaaccaccuccgcgacaucaugggcauccccuacugcaacuacuccaaguacugguaccugaaccacaccaucaccgggaagaccagccugcccaagugcuggcucguguccaacggcagcuaccugaacgagacgcacuucuccgacgacaucgagcagcaggccgacaacaugaucaccgagaugcugcagaaggaguacauggagcggcagggcaagaccccgcucgggcuggucgaccuguucguguucagcaccuccuucuaccugaucagcaucuuccuccgccuggugaagaucccgacgcaccggcacaucgucggcaagcccugccccaagccccaccgccugaaccacauggggaucugcuccugcggccucuacaagcagccgggggugcccgugcgguggaagcgcugaggacuagucccuguucccagagcccacuuuuuuuucuuuuuuugaaauaaaauagccugucuuucagaucuaaaaaaaaaaaaaaaaaaaaaaaaaaaaaaaaaaaaaaaaaaaaaaaaaaaaaaaaaaaaaaaaaaaaaaaaaaaaaaaaaaaaaaaaaaaaaaaaaaaa

SEQ ID NO: 37322 - RNA, 1740 nt, Artificial Sequence
  mRNA product Design a-2 (A100) comprising derived and/or modified sequence from LASV(Togo/2016/7082;Clade VI)__AMR44577__GPCmut10 (opt1)
aggagaguccgcucagccagguugcagaagcggcuuagcguguguccuaaucuucucucugcguguagguaggccugugccgcaaacaagcuuaccaugggccagaucaucaccuucuuccaggaggugccccacgucaucgaggaggugaugaacaucgugcugaucgcccucagccugcuggccauccucaagggggucuacaacguggcgaccugcggcaucaucgggcuggugacguuccuguuccucugcggccgcuccugcagccugaucuacaagggguccuacgagcugcagacccucgagcugaacauggagacccugaacaugugcaugccgcucagcugcacgaagaacuccagccaccacuacauccgggucggcaacgagaccggccuggagcugacccucaccaacacguccaucaucaaccacaaguucugcaaccugagcgacgcccacaagcgcaaccuguacgaccacgcccucauguccauccugagcaccuuccaccuguccauccccaacuucaaccaguacgaggccaugagcugcgacuucaacgggggcaagaucuccgugcaguacaaccucagccacgccuacgcgguggacgccgccgagcacugcgggaccgucgccaacggcgugcugcagaccuucaugcggauggcguggggcggguccuacaucgcccuggacagcggccgcgggaacugggacugcaucaugacguccuaccaguaccucaucauccagaacaccaccugggaggaccacugccaguucagccggcccucccccaucggcuaccuggggcugcucagccagcgcacccgggacaucuacaucagccgccggcugcugggcacguucaccuggacccucuccgacagcgagggcaacgagacccccgggggcuacugccugacgcgcuggaugcugaucgaggccgagcucaagugcuucgggaacaccgccguggccaagugcaacgagaagcacgacgaggaguucugcgacaugcugcggcuguucgacuucugcaagcaggcgauccagcgccucaaguccgaggcccagaugagcauccagcugaucaacaaggccgucaacgcccugaucaacgaccagcucaucaugaagaaccaccuccgggacaugaugggcauccccuacugcaacuacuccaaguacugguaccugaaccacaccagcuccgggcgcaccagccugcccaagugcuggcugguguccaacggcagcuaccugaacgagacgcacuucuccgacgacaucgagcagcaggccgacaacaugaucaccgagaugcuccagaaggaguacaucgaccggcagggcaagaccccgcuggggcugguggaccucuucgucuucagcaccuccuucuaccugaucagcaucuuccugcaccugaucaagaucccgacgcaccgccacaucgugggcaagcccugccccaagccccaccggcucaaccacauggggaucugcuccugcggccuguacaagcagccgggggugcccacccgcuggaagcggugaggacuagucccuguucccagagcccacuuuuuuuucuuuuuuugaaauaaaauagccugucuuucagaucuaaaaaaaaaaaaaaaaaaaaaaaaaaaaaaaaaaaaaaaaaaaaaaaaaaaaaaaaaaaaaaaaaaaaaaaaaaaaaaaaaaaaaaaaaaaaaaaaaaaa

SEQ ID NO: 37323 - RNA, 1740 nt, Artificial Sequence
  mRNA product Design a-2 (A100) comprising derived and/or modified sequence from LASV(KAK-428;Clade n.d. (VII))__ANH09740__GPCmut10 (opt1)
aggagaguccgcucagccagguugcagaagcggcuuagcguguguccuaaucuucucucugcguguagguaggccugugccgcaaacaagcuuaccaugggccagaucgugaccuucuuccaggaggucccccacgugaucgaggaggugaugaacaucguccugaucgcccucagccugcuggccauccucaaggggcuguacaacuucgcgaccugcggcgugaucgggcugaucacguuccuccugcugugcggccgcuccugcagcgccaccuacaaggggcaguacgagcuccagacccuggagcugaacauggagucccucaacaugugcaugccgcugagcugcacgaagaacaacucccaccacuacauccgggccggcaacaacaccggccuggagcucacccugaccaacacgagcaucaucucccacaaguucugcaaccugagcgacgcccacaagaagaaccucuacgaccacacccugauguccaucaucaccaccuuccaccugagcauccccaacuucaaccaguacgaggccauguccugcgacuucaacgggggcaagaucagcauccaguacaaccucucccacagcuacgcgggggacgccgcccagcacugcggcacgguggccaacgggguccugcagaccuucaugcgcauggcguggggcggcuccuaccuggcccucgacagcgggcggcgcggcugggacugcaucaucuccagcuaccaguaccugaucauccagaacaccaccugggacgaccacugccaguucucccggcccagccccaucggguaccugggcuucgugagccagaagacgcgcgacaucuacaucucccggcgccuccugggcaccuucaccuggacccugagcgacuccgaggggcacgacaugccgggcggguacugccucacgcgguggaugcugaucgaggccgaccugaagugcuucggcaacaccgccguggccaagugcaacgagaagcacgacgaggaguucugcgacauguggcgccucuucgacuucugcaagcaggcgauccagcggcugaaggccgaggcccagaugaacauccagcugaucaacaaggccgucaacgcccucaucaacgaccagcugaugaugaagaaccaccuccgcgacaucauggggauccccuacugcaacuacagcaaguucugguaccugaacaacaccaccacgggccggaccucccugccccgcugcuggcugaucagcaacggcuccuaccucaacgagacccacuucagcgacgacaucgagcagcaggcggacaacaugaucaccgagaugcugcagaaggaguacauggaccggcaggggaagacgccccugggccucguggaccuguucguguucuccaccagcuucuaccugaucaccaucuuccuccaccuggucaagaucccgacccaccgccacaucguggggaagcccugccccaagccccaccggcugaaccacaugggcaucugcuccugcgggcuguacaagcagccgggcgugcccguccgcuggaagcggugaggacuagucccuguucccagagcccacuuuuuuuucuuuuuuugaaauaaaauagccugucuuucagaucuaaaaaaaaaaaaaaaaaaaaaaaaaaaaaaaaaaaaaaaaaaaaaaaaaaaaaaaaaaaaaaaaaaaaaaaaaaaaaaaaaaaaaaaaaaaaaaaaaaaa

SEQ ID NO: 37324 - RNA, 1740 nt, Artificial Sequence; identical to SEQ ID NO: 37318
  mRNA product Design a-2 (A100) comprising derived and/or modified sequence from LASV(Pinneo-NIG-1969;Clade I)__AIT17836__GPCmut10 (opt1)

SEQ ID NO: 37325 - RNA, 1740 nt, Artificial Sequence
  mRNA product Design a-2 (A100) comprising derived and/or modified sequence from LASV(ISTH0009-NIG-2011;Clade II)__AIT17404__GPCmut10 (opt1)
aggagaguccgcucagccagguugcagaagcggcuuagcguguguccuaaucuucucucugcguguagguaggccugugccgcaaacaagcuuaccaugggccagaucaucaccuucuuccaggaggugccccacgucaucgaggaggugaugaacaucgugcugaucgcccucagccugcuggccauccucaaggggaucuacaacgucgcgaccugcggccuguucgggcugguguccuuccuccugcugugcggccgcagcugcuccacgaccuacaaggggguguacgagcuccagacccuggagcuggacauggccagccucaacaugugcaugccgcuguccugcacgaagaacaacagccaccacuacaucauggucggcaacgagaccggccuggagcucacccugaccaacacguccaucaucaaccacaaguucugcaaccugagcgacgcccacaagaagaaccucuacgaccacgcccugauguccaucaucagcaccuuccaccuguccauccccaacuucaaccaguacgaggccaugagcugcgacuucaacgggggcaagaucuccgugcaguacaaccucagccacgcguacgccguggacgccgccaaccacugcgggaccaucgcgaacggcguccugcagaccuucaugcggauggccuggggcggguccuacaucgcccuggacagcggcaagggguccugggacugcaucaugacgagcuaccaguaccucaucauccagaacaccaccugggaggaccacugccaguucucccgccccagccccaucggcuaccuggggcugcucagccagcggacccgcgacaucuacaucucccggcgccugcugggcacguucaccuggacccucagcgacuccgagggcaacgagacccccgggggcuacugccugacgcgguggaugcugaucgaggccgagcucaagugcuucgggaacaccgccguggcgaagugcaacgagaagcacgacgaggaguucugcgacaugcugcgccuguucgacuucugcaagcaggccauccggcgccucaagaccgaggcccagaugagcauccagcugaucaacaaggccgugaacgcccugaucaacgaccagcucaucaugaagaaccaccuccgggacaucaugggcaucccguacugcaacuacuccaaguacugguaccugaaccacaccgucacggggaagaccagccugccccgcugcuggcugguguccaacggcagcuaccugaacgagacccacuucuccgacgacaucgagcagcaggcggacaacaugaucaccgagcuccugcagaaggaguacauggaccggcagggcaagacgccccuggggcucguggaccuguucgucuucagcaccuccuucuaccugaucagcaucuuccugcaccucaucaagaucccgacccaccgccacaucaccggcaagcccugccccaagccccaccggcugaaccacauggggaucugcuccugcggccuguacaagcacccgggggugcccgugaaguggaagcgcugaggacuagucccuguucccagagcccacuuuuuuuucuuuuuuugaaauaaaauagccugucuuucagaucuaaaaaaaaaaaaaaaaaaaaaaaaaaaaaaaaaaaaaaaaaaaaaaaaaaaaaaaaaaaaaaaaaaaaaaaaaaaaaaaaaaaaaaaaaaaaaaaaaaaa

SEQ ID NO: 37326 - RNA, 1740 nt, Artificial Sequence
  mRNA product Design a-2 (A100) comprising derived and/or modified sequence from LASV(ISTH2010-NIG-2012;Clade II)__AIT17482__GPCmut10 (opt1)
aggagaguccgcucagccagguugcagaagcggcuuagcguguguccuaaucuucucucugcguguagguaggccugugccgcaaacaagcuuaccaugggccagaucaucaccuucuuccaggaggugccccacgucaucgaggaggugaugaacaucgugcugaucgcccucagccugcuggccauccucaaggggaucuacaacgucgcgaccugcggccuguucgggcugguguccuuccuccugcugugcggccgcagcugcuccacgaccuacaaggggguguacgagcuccagacccuggagcuggacauggccagccucaacaugugcaugccgcuguccugcacgaagaacaacagccaccacuacaucauggucggcaacgagaccggccuggagcucacccugaccaacacguccaucaucaaccacaaguucugcaaccugagcgacgcccacaagaagaaccucuacgaccacgcccugauguccaucaucagcaccuuccaccuguccauccccaacuucaaccaguacgaggccaugagcugcgacuucaacgggggcaagaucuccgugcaguacaaccucagccacgcguacgccguggacgccgccaaccacugcgggaccaucgcgaacggcguccugcagaccuucaugcggauggccuggggcggguccuacaucgcccuggacagcggcaagggguccugggacugcaucaugacgagcuaccaguaccucaucauccagaacaucaccugggaggaccacugccaguucucccgccccagccccaucggcuaccuggggcugcucagccagcggacccgcgacaucuacaucucccggcgccugcugggcaccuucacguggacccucagcgacuccgagggcaacgagacccccgggggcuacugccugacccgguggaugcugaucgaggccgagcucaagugcuucgggaacacggccguggcgaagugcaacgagaagcacgacgaggaguucugcgacaugcugcgccuguucgacuucugcaagcaggccauccggcgccucaagaccgaggcccagaugagcauccagcugaucaacaaggccgugaacgcccugaucaacgaccagcucaucaugaagaaccaccuccgggacaucaugggcauccccuacugcaacuacuccaaguacugguaccugaaccacaccgucaccgggaagacgagccugccccgcugcuggcugguguccaacggcagcuaccugaacgagacccacuucuccgacgacaucgagcagcaggcggacaacaugaucaccgagcuccugcagaaggaguacaucgaccggcagggcaagaccccgcuggggcucguggaccuguucgucuucagcacguccuucuaccugaucagcaucuuccugcaccucgugaagaucccgacccaccgccacguggucggcaagcccugccccaagccccaccggcugaaccacauggggaucugcuccugcggccuguacaagcacccgggggugcccgugaaguggaagcgcugaggacuagucccuguucccagagcccacuuuuuuuucuuuuuuugaaauaaaauagccugucuuucagaucuaaaaaaaaaaaaaaaaaaaaaaaaaaaaaaaaaaaaaaaaaaaaaaaaaaaaaaaaaaaaaaaaaaaaaaaaaaaaaaaaaaaaaaaaaaaaaaaaaaaa

SEQ ID NO: 37327 - RNA, 1740 nt, Artificial Sequence
  mRNA product Design a-2 (A100) comprising derived and/or modified sequence from LASV(Lassa virus/H.sapiens-wt/NGA/2015/ISTH_0543;Clade II)__AVO03639__GPCmut10 (opt1)
aggagaguccgcucagccagguugcagaagcggcuuagcguguguccuaaucuucucucugcguguagguaggccugugccgcaaacaagcuuaccaugggccagaucaucaccuucuuccaggaggugccccacgucaucgaggaggugaugaacaucgugcugaucgcccucagccugcuggccauccucaaggggaucuacaacgucgcgaccugcggccuguucgggcugguguccuuccuccugcugugcggccgcagcugcuccacgaccuacaaggggguguacgagcuccagacccuggagcuggacauggccaaccucaacaugugcaugccgcugagcugcacgaagaacaacucccaccacuacaucauggucggcaacgagaccggccuggagcucacccugaccaacacgagcaucaucaaccacaaguucugcaaccuguccgacgcccacaagaagaaccucuacgaccacgcccugaugagcaucaucuccaccuuccaccugagcauccccaacuucaaccaguacgaggccauguccugcgacuucaacgggggcaagaucagcgugcaguacaaccucucccacaccuacgcgguggacgccgccaaccacugcgggaccaucgccaacggcguccugcagacguucaugcggauggcguggggcgggagcuacaucgcccuggacuccggcaaggggagcugggacugcaucaugaccuccuaccaguaccucgugauccagaacaccaccugggaggaccacugccaguucagccgccccucccccaucggcuaccuggggcugcucagccagcggacgcgcgacaucuacaucagccggcgccugcugggcaccuucaccuggacccucuccgacagcgagggcaacgagacgcccgggggcuacugccugacccgguggaugcugaucgaggccgagcucaagugcuucgggaacaccgccguggccaagugcaacgagaagcacgacgaggaguucugcgacaugcugcgccuguucgacuucugcaagcaggcgauccggcgccucaagaccgaggcccagauguccauccagcugaucaacaaggccgucaacgcccugaucaacgaccagcucaucaugaagaaccaccuccgggacaucaugggcauccccuacugcaacuacagcaaguacugguaccugaaccacacggugaccgggaagaccucccugccccgcugcuggcuggugagcaacggcuccuaccugaacgagacccacuucagcgacgacaucgagcagcaggccgacaacaugaucacggagcuccugcagaaggaguacaucgaccggcagggcaagaccccgcuggggcucgucgaccuguucguguucuccaccagcuucuaccugaucuccaucuuccugcaccucgugaagaucccgacccaccgccacaucacgggcaagcccugccccaagccccaccggcugaaccacauggggaucugcagcugcggccuguacaagcacccggggguccccgugaaguggaagcgcugaggacuagucccuguucccagagcccacuuuuuuuucuuuuuuugaaauaaaauagccugucuuucagaucuaaaaaaaaaaaaaaaaaaaaaaaaaaaaaaaaaaaaaaaaaaaaaaaaaaaaaaaaaaaaaaaaaaaaaaaaaaaaaaaaaaaaaaaaaaaaaaaaaaaa

SEQ ID NO: 37328 - RNA, 1740 nt, Artificial Sequence
  mRNA product Design a-2 (A100) comprising derived and/or modified sequence from LASV(Lassa virus/H.sapiens-wt/NGA/2016/ISTH_0009;Clade II)__AVO03571__GPCmut10 (opt1)
aggagaguccgcucagccagguugcagaagcggcuuagcguguguccuaaucuucucucugcguguagguaggccugugccgcaaacaagcuuaccaugggccagaucaucaccuucuuccaggaggugccccacgucaucgaggaggugaugaacaucgugcugaucgcccucagccugcuggccauccucaaggggaucuacaacgucgcgaccugcggccugcuggggcucguguccuuccugcugcucugcggccgcagcugcuccacgaccuacaaggggguguacgagcugcagacccuggagcucgacauggccagccugaacaugugcaugccgcuguccugcacgaagaacaacagccaccacuacaucauggucggcaacgagaccggccucgagcugacccugaccaacacguccaucaucaaccacaaguucugcaaccucagcgacgcccacaagaagaaccuguacgaccacgcccugauguccaucaucagcaccuuccaccucuccauccccaacuucaaccaguacgaggccaugagcugcgacuucaacgggggccggaucuccgugcaguacaaccugagccacuccuacgcgguggacgccgccaaccacugcgggaccaucgccaacggcguccugcagaccuucaugcgcauggcguggggcgggagcuacaucgcccucgacuccggcaaggggagcugggacugcaucaugacguccuaccaguaccugaucauccagaacaccaccugggaggaccacugccaguucagccggcccagccccaucggcuaccuggggcuccugucccagcgcacccgggacaucuacaucagccgccggcugcucggcacguucaccuggacccuguccgacagcgagggcaacgagacccccgggggcuacugccugacgcgcuggaugcucaucgaggccgagcugaagugcuucgggaacaccgccguggccaagugcaacgagaagcacgacgaggaguucugcgacaugcugcggcuguucgacuucugcaagcaggcgauccgccggcugaagaccgaggcccagauguccauccagcugaucaacaaggccgugaacgcccucaucaacgaccagcugaucaugaagaaccaccuccgcgacaucaugggcaucccguacugcaacuacagcaaguacugguaccucaaccacaccgucacggggaagaccucccugccccggugcuggcuggugagcaacggcuccuaccucaacgagacccacuucagcgacgacaucgagcagcaggccgacaacaugaucaccgagcugcugcagaaggaguacaucgaccgccagggcaagacgccccucgggcugguggaccuguucgucuucuccaccagcuucuaccugaucuccaucuuccuccaccuggugaagaucccgacccaccggcacaucaccggcaagcccugccccaagccccaccgccugaaccacauggggaucugcagcugcggccucuacaaccacccgggggugcccgucaaguggaagcggugaggacuagucccuguucccagagcccacuuuuuuuucuuuuuuugaaauaaaauagccugucuuucagaucuaaaaaaaaaaaaaaaaaaaaaaaaaaaaaaaaaaaaaaaaaaaaaaaaaaaaaaaaaaaaaaaaaaaaaaaaaaaaaaaaaaaaaaaaaaaaaaaaaaaa

SEQ ID NO: 37329 - RNA, 1740 nt, Artificial Sequence
  mRNA product Design a-2 (A100) comprising derived and/or modified sequence from LASV(Lassa virus/H.sapiens-wt/NGA/2016/ISTH_0017;Clade II)__AVO03567__GPCmut10 (opt1)
aggagaguccgcucagccagguugcagaagcggcuuagcguguguccuaaucuucucucugcguguagguaggccugugccgcaaacaagcuuaccaugggccagaucaucaccuucuuccaggaggugccccacgucaucgaggaggugaugaacaucgugcugaucgcccucagccugcuggccauccucaaggggaucuacaacgucgcgaccugcggccuguucgggcugguguccuuccuccugcugugcggccgcagcugcuccacgaccuacaaggggguguacgagcuccagacccuggagcuggacauggccagccucaacaugugcaugccgcuguccugcacgaagaacaacagccaccacuacaucauggucggcaacgagaccggccuggagcucacccugaccaacacguccaucaucaaccacaaguucugcaaccugagcgacgcccacaagaagaaccucuacgaccacgcccugauguccaucaucagcaccuuccaccuguccauccccaacuucaaccaguacgaggccaugagcugcgacuucaacgggggcaagaucuccgugcaguacaaccucagccacaccuacgcgaucgacgccgccaaccacugcgggaccaucgccaacggcgugcugcagacguucaugcggauggcguggggcggguccuacaucgcccuggacagcggcaagggguccugggacugcaucaugaccagcuaccaguaccucaucauccagaacaccaccugggaggaccacugccaguucucccgccccagccccaucggcuaccuggggcugcucagccagcggacgcgcgacaucuacaucucccggcgccugcugggcaccuucaccuggacccucagcgacuccgagggcaacgagacgcccgggggcuacugccugacccgguggaugcugaucgaggccgagcucaagugcuucgggaacaccgccgucgccaagugcaacgagaagcacgacgaggaguucugcgacaugcugcgccuguucgacuucugcaagcaggcgauccggcgccucaagaccgaggcccagaugagcauccagcugaucaacaaggccgugaacgcccugaucaacgaccagcucaucaugaagaaccaccuccgggacaucaugggcauccccuacugcaacuacuccaaguacugguaccugaaccacacggugaccgggaagaccagccugccccgcugcuggcuggucuccaacggcagcuaccugaacgagacccacuucuccgacgacaucgagcagcaggccgacaacaugaucacggagcuccugcagaaggaguacauggaccggcagggcaagaccccgcuggggcucguggaccuguucguguucagcaccuccuucuaccugaucagcaucuuccugcaccucguccgcaucccgacccaccggcacgugaucggcaagcccugccccaagccccaccgccugaaccacauggggaucugcuccugcggccuguacaagcacccgggggugcccgucaaguggaagcggugaggacuagucccuguucccagagcccacuuuuuuuucuuuuuuugaaauaaaauagccugucuuucagaucuaaaaaaaaaaaaaaaaaaaaaaaaaaaaaaaaaaaaaaaaaaaaaaaaaaaaaaaaaaaaaaaaaaaaaaaaaaaaaaaaaaaaaaaaaaaaaaaaaaaa

SEQ ID NO: 37330 - RNA, 1740 nt, Artificial Sequence
  mRNA product Design a-2 (A100) comprising derived and/or modified sequence from LASV(Lassa virus/H.sapiens-wt/NGA/2018/ISTH_0959;Clade II)__AVV65099__GPCmut10 (opt1)
aggagaguccgcucagccagguugcagaagcggcuuagcguguguccuaaucuucucucugcguguagguaggccugugccgcaaacaagcuuaccaugggccagaucaucaccuucuuccaggaggugccccacgucaucgaggaggugaugaacaucgugcugaucgcccucagccugcuggccauccucaaggggaucuacaacgucgugaccugcggccuguucgggcugguguccuuccuccugcugugcggccgcagcugcuccacgaccuacaagggggucuacgagcuccagacccuggagcuggacauggcgagccucaacaugugcaugccgcuguccugcacgaagaacaacagccaccacuacaucauggugggcaacgagaccggccuggagcucacccugaccaacacguccaucaucaaccacaaguucugcaaccugagcgacgcccacaagaagaaccucuacgaccacgcccugauguccaucaucagcaccuuccaccuguccauccccaacuucaaccaguacgaggccaugagcugcgacuucaacgggggcaagaucuccgugcaguacaaccucagccacgccuacgcgaucgacgccgccaaccacugcgggaccaucgccaacggcguccugcagaccuucaugcggauggcguggggcggguccuacaucgcccuggacagcggcaagggguccugggacugcaucaugacgagcuaccaguaccucaucauccagaacaccaccugggaggaccacugccaguucucccgccccagccccaucggcuaccuggggcugcucagccagcggacccgcgacaucuacaucucccggcgccugcugggcacguucaccuggacccucagcgacuccgagggcaacgagacccccgggggcuacugccugacgcgguggaugcugaucgaggccgagcucaagugcuucgggaacaccgccguggccaagugcaacgagaagcacgacgaggaguucugcgacaugcugcgccuguucgacuucugcaagcaggcgauccggcgccucaagaccgaggcccagaugagcauccagcugaucaacaaggccgugaacgcccugaucaacgaccagcucaucaugaagaaccaccuccgggacaucaugggcaucccguacugcaacuacuccaaguacugguaccugaaccacaccgucacggggaagaccagccugccccgcugcuggcugguguccaacggcagcuaccugaacgagacccacuucuccgacgacaucgagcagcaggccgacaacaugaucaccgagcuccugcagaaggaguacaucgaccggcagggcaagacgccccuggggcucguggaccuguucgucuucagcaccuccuucuaccugaucagcaucuuccugcaccucgugaagaucccgacccaccgccacgugaucggcaagcccugccccaagccccaccggcugaaccacauggggaucugcuccugcggccuguacaagcacccggggguccccgugaaguggaagcgcugaggacuagucccuguucccagagcccacuuuuuuuucuuuuuuugaaauaaaauagccugucuuucagaucuaaaaaaaaaaaaaaaaaaaaaaaaaaaaaaaaaaaaaaaaaaaaaaaaaaaaaaaaaaaaaaaaaaaaaaaaaaaaaaaaaaaaaaaaaaaaaaaaaaaa

SEQ ID NO: 37331 - RNA, 1740 nt, Artificial Sequence
  mRNA product Design a-2 (A100) comprising derived and/or modified sequence from LASV(LASV003-NIG-2008;Clade II)__AIT17580__GPCmut10 (opt1)
aggagaguccgcucagccagguugcagaagcggcuuagcguguguccuaaucuucucucugcguguagguaggccugugccgcaaacaagcuuaccaugggccagaucaucaccuucuuccaggaggugccccacgucaucgaggaggugaugaacaucgugcugaucgcccucagccugcuggccauccucaaggggaucuacaacgucgcgaccugcggccuguucgggcugguguccuuccuccugcugugcggccgcagcugcuccacgaccuacaaggggguguacgagcuccagacccuggagcuggacauggccagccucaacaugugcaugccgcuguccugcacgaagaacaacagccaccacuacaucauggucggcaacgagaccggccuggagcucacccugaccaacacguccaucaucaaccacaaguucugcaaccugagcgacgcccacaagaagaaccucuacgaccacgcccugauguccaucaucagcaccuuccaccuguccauccccaacuucaaccaguacgaggccaugagcugcgacuucaacgggggcaagaucuccgugcaguacaaccucagccacaccuacgcgguggacgccgccaaccacugcgggaccaucgccaacggcguccugcagacguucaugcggauggcguggggcggguccuacaucgcccuggacagcggcaagggguccugggacugcaucaugaccagcuaccaguaccucaucauccagaacaccaccugggaggaccacugccaguucucccgccccagccccaucggcuaccuggggcugcucagccagcggacgcgcgacaucuacaucucccggcgccugcugggcaccuucaccuggacccucagcgacuccgagagcaacgagacgccgggcggguacugccugacccgguggaugcugaucgaggccgagcucaagugcuucggcaacaccgccguggccaagugcaacgagaagcacgacgaggaguucugcgacaugcugcgccuguucgacuucugcaagcaggcgauccggcgccucaaggccgaggcccagauguccauccagcugaucaacaaggccgugaacgcccugaucaacgaccagcucaucaugaagaaccaccuccgggacaucauggggauccccuacugcaacuacagcaaguacugguaccugaaccacaccgucacgggccgcaccucccugccccggugcuggcuggugagcaacggguccuaccugaacgagacccacuucagcgacgacaucgagcagcaggcggacaacaugaucaccgagcuccugcagaaggaguacauggaccgccagggcaagacgccccugggccucguggaccuguucgucuucuccaccagcuucuaccugaucuccaucuuccugcaccucgugaagaucccgacccaccggcacgugaucgggaagcccugccccaagccccaccgccugaaccacaugggcaucugcagcugcgggcuguacaagcacccgggcguccccgugaaguggaagcggugaggacuagucccuguucccagagcccacuuuuuuuucuuuuuuugaaauaaaauagccugucuuucagaucuaaaaaaaaaaaaaaaaaaaaaaaaaaaaaaaaaaaaaaaaaaaaaaaaaaaaaaaaaaaaaaaaaaaaaaaaaaaaaaaaaaaaaaaaaaaaaaaaaaaa

SEQ ID NO: 37332 - RNA, 1740 nt, Artificial Sequence
  mRNA product Design a-2 (A100) comprising derived and/or modified sequence from LASV(LASV035-NIG-2009;Clade II)__AIT17588__GPCmut10 (opt1)
aggagaguccgcucagccagguugcagaagcggcuuagcguguguccuaaucuucucucugcguguagguaggccugugccgcaaacaagcuuaccaugggccagaucaucaccuucuuccaggaggugccccacgucaucgaggaggugaugaacaucgugcugaucgcccucagccugcuggccauccucaaggggaucuacaacgucgcgaccugcggccuguucgggcugguguccuuccuccugcugugcggccgcagcugcuccacgaccuacaaggggguguacgagcuccagacccuggagcuggacauggccagccucaacaugugcaugccgcuguccugcacgaagaacaacagccaccacuacaucauggucggcaacgagaccggccuggagcucacccugaccaacacguccaucaucaaccacaaguucugcaaccugagcgacgcccacaagaagaaccucuacgaccacgcccugauguccaucaucagcaccuuccaccuguccauccccaacuucaaccaguacgaggccaugagcugcgacuucaacgggggcaagaucuccgugcaguacaaccucagccacgcguacgccguggacgccgccaaccacugcgggaccaucgcgaacggcguccugcagaccuucaugcggauggccuggggcggguccuacaucgcccuggacagcggcaagggguccugggacugcaucaugacgagcuaccaguaccucaucauccagaacaccaccugggaggaccacugccaguucucccgccccagccccaucggcuaccuggggcugcucagccagcggacccgcgacaucuacaucucccggcgccugcugggcacguucaccuggacccucagcgacuccgagggcaacgagacccccgggggcuacugccugacgcgguggaugcugaucgaggccgagcucaagugcuucgggaacaccgccguggcgaagugcaacgagaagcacgacgaggaguucugcgacaugcugcgccuguucgacuucugcaagcaggccauccggcgccucaaggccgaggcccagaugagcauccagcugaucaacaaggccgugaacgcgcugaucaacgaccagcucaucaugaagaaccaccuccgggacaucaugggcauccccuacugcaacuacuccaaguacugguaccugaaccacaccgucaccgggaagacgagccugccccgcugcuggcugguguccaacggcagcuaccugaacgagacccacuucuccgacgacaucgagcagcaggccgacaacaugaucaccgagcuccugcagaaggaguacaucgaccggcagggcaagaccccgcuggggcucguggaccuguucgucuucagcacguccuucuaccugaucagcaucuuccugcaccucgugaagaucccgacccaccgccacgugaucggcaagcccugccccaagccccaccggcugaaccacauggggaucugcuccugcggccuguacaagcacccggggguccccgugaaguggaagcgcugaggacuagucccuguucccagagcccacuuuuuuuucuuuuuuugaaauaaaauagccugucuuucagaucuaaaaaaaaaaaaaaaaaaaaaaaaaaaaaaaaaaaaaaaaaaaaaaaaaaaaaaaaaaaaaaaaaaaaaaaaaaaaaaaaaaaaaaaaaaaaaaaaaaaa

SEQ ID NO: 37333 - RNA, 1740 nt, Artificial Sequence
  mRNA product Design a-2 (A100) comprising derived and/or modified sequence from LASV(LASV1000-NIG-2009;Clade II)__AIT17782__GPCmut10 (opt1)
aggagaguccgcucagccagguugcagaagcggcuuagcguguguccuaaucuucucucugcguguagguaggccugugccgcaaacaagcuuaccaugggccagaucaucaccuucuuccaggaggugccccacgucaucgaggaggugaugaacaucgugcugaucgcccucagccugcuggccauccucaaggggaucuacaacgucgcgaccugcggccuguucgggcugguguccuuccuccugcugugcggccgcagcugcuccacgaccuacaaggggguguacgagcuccagacccuggagcuggacauggccagccucaacaugugcaugccgcuguccugcacgaagaacaacagccaccacuacaucauggucggcaacgagaccggccuggagcucacccugaccaacacguccaucaucaaccacaaguucugcaaccugagcgacgcccacaagaagaaccucuacgaccacgcccugauguccaucaucagcaccuuccaccuguccauccccaacuucaaccaguacgaggccaugagcugcgacuucaacgggggcaagaucuccgugcaguacaaccucagccacaccuacgcgguggacgccgccaaccacugcgggaccaucgccaacggcguccugcagacguucaugcggauggcguggggcggguccuacaucgcccuggacagcggcaagggguccugggacugcaucaugaccagcuaccaguaccucaucauccagaacaccaccugggaggaccacugccaguucucccgccccagccccaucggcuaccuggggcugcucagccagcggacgcgcgacaucuacaucucccggcgccugcugggcaccuucaccuggacccucagcgacuccgagggcaacgagacgcccgggggcuacugccugacccgguggaugcugaucgaggccgagcucaagugcuucgggaacaccgccguggccaagugcaacgagaagcacgacgaggaguucugcgacaugcugcgccuguucgacuucugcaagcaggcgaucaagcggcucaagaccgaggcccagaugagcauccagcugaucaacaaggccgugaacgcccugaucaacgaccagcucaucaugaagaaccaccuccgcgacaucaugggcauccccuacugcaacuacuccaaguacugguaccugaaccacacggucaccgggaagaccagccugccccggugcuggcugguguccaacggcagcuaccugaacgagacccacuucuccgacgacaucgagcagcaggccgacaacaugaucacggagcuccugcagaaggaguacaucgaccgccagggcaagaccccgcuggggcucguggaccuguucgucuucagcaccuccuucuaccugaucagcaucuuccugcaccucgugaagaucccgacccaccggcacguggucggcaagcccugccccaagccccaccgccugaaccacauggggaucugcuccugcggccuguacaagcacccgggggugcccgugaaguggaagcggugaggacuagucccuguucccagagcccacuuuuuuuucuuuuuuugaaauaaaauagccugucuuucagaucuaaaaaaaaaaaaaaaaaaaaaaaaaaaaaaaaaaaaaaaaaaaaaaaaaaaaaaaaaaaaaaaaaaaaaaaaaaaaaaaaaaaaaaaaaaaaaaaaaaaa

SEQ ID NO: 37334 - RNA, 1740 nt, Artificial Sequence
  mRNA product Design a-2 (A100) comprising derived and/or modified sequence from LASV(LASV221-NIG-2010;Clade II)__AIT17624__GPCmut10 (opt1)
aggagaguccgcucagccagguugcagaagcggcuuagcguguguccuaaucuucucucugcguguagguaggccugugccgcaaacaagcuuaccaugggccagaucaucaccuucuuccaggaggugccccacgucaucgaggaggugaugaacaucgugcugaucgcccucagccugcuggccauccucaaggggaucuacaacgucgcgaccugcggccuguucgggcugguguccuuccuccugcugugcggccgcagcugcuccacgaccuacaaggggguguacgagcuccagacccuggagcuggacauggccagccucaacaugugcaugccgcuguccugcacgaagaacaacagccaccacuacaucauggucggcaacgagaccggccuggagcucacccugaccaacacguccaucaucaaccacaaguucugcaaccugagcgacgcccacaagaagaaccucuacgaccacgcccugauguccaucaucagcaccuuccaccuguccauccccaacuucaaccaguacgaggccaugagcugcgacuucaacgggggcaagaucuccgugcaguacaaccucagccacaccuacgcgaucgacgccgccaaccacugcgggaccaucgccaacggcgugcugcagacguucaugcggauggcguggggcggguccuacaucgcccuggacagcggcaagggguccugggacugcaucaugaccagcuaccaguaccucaucauccagaacaccaccugggaggaccacugccaguucucccgccccagccccaucggcuaccuggggcugcucagccagcggacgcgcgacaucuacaucucccggcgccugcugggcaccuucaccuggacccucagcgacuccgagggcaacgagacgcccgggggcuacugccugacccgguggaugcugaucgaggccgagcucaagugcuucgggaacaccgccgucgccaagugcaacgagaagcacgacgaggaguucugcgacaugcugcgccuguucgacuucugcaagcaggcgauccggcgccucaagaccgaggcccagaugagcauccagcugaucaacaaggccgugaacgcccugaucaacgaccagcucaucaugaagaaccaccuccgggacaucaugggcauccccuacugcaacuacuccaaguacugguaccugaaccacacggugaccgggaagaccagccugccccgcugcuggcuggucuccaacggcagcuaccugaacgagacccacuucuccgacgacaucgagcagcaggccgacaacaugaucacggagaugcuccagaaggaguacauggaccggcagggcaagaccccgcuggggcugguggaccucuucguguucagcaccuccuucuaccugaucagcaucuuccugcaccuggucaagaucccgacccaccgccacgugaucggcaagcccugccccaagccccaccggcucaaccacauggggaucugcuccugcggccuguacaagcacccgggggugcccgucaaguggaagcgcugaggacuagucccuguucccagagcccacuuuuuuuucuuuuuuugaaauaaaauagccugucuuucagaucuaaaaaaaaaaaaaaaaaaaaaaaaaaaaaaaaaaaaaaaaaaaaaaaaaaaaaaaaaaaaaaaaaaaaaaaaaaaaaaaaaaaaaaaaaaaaaaaaaaaa

SEQ ID NO: 37335 - RNA, 1740 nt, Artificial Sequence
  mRNA product Design a-2 (A100) comprising derived and/or modified sequence from LASV(LASV237-NIG-2010;Clade II)__AIT17638__GPCmut10 (opt1)
aggagaguccgcucagccagguugcagaagcggcuuagcguguguccuaaucuucucucugcguguagguaggccugugccgcaaacaagcuuaccaugggccagaucaucaccuucuuccaggaggugccccacgucaucgaggaggugaugaacaucgugcugaucgcccucagccugcuggccauccucaaggggaucuacaacgucgcgaccugcggccuguucgggcugguguccuuccuccugcugugcggccgcagcugcuccacgaccuacaaggggguguacgagcuccagacccuggagcuggacauggccagccucaacaugugcaugccgcuguccugcacgaagaacaacagccaccacuacaucauggucggcaacgagaccggccuggagcucacccugaccaacacguccaucaucaaccacaaguucugcaaccugagcgacgcccacaagaaggaccucuacgaccacgcccugauguccaucaucagcaccuuccaccuguccauccccaacuucaaccaguacgaggccaugagcugcgacuucaacgggggcaagaucuccgugcaguacaaccucagccacaccuacgcgguggacgccgccaaccacugcgggaccaucgccaacggcguccugcagacguucaugcggauggcguggggcggguccuacaucgcccuggacagcggcaagggguccugggacugcaucaugaccagcuaccaguaccucaucauccagaacaccaccugggaggaccacugccaguucucccgccccagccccaucggcuaccuggggcugcucagccagcggacgcgcgacaucuacaucucccggcgccugcugggcaccuucaccuggacccucagcgacuccgagggcaacgagacgcccgggggcuacugccugacccgguggaugcugaucgaggccgagcucaagugcuucgggaacaccgccguggccaagugcaacgagaagcacgacgaggaguucugcgacaugcugcgccuguucgacuucugcaagcaggcgauccggcgccucaagaccgaggcccagaugagcauccagcugaucaacaaggccgugaacgcccugaucaacgaccagcucaucaugaagaaccaccuccgggacaucaugggcauccccuacugcaacuacuccaaguacugguaccugaaccacacggucaccgggaagaccagccugccccgcugcuggcugguguccaacggcagcuaccugaacgagacccacuucuccgacgacaucgagcagcaggccgacaacaugaucacggagcuccugcagaaggaguacauggaccggcagggcaagaccccgcuggggcucguggaccuguucgucuucagcaccuccuucuaccugaucagcaucuuccugcaccucaucaagaucccgacccaccgccacaucacgggcaagcccugccccaagccccaccggcugaaccacauggggaucugcuccugcggccuguacaagcacccgggggugcccgugaaguggaagcgcugaggacuagucccuguucccagagcccacuuuuuuuucuuuuuuugaaauaaaauagccugucuuucagaucuaaaaaaaaaaaaaaaaaaaaaaaaaaaaaaaaaaaaaaaaaaaaaaaaaaaaaaaaaaaaaaaaaaaaaaaaaaaaaaaaaaaaaaaaaaaaaaaaaaaa

SEQ ID NO: 37336 - RNA, 1740 nt, Artificial Sequence
  mRNA product Design a-2 (A100) comprising derived and/or modified sequence from LASV(LASV253-NIG-2011;Clade II)__AIT17670__GPCmut10 (opt1)
aggagaguccgcucagccagguugcagaagcggcuuagcguguguccuaaucuucucucugcguguagguaggccugugccgcaaacaagcuuaccaugggccagaucaucaccuucuuccaggaggugccccacgucaucgaggaggugaugaacaucgugcugaucgcccucagccugcuggccauccucaaggggaucuacaacgucgcgaccugcggccuguucgggcugguguccuuccuccugcugugcggccgcagcugcuccacgaccuacaaggggguguacgagcuccagacccuggagcuggacauggccagccucaacaugugcaugccgcuguccugcacgaagaacaacagccaccacuacaucauggucggcaacgagaccggccuggagcucacccugaccaacacguccaucaucaaccacaaguucugcaaccugagcgacgcccacaagaagaaccucuacgaccacgcccugauguccaucaucagcaccuuccaccuguccauccccaacuucaaccaguacgaggccaugagcugcgacuucaacgggggcaagaucuccgugcaguacaaccucagccacaccuacgcgguggacgccgccaaccacugcgggaccaucgccaacggcguccugcagacguucaugcggauggcguggggcggguccuacaucgcccuggacagcggcaagggguccugggacugcaucaugaccagcuaccaguaccucaucauccagaacaccaccugggaggaccacugccaguucucccgccccagccccaucggcuaccuggggcugcucagccagcggacgcgcgacaucuacaucucccggcgccugcugggcaccuucaccuggacccucagcgacuccgagggcaacgagacgcccgggggcuacugccugacccgguggaugcugaucgaggccgagcucaagugcuucgggaacaccgccguggccaagugcaacgagaagcacgacgaggaguucugcgacaugcugcgccuguucgacuucugcaagcaggcgauccggcgccucaaggccgaggcccagaugagcauccagcugaucaacaaggccgugaacgcccugaucaacgaccagcucaucaugaagaaccaccuccgggacaucaugggcaucccguacugcaacuacuccaaguacugguaccugaaccacaccgucacggggcgcaccagccugccccggugcuggcugguguccaacggcagcuaccugaacgagacccacuucuccgacgacaucgagcagcaggcggacaacaugaucaccgagcuccugcagaaggaguacaucgaccgccagggcaagacgccccuggggcucguggaccuguucgucuucagcaccuccuucuaccugaucagcaucuuccugcaccucgugaagaucccgacccaccggcacaucaucggcaagcccugccccaagccccaccgccugaaccacauggggaucugcuccugcggccuguacaagcacccgggggugcccgucaaguggaagcggugaggacuagucccuguucccagagcccacuuuuuuuucuuuuuuugaaauaaaauagccugucuuucagaucuaaaaaaaaaaaaaaaaaaaaaaaaaaaaaaaaaaaaaaaaaaaaaaaaaaaaaaaaaaaaaaaaaaaaaaaaaaaaaaaaaaaaaaaaaaaaaaaaaaaa

SEQ ID NO: 37337 - RNA, 1740 nt, Artificial Sequence
  mRNA product Design a-2 (A100) comprising derived and/or modified sequence from LASV(LASV254-NIG-2011;Clade II)__AIT17674__GPCmut10 (opt1)
aggagaguccgcucagccagguugcagaagcggcuuagcguguguccuaaucuucucucugcguguagguaggccugugccgcaaacaagcuuaccaugggccagaucaucaccuucuuccaggaggugccccacgucaucgaggaggugaugaacaucgugcugaucgcccucagccugcuggccauccucaaggggaucuacaacgucgcgaccugcggccuguucgggcugguguccuuccuccugcugugcggccgcagcugcuccacgaccuacaaggggguguacgagcuccagacccuggagcuggacaugaccaaccucaacaugugcaugccgcugagcugcaccaagaacaacucccaccacuacaucauggucggcaacgagaccggccuggagcucacccugacgaacaccagcaucaucaaccacaaguucugcaaccuguccgacgcccacaagaagaaccucuacaaccacgcccugaugagcaucaucuccaccuuccaccugagcauccccaacuucaaccaguacgaggccauguccugcgacuucaacgggggcaagaucagcgugcaguacaaccucucccacagcuacgccguggacgcggccaaccacugcgggaccaucgccaacggcguccugcagacguucaugcggauggccuggggcggguccuacaucgcgcuggacagcggcaaggggaacugggacugcaucaugaccuccuaccaguaccucaucauccagaacaccaccugggaggaccacugccaguucagccgccccucccccaucggcuaccuggggcugcucagccagcggacgcgcgacaucuacaucagccggcgccugcugggcaccuucaccuggacccucuccgacagcgagggcaacgagacgcccgggggcuacugccugacccgguggaugcugaucgaggccgagcucaagugcuucgggaacaccgccguggccaagugcaacgagaagcacgacgaggaguucugcgacaugcugcgccuguucgacuucugcaagcaggccauccggcgccucaagaccgaggcgcaggccaacauccagcugaucaacaaggccgugaacgcccugaucaacgaccagcucaucaugaagaaccaccuccgggacaucaugggcauccccuacugcaacuacuccaaguacugguaccugaaccacacggucaccgggaagaccagccugccccgcugcuggcugguguccaacggcagcuaccugaacgagacccacuucuccgacgacaucgagcagcaggccgacaacaugaucacggagcuccugcagaaggaguacauggaccggcagggcaagaccccgcuggggcucguggaccuguucgucuucagcaccuccuucuaccugaucagcaucuuccugcaccucgugaagaucccgacccaccgccacgugaucggcaagcccugccccaagccccaccggcugaaccacauggggaucugcuccugcggccuguacaagcacccggggguccccgugaaguggaagcgcugaggacuagucccuguucccagagcccacuuuuuuuucuuuuuuugaaauaaaauagccugucuuucagaucuaaaaaaaaaaaaaaaaaaaaaaaaaaaaaaaaaaaaaaaaaaaaaaaaaaaaaaaaaaaaaaaaaaaaaaaaaaaaaaaaaaaaaaaaaaaaaaaaaaaa

SEQ ID NO: 37338 - RNA, 1740 nt, Artificial Sequence
  mRNA product Design a-2 (A100) comprising derived and/or modified sequence from LASV(Nig08-A19;Clade III)__ADU56618__GPCmut10 (opt1)
aggagaguccgcucagccagguugcagaagcggcuuagcguguguccuaaucuucucucugcguguagguaggccugugccgcaaacaagcuuaccaugggccagaucgugaccuucuuccaggaggucccccacgugaucgaggaggugaugaacaucguccugaucgcccucagcauccuggccauccugaaggggcucuacaacaucgcgaccugcggccugaucgggcuggugacguuccuccugcuguccggccgcagcugcuccaugaccuacaaggggguguacgagcuccagacccuggagcugaacaugaacacccucaacaugugcaugccgcugagcugcaccaagaacaacucccaccacuacaucauggucggcaacgagaccggccuggagcucacccugacgaacaccagccugcuccaccacaaguucugcaaccuguccgacgcccacaagaagaaccuguacgaccacacccucaugagcaucaucuccaccuuccaccugagcauccccaacuucaaccaguacgaggccauguccugcgacuucaacgggggcaagaucacggugcaguacaaccugagccacuccuacgccaucgacgccgcgaaccacugcgggaccguggccaacggcguccuccagaccuucaugcggauggccuggggcgggagcuacaucgcccuggacuccggccgcgggaagugggacugcaucaugaccagcuaccaguaccugaucauccagaacacgaccugggaggaccacugccaguucucccggcccagccccaucggcuaccucgggcugcugucccagcgcacccgggacaucuacaucagccgccggcuccugggcaccuucacguggacccugagcgacuccgagggcaacgagacccccgggggcuacugccucacccgcuggaugcugaucgaggcggagcugaagugcuucgggaacacggccguggccaagugcaacgagaagcacgacgaggaguucugcgacaugcuccggcuguucgacuucugcaagcaggccauccgccggcugaaggccgaggcgcagaugagcauccagcucaucaacaaggccgugaacgcccugaucaacgaccagcugaucaugaagaaccaccuccgcgacaucaugggcauccccuacugcaacuacuccaaguacugguaccugaaccacaccagcaccgggcggaccucccugccccgcugcuggcucgucagcaacggcuccuaccugaacgagacgcacuucagcgacgacaucgagcagcaggccgacaacaugaucaccgagaugcugcagaaggaguaccucgaccggcagggcaagaccccgcuggggcugguggaccuguucguguucuccaccagcuucuaccucaucuccaucuuccugcaccuggucaagaucccgacgcaccgccacaucgugggcaagcccugccccaagccccaccggcucaaccacauggggaucugcagcugcggccuguacaagcagccgggggugcccguccgcuggaagcggugaggacuagucccuguucccagagcccacuuuuuuuucuuuuuuugaaauaaaauagccugucuuucagaucuaaaaaaaaaaaaaaaaaaaaaaaaaaaaaaaaaaaaaaaaaaaaaaaaaaaaaaaaaaaaaaaaaaaaaaaaaaaaaaaaaaaaaaaaaaaaaaaaaaaa

SEQ ID NO: 37339 - RNA, 1743 nt, Artificial Sequence
  mRNA product Design a-2 (A100) comprising derived and/or modified sequence from LASV(G1180-SLE-2010;Clade IV)__AIT17168__GPCmut10 (opt1)
aggagaguccgcucagccagguugcagaagcggcuuagcguguguccuaaucuucucucugcguguagguaggccugugccgcaaacaagcuuaccaugggccagaucgugaccuucuuccaggaggucccccacgugaucgaggaggugaugaacaucguccugaucgcccucagcauccuggccgugcugaaggggcucuacaacuucgcgaccugcggccugguggggcugcucaccuuccugcugcucugcggccgcuccugcaccgccagccgguacaagggggucuacgagcugcagacccuggagcucaacauggagacccugaacaugugcaugccgcuguccugcaccaagaacaacagccaccacuacaucauggugggcaacgagaccggccucgagcugacccugacgaacaccuccaucaucaaccacaaguucugcaaccucagcgacgcccacaagaagaaccuguacgaccacgcccugauguccaucaucagcaccuuccaccucuccauccccaacuucaaccaguacgaggccaugagcugcgacuucaacgggggcaagaucuccgugcaguacaaccugagccacuccuacgcgggggacgccgccaaccacugcggcaccgucgccaacggggugcugcagacguucaugcgcauggcguggggcggcagcuacaucgcccucgacuccgggcacggcagcugggacugcaucaugaccuccuaccaguaccugaucauccagaacaccaccugggaggaccacugccaguucagccggcccucccccaucggguaccugggccuccugagccagcgcacgcgggacaucuacaucagccgccggcugcucggcaccuucaccuggacccuguccgacagcgaggggaaggacacgccgggcggguacugccugacccgcuggaugcucaucgaggccgagcugaagugcuucggcaacaccgccguggccaagugcaacgagaagcacgacgaggaguucugcgacaugcugcggcuguucgacuucugcaagcaggcgauccagcgccugaaggccgaggcccagauguccauccagcugaucaacaaggccgucaacgcccucaucaacgaccagcugaucaugaagaaccaccuccgggacaucauggggauccccuacugcaacuacagcaaguacugguaccucaaccacaccacgaccggcaagaccucccugcccaagugcuggcuggugagcaacggcuccuaccucaacgagacccacuucagcgacgacaucgagcagcaggcggacaacaugaucacggagaugcugcagaaggaguacauggagcgccaggggaagacgccccugggccucguggaccuguucgucuucuccaccagcuucuaccugaucuccaucuuccugcaccucgugaagaucccgacccaccggcacaucgugggcaagagcugccccaagccccaccgccugaaccacauggggaucugcuccugcgggcuguacaagcagcccggcgucccggugaaguggaagcggugaggacuagucccuguucccagagcccacuuuuuuuucuuuuuuugaaauaaaauagccugucuuucagaucuaaaaaaaaaaaaaaaaaaaaaaaaaaaaaaaaaaaaaaaaaaaaaaaaaaaaaaaaaaaaaaaaaaaaaaaaaaaaaaaaaaaaaaaaaaaaaaaaaaaa

SEQ ID NO: 37340 - RNA, 1743 nt, Artificial Sequence
  mRNA product Design a-2 (A100) comprising derived and/or modified sequence from LASV(G1442-SLE-2011;Clade IV)__AIT17180__GPCmut10 (opt1)
aggagaguccgcucagccagguugcagaagcggcuuagcguguguccuaaucuucucucugcguguagguaggccugugccgcaaacaagcuuaccaugggccagaucgugaccuucuuccaggaggucccccacgugaucgaggaggugaugaacaucguccugaucgcccucagcauccuggccgugcugaaggggcucuacaacguggcgaccugcggccugaucgggcuggucacguuccuccugcugugcggccgcuccugcaccaccacccucuacaaggggguguacgagcugcagacgcuggagcucaacauggagacccugaacaugugcaugccgcugagcugcaccaagaacaacucccaccacuacauccgggugggcaacgagacgggccucgagcugacccugaccaacaccagcaucaucaaccacaaguucugcaaccucuccgacgcccacaagaagaaccuguacgaccacgcccugaugagcaucaucuccacguuccaccucagcauccccaacuucaaccaguacgaggccauguccugcgacuucaacgggggcaagaucagcguccaguacaaccugucccacagcuacgccggggacgcggccaaccacugcggcaccguggccaacggggugcugcagaccuucaugcgcauggccuggggcggcuccuacaucgcgcucgacagcgggcggggcaacugggacugcaucaugaccuccuaccaguaccugaucauccagaacacgaccugggacgaccacugccaguucagccgccccucccccaucggguaccugggccuccugagccagcggacccgcgacgucuacaucucccggcgccugcucggcaccuucacguggacccugagcgacagcgaggggaaggacaccccgggcggguacugccugacccgguggaugcucaucgaggccgagcugaagugcuucggcaacacggccguggccaagugcaacgagaagcacgacgaggaguucugcgacaugcugcgccucuucgacuucugcaagcaggccauccagcggcugaaggcggaggcccagauguccauccagcugaucaacaaggccgugaacgcccucaucaacgaccagcugaucaugaagaaccaccuccgcgacaucauggggauccccuacugcaacuacagcaaguacugguaccugaacaacaccgccaccggcaagaccucccugcccaagugcuggcugaucagcaacggcuccuaccucaacgagacgcacuucagcgacgacaucgagcaggaggcggacaacaugaucaccgagaugcugcagaaggaguacauggagcggcaggggaagacgccccugggccucgucgaccuguucguguucuccaccagcuucuaccugaucuccaucuuccugcaccucgugaagaucccgacccaccgccacaucgucggcaagagcugccccaagccccaccggcugaaccacauggggaucugcuccugcgggcuguacaagcagcccggcgugccggugcgcuggaagcggugaggacuagucccuguucccagagcccacuuuuuuuucuuuuuuugaaauaaaauagccugucuuucagaucuaaaaaaaaaaaaaaaaaaaaaaaaaaaaaaaaaaaaaaaaaaaaaaaaaaaaaaaaaaaaaaaaaaaaaaaaaaaaaaaaaaaaaaaaaaaaaaaaaaaa

SEQ ID NO: 37341 - RNA, 1743 nt, Artificial Sequence
  mRNA product Design a-2 (A100) comprising derived and/or modified sequence from LASV(G3010-SLE-2013;Clade IV)__AIT17344__GPCmut10 (opt1)
aggagaguccgcucagccagguugcagaagcggcuuagcguguguccuaaucuucucucugcguguagguaggccugugccgcaaacaagcuuaccaugggccagaucgugaccuucuuccaggaggucccccacgugaucgaggaggugaugaacaucguccugaucgcccucagcauccuggccgugcugaaggggcucuacaacuucgcgaccugcggccugguggggcuggucacguuccuccugcugugcggccgcuccugcaccaccagccucuacaaggggguguacgagcugcagacccuggagcucaacauggagacgcugaacaugugcaugccgcuguccugcaccaagaacaacagccaccacuacaucauggugggcaacgagaccggccucgagcugacgcugaccaacaccuccaucaucaaccacaaguucugcaaccucagcgacgcccacaagaagaaccuguacaaccacgcccugauguccaucaucagcaccuuccaccucuccauccccaacuucaaccaguacgaggccaugagcugcgacuucaacgggggcaagaucuccguccaguacaaccugagccacuccuacgccggggacgcggccagccacugcggcacgguggccaacggggugcugcagaccuucaugcggauggccuggggcggcuccuacaucgcgcucgacagcggguacggcaagugggacugcaucaugaccuccuaccaguaccugaucauccagaacaccacgugggaggaccacugccaguucagccgccccucccccaucggguaccugggccuccugagccagcggacccgcgacaucuacaucagccggcgccugcucggcaccuucaccuggacgcuguccgacagcgaggggaaggacaccccgggcggguacugccugacccgguggaugcucaucgaggccgagcugaagugcuucggcaacaccgccgucgccaagugcaacgagaagcacgacgaggaguucugcgacaugcugcgccucuucgacuucugcaagcaggccauccagcggcugaagacggaggcgcagauguccauccagcugaucaacaaggccgugaacgcccucaucaacgaccagcugaucaugaagaaccaccuccgcgacaucauggggauccccuacugcaacuacagcaaguacugguaccugaaccacaccaccaccggcaagacgucccugcccaagugcuggcuggugagcaacggcuccuaccucaacgagacccacuucagcgacgacaucgagcagcaggccgacaacaugaucaccgagaugcugcagaaggaguacauggagcggcaggggaagacgccccugggccucgucgaccuguucguguucuccaccagcuucuaccugaucuccaucuuccugcaccucgugaagaucccgacccaccgccacaucgucggcaagagcugccccaagccccaccggcugaaccacauggggaucugcuccugcgggcuguacaagcagcccggcgugccggugcgcuggaagcggugaggacuagucccuguucccagagcccacuuuuuuuucuuuuuuugaaauaaaauagccugucuuucagaucuaaaaaaaaaaaaaaaaaaaaaaaaaaaaaaaaaaaaaaaaaaaaaaaaaaaaaaaaaaaaaaaaaaaaaaaaaaaaaaaaaaaaaaaaaaaaaaaaaaaa

SEQ ID NO: 37342 - RNA, 1743 nt, Artificial Sequence
  mRNA product Design a-2 (A100) comprising derived and/or modified sequence from LASV(G502-SLE-2009;Clade IV)__AIT17126__GPCmut10 (opt1)
aggagaguccgcucagccagguugcagaagcggcuuagcguguguccuaaucuucucucugcguguagguaggccugugccgcaaacaagcuuaccaugggccagaucgugaccuucuuccaggaggucccccacgugaucgaggaggugaugaacaucguccugaucgcccucagcauccuggccgugcugaaggggcucuacaacuucgcgaccugcggccugguggggcugcucacguuccugcugcucugcggccgcuccugcaccaccgggcuguacaagggcgucuacgagcugcagacccucgagcugaacauggagacgcugaacaugugcaugccgcucagcugcaccaagaacaacucccaccacuacaucauggugggcaacgagaccgggcuggagcugacgcucaccaacaccagcaucaucaaccacaaguucugcaaccuguccgacgcccacaagaagaaccuguacgaccacgcccucaugagcaucaucuccaccuuccaccugagcauccccaacuucaaccaguacgaggccauguccugcgacuucaacggcgggaagaucagcgugcaguacaaccugucccacagcuacgccggcgacgcggccgaccacugcgggacggucgccaacggcgugcuccagaccuucaugcggauggccuggggcggguccuacaucgcgcuggacagcggccgcgggcggugggacugcaucaugaccuccuaccaguaccugaucauccagaacaccacgugggaggaccacugccaguucagccgccccucccccaucggcuaccucggccugcugagccagcggacccgcgacaucuacaucucccggcgccuccuggggaccuucaccuggacgcugagcgacagcgagggcaaggacacccccgggggcuacugccucacccgguggaugcugaucgaggccgagcugaagugcuucgggaacaccgccguggccaagugcaacgagaagcacgacgaggaguucugcgacaugcuccgccuguucgacuucugcaagcaggccauccagcggcugaaggcggaggcccagauguccauccagcucaucaacaaggccgucaacgcccugaucaacgaccagcuggugaugaagaaccaccuccgcgacaucaugggcauccccuacugcaacuacagccgguacugguaccugaaccacacgaccaccggccgcaccucccugcccaagugcuggcucgugagcaacggguccuaccugaacgagacgcacuucagcgacgacaucgagcagcaggccgacaacaugaucaccgagaugcugcagaaggaguacauggagcggcagggcaagaccccgcucgggcuggucgaccuguucguguucuccaccagcuucuaccugaucuccaucuuccuccaccuggugaagaucccgacgcaccgccacaucgucggcaagagcugccccaagccccaccggcugaaccacauggggaucugcuccugcggccucuacaagcagcccggcgugccggugaaguggaagcgcugaggacuagucccuguucccagagcccacuuuuuuuucuuuuuuugaaauaaaauagccugucuuucagaucuaaaaaaaaaaaaaaaaaaaaaaaaaaaaaaaaaaaaaaaaaaaaaaaaaaaaaaaaaaaaaaaaaaaaaaaaaaaaaaaaaaaaaaaaaaaaaaaaaaaa

SEQ ID NO: 37343 - RNA, 1743 nt, Artificial Sequence
  mRNA product Design a-2 (A100) comprising derived and/or modified sequence from LASV(G733-SLE-2010;Clade IV)__AIT17154__GPCmut10 (opt1)
aggagaguccgcucagccagguugcagaagcggcuuagcguguguccuaaucuucucucugcguguagguaggccugugccgcaaacaagcuuaccaugggccagaucgugaccuucuuccaggaggucccccacgugaucgaggaggugaugaacaucguccugaucgcccucagcauccuggccgugcugaaggggcucuacaacuucgcgaccugcggcaucguggggcuggucuccuuccugcuccugugcggccgcagcugcacgaccucccuguacaaggggguguacgagcuccagacccuggagcugaacauggagacccucaacaugugcaugccgcugagcugcaccaagaacaacucccaccacuacaucauggugggcaacgagaccggccuggagcucacccugacgaacaccagcaucaucaaccacaaguucugcaaccuguccgacgcccacaagaagaaccucuacgaccacgcccugaugagcaucaucuccaccuuccaccugagcauccccaacuucaaccaguacgaggccauguccugcgacuucaacgggggcaagaucagcguccaguacaaccucucccacagcuacgccggggacgcggccaaccacugcggcaccaucgccaacggggugcugcagacguucaugcggauggccuggggcggcuccuacaucgcgcuggacagcgggcgcgaccggugggacugcaucaugaccuccuaccaguaccucaucauccagaacaccaccugggaggaccacugccaguucagccgccccucccccaucggcuaccuggggcugcucagccagcggacgcgcgacaucuacaucagccggcgccugcugggcaccuucaccuggacccucuccgacagcgagggcaaggacacgcccgggggcuacugccugacccgguggaugcugaucgaggccgagcucaagugcuucgggaacaccgccguggccaagugcaacgagaagcacgacgaggaguucugcgacaugcugcgccuguucgacuucugcaagcaggccauccagcggcucaaggcggaggcccagauguccauccagcugaucaacaaggccgucaacgcccugaucaacgaccagcucaucaugaagaaccaccuccgcgacaucaugggcauccccuacugcaacuacagcaaguacugguaccugaaccacaccacgaccgggaagaccucccugcccaagugcuggcuggugagcaacggcuccuaccugaacgagacccacuucagcgacgacaucgagcagcaggccgacaacaugaucacggagaugcuccagaaggaguacauggagcggcagggcaagaccccgcuggggcugguggaccucuucgucuucuccaccagcuucuaccugaucuccaucuuccugcaccuggugaagaucccgacccaccgccacguggucggcaagagcugccccaagccccaccggcucaaccacauggggaucugcuccugcggccuguacgggcagcccggcgugccggugaaguggaagcgcugaggacuagucccuguucccagagcccacuuuuuuuucuuuuuuugaaauaaaauagccugucuuucagaucuaaaaaaaaaaaaaaaaaaaaaaaaaaaaaaaaaaaaaaaaaaaaaaaaaaaaaaaaaaaaaaaaaaaaaaaaaaaaaaaaaaaaaaaaaaaaaaaaaaaa

SEQ ID NO: 37344 - RNA, 1743 nt, Artificial Sequence
  mRNA product Design a-2 (A100) comprising derived and/or modified sequence from MOPV/LASV reassortant(IGS-1;Clade IV)__AFY05576__GPCmut10 (opt1)
aggagaguccgcucagccagguugcagaagcggcuuagcguguguccuaaucuucucucugcguguagguaggccugugccgcaaacaagcuuaccaugggccagaucgugaccuucuuccaggaggucccccacgugaucgaggaggugaugaacaucguccugaucgcccucagcgugcuggccgugcugaaggggcucuacaacuucgcgaccugcggccuggucgggcuggugacguuccuccugcugugcggccgcuccugcaccaccagccucuacaaggggguguacgagcugcagacccuggagcucaacauggagacgcugaacaugugcaugccgcuguccugcaccaagaacaacagccaccacuacaucauggucggcaacgagaccggccucgagcugacgcugaccaacaccuccaucaucaaccacaaguucugcaaccucagcgacgcccacaagaagaaccuguacgaccacgcccugauguccaucaucagcaccuuccaccucuccauccccaacuucaaccaguacgaggccaugagcugcgacuucaacgggggcaagaucuccgugcaguacaaccugagccacuccuacgccggggacgcggccaaccacugcggcacgguggccaacgggguccugcagaccuucaugcggauggccuggggcggcagcuacaucgcgcucgacuccgggcgcggcaacugggacugcaucaugaccagcuaccaguaccugaucauccagaacaccacgugggaggaccacugccaguucucccggcccagccccaucggguaccugggccuccugucccagcgcacccgggacaucuacaucagccgccggcugcucggcaccuucaccuggacgcugagcgacuccgagggggaggacaccccgggcggguacugccugacccgcuggaugcucaucgaggccgagcugaagugcuucggcaacaccgccguggccaagugcaacgagaagcacgacgaggaguucugcgacaugcugcggcuguucgacuucugcaagcaggccauccagcgccugaaggcggaggcccagaugagcauccagcugaucaacaaggccgugaacgcccucaucaacgaccagcugaucaugaagaaccaccuccgggacaucauggggauccccuacugcaacuacuccaaguacugguaccucaaccacacgaccaccggccgcaccagccugcccaagugcuggcuggucuccaacggcagcuaccucaacgagacgcacuucuccgacgacaucgagcagcaggccgacaacaugaucaccgagaugcugcagaaggaguacauggagcggcaggggaagacgccccugggccucguggaccuguucguguucagcaccuccuucuaccugaucagcaucuuccugcaccucgucaagaucccgacccaccgccacaucguggggaaguccugccccaagccccaccggcugaaccacaugggcaucugcagcugcgggcuguacaagcagcccggcgugccggucaaguggaagcgcugaggacuagucccuguucccagagcccacuuuuuuuucuuuuuuugaaauaaaauagccugucuuucagaucuaaaaaaaaaaaaaaaaaaaaaaaaaaaaaaaaaaaaaaaaaaaaaaaaaaaaaaaaaaaaaaaaaaaaaaaaaaaaaaaaaaaaaaaaaaaaaaaaaaaa

SEQ ID NO: 37345 - RNA, 1743 nt, Artificial Sequence
  mRNA product Design a-2 (A100) comprising derived and/or modified sequence from LASV(LM765-SLE-2012;Clade IV)__AIT17814__GPCmut10 (opt1)
aggagaguccgcucagccagguugcagaagcggcuuagcguguguccuaaucuucucucugcguguagguaggccugugccgcaaacaagcuuaccaugggccagaucgugaccuucuuccaggaggucccccacgugaucgaggaggugaugaacaucguccugaucgcccucagcauccuggccgugcugaaggggcucuacaacuucgcgaccugcggccugguggggcuggucacguuccuccugcugugcggccgcuccugcaccaccagccucuacaaggggguguacgagcugcagacccuggagcucaacauggagacgcugaacaugugcaugccgcuguccugcaccaagaacaacagccaccacuacaucauggugggcaacgagaccggccucgagcugacgcugaccaacaccuccaucaucgaccacaaguucugcaaccucagcgacgcccaccggaagaaccuguacgaccacgcccugauguccaucaucagcaccuuccaccucuccauccccaacuucaaccaguacgaggccaugagcugcgacuucaacgggggcaagaucuccguccaguacaaccugagccacuccuacgccaaggacgcggccgaccacugcgggacgguggccaacggcgugcugcagaccuucaugcgcauggccuggggcgggagcuacaucgcgcucgacuccggccgggggcgcugggacugcaucaugaccagcuaccaguaccugaucauccagaacaccacgugggaggaccacugccaguucucccggcccagccccaucggcuaccuggggcuccugucccagcgcacccgggacaucuacaucagccgccggcugcucggcaccuucaccuggacgcugagcgacuccgagggcaaggacacccccgggggcuacugccugacccgcuggaugcucaucgaggccgagcugaagugcuucgggaacaccgccgucgccaagugcaacgagaagcacgacgaggaguucugcgacaugcugcggcuguucgacuucugcaagcaggccauccagcgccugaaggcggaggcccagaugagcauccagcugaucaacaaggccgugaacgcccucaucaacgaccagcugaucaugaagaaccaccuccgggacaucaugggcauccccuacugcaacuacuccaaguacugguaccucaaccacacgaccaccgggaagaccagccugcccaagugcuggcugguguccaacggcagcuaccucaacgagacgcacuucuccgacgacaucgagcagcaggccgacaacaugaucaccgagaugcugcagaaggaguacauggagcgccagggcaagaccccgcuggggcucgucgaccuguucguguucagcaccuccuucuaccugaucagcaucuuccugcaccucgugaagaucccgacgcaccggcacaucgucggcaagcccugccccaagccccaccgccugaaccacauggggaucugcuccugcggccuguacaagcagccgggggugcccgugaaguggaagcggugaggacuagucccuguucccagagcccacuuuuuuuucuuuuuuugaaauaaaauagccugucuuucagaucuaaaaaaaaaaaaaaaaaaaaaaaaaaaaaaaaaaaaaaaaaaaaaaaaaaaaaaaaaaaaaaaaaaaaaaaaaaaaaaaaaaaaaaaaaaaaaaaaaaaa

SEQ ID NO: 37346 - RNA, 1743 nt, Artificial Sequence
  mRNA product Design a-2 (A100) comprising derived and/or modified sequence from LASV(LM776-SLE-2012;Clade IV)__AIT17824__GPCmut10 (opt1)
aggagaguccgcucagccagguugcagaagcggcuuagcguguguccuaaucuucucucugcguguagguaggccugugccgcaaacaagcuuaccaugggccagaucgugaccuucuuccaggaggucccccacgugaucgaggaggugaugaacaucguccugaucgcccucagcauccuggccgugcugaaggggcucuacaacuucgcgaccugcggccugguggggcuggucacguuccuccugcugugcggccgcuccugcaccaccagcguguacaaggggguguacgagcuccagacccuggagcugaacauggagacgcucaacaugugcaugccgcuguccugcaccaagaacaacagccaccacuacaucauggucggcaacgagaccggccuggagcucacgcugaccaacaccuccaucaucaaccacaaguucugcaaccugagcgacgcccacaagaagaaccucuacgaccacgcccugauguccaucaucagcaccuuccaccuguccauccccaacuucaaccaguacgaggccaugagcugcgacuucaacgggggcaagaucuccgugcaguacaaccucagccacuccuacgccggggacgcggccaaccacugcggcacgguggccaacgggguccugcagaccuucaugcggauggccuggggcggcagcuacaucgcgcuggacuccgggcacggcaagugggacugcaucaugaccagcuaccaguaccucaucauccagaacaccacgugggaggaccacugccaguucucccgccccagccccaucggguaccugggccugcucucccagcggacccgcgacaucuacaucagccggcgccugcugggcaccuucaccuggacgcucagcgacuccgaggggaaggacaccccgggcggguacugccugacccgguggaugcugaucgaggccgagcucaagugcuucggcaacaccgccguggccaagugcaacgagaagcacgacgaggaguucugcgacaugcugcgccuguucgacuucugcaagcaggccauccagcggcucaaggcggaggcccagaugagcauccagcugaucaacaaggccgugaacgcccugaucaacgaccagcucaucaugaagaaccaccuccgcgacaucauggggauccccuacugcaacuacuccaaguacugguaccugaaccacacgaccaccggcaagaccagccugcccaagugcuggcuggucuccaacggcagcuaccugaacgagacgcacuucuccgacgacaucgagcagcaggccgacaacaugaucaccgagaugcuccagaaggaguacauggagcggcaggggaagacgccccugggccugguggaccucuucguguucagcaccuccuucuaccugaucagcaucuuccugcaccuggucaagaucccgacccaccgccacaucguggggaaguccugccccaagccccaccggcucaaccacaugggcaucugcagcugcgggcuguacaagcagcccggcgugccgguccgcuggaagcggugaggacuagucccuguucccagagcccacuuuuuuuucuuuuuuugaaauaaaauagccugucuuucagaucuaaaaaaaaaaaaaaaaaaaaaaaaaaaaaaaaaaaaaaaaaaaaaaaaaaaaaaaaaaaaaaaaaaaaaaaaaaaaaaaaaaaaaaaaaaaaaaaaaaaa

SEQ ID NO: 37347 - RNA, 1743 nt, Artificial Sequence
  mRNA product Design a-2 (A100) comprising derived and/or modified sequence from LASV(Mad39;Clade IV)__ANH09722__GPCmut10 (opt1)
aggagaguccgcucagccagguugcagaagcggcuuagcguguguccuaaucuucucucugcguguagguaggccugugccgcaaacaagcuuaccaugggccagaucgugaccuucuuccaggaggucccccacgugaucgaggaggugaugaacaucguccugaucgcccucagcauccuggccgugcugaaggggcucuacaacguggcgaccugcggccugaucgggcuggucacguuccuccugcugugcggccgcuccugcaccaccacccucuacaaggggguguacgagcugcaggcccuggagcucaacauggagacgcugaacaugugcaugccgcugagcugcaccaagaacaacucccaccacuacauccgggugggcaacgagaccggccucgagcugacgcugaccaacaccagccucaucaaccacaaguucugcaaccuguccgacgcccacaagaagaaccuguacgaccacgcccucaugagcaucaucuccaccuuccaccugagcauccccaacuucaaccaguacgaggccauguccugcgacuucaacgacgggaagaucagcguccaguacaaccugucccacacguacgcgggcgacaccgccaaccacugcgggaccguggccaacggcgugcuccagaccuucaugcgcauggccuggggcgggagcuacaucgcgcuggacuccggccgcgggggcugggacugcaucaugacgagcuaccaguaccugaucauccagaacaccaccugggaggaccacugccaguucucccggcccagccccaucggguaccucggccugcugucccagcggacccgcgacaucuacaucagccggcgccuccugggcacguucaccuggacccuguccgacagcgaggggaaggacaccccgggcggguacugccucacgcgguggaugcugaucgaggccgagcugaagugcuucggcaacaccgccgucgccaagugcaacgagaagcacgacgaggaguucugcgacaugcuccgccuguucgacuucugcaagcaggccauccagcggcugaaggcggaggcccagaugagcauccagcucaucaacaaggccgugaacgcccugaucaacgaccagcugaucaugaagaaccaccuccgcgacaucauggggauccccuacugcaacuacuccaaguacugguaccugaaccacaccgugaccggcaagacgagccugcccaagugcuggcucgucuccaacggcagcuaccugaacgagacccacuucuccgacgacaucgagcagcaggccgacaacaugaucaccgagaugcugcagaaggaguacauggagcggcaggggaagacgccccucggccugguggaccuguucguguucagcaccuccuucuaccugaucagcaucuuccuccaccuggucaagaucccgacccaccgccacgugguggggaagcccugccccaagccccaccggcugaaccacaugggcaucugcuccugcggguucuacaagcagccgggcguccccgugcgcuggaagcggugaggacuagucccuguucccagagcccacuuuuuuuucuuuuuuugaaauaaaauagccugucuuucagaucuaaaaaaaaaaaaaaaaaaaaaaaaaaaaaaaaaaaaaaaaaaaaaaaaaaaaaaaaaaaaaaaaaaaaaaaaaaaaaaaaaaaaaaaaaaaaaaaaaaaa

SEQ ID NO: 37348 - RNA, 1743 nt, Artificial Sequence
  mRNA product Design a-2 (A100) comprising derived and/or modified sequence from LASV(Z0947-SLE-2011;Clade IV)__AIT17840__GPCmut10 (opt1)
aggagaguccgcucagccagguugcagaagcggcuuagcguguguccuaaucuucucucugcguguagguaggccugugccgcaaacaagcuuaccaugggccagaucgugaccuucuuccaggaggucccccacgugaucgaggaggugaugaacaucguccugaucgcccucagcauccuggccgugcugaaggggcucuacaacuucgcgaccugcggccugguggggcuggucacguuccuccugcugugcggccgcuccugcaccaucagccucuacaaggggguguacgagcugcagacccuggagcucaacauggagacccugaacaugugcaugccgcuguccugcaccaagaacaacagccaccacuacaucauggugggcaacgagaccggccucgagcugacccugacgaacaccuccaucaucaaccacaaguucugcaaccucagcgacgcccacaagaagaaccuguacgaccacgcccugauguccaucaucagcaccuuccaccucuccauccccaacuucaaccaguacgaggccaugagcugcgacuucaacgggggcaagaucuccguccaguacaaccugagccacuccuacgccggggacgcggccaaccacugcggcaccguggccaacggggugcugcagacguucaugcggauggccuggggcggcagcuacaucgcgcucgacuccgggcgcgaccggugggacugcaucaugaccagcuaccaguaccugaucauccagaacaccaccugggaggaccacugccaguucucccgccccagccccaucggcuaccuggggcuccugucccagcggacgcgcgacaucuacaucagccggcgccugcucggcaccuucaccuggacccugagcgacuccgagggcaaggacacgcccgggggcuacugccugacccgguggaugcucaucgaggccgagcugaagugcuucgggaacaccgccgucgccaagugcaacgagaagcacgacgaggaguucugcgacaugcugcgccucuucgacuucugcaagcaggccauccagcggcugaaggcggaggcccagaugagcauccagcugaucaacaaggccgugaacgcccucaucaacgaccagcugaucaugaagaaccaccuccgcgacaucaugggcauccccuacugcaacuacuccaaguacugguaccugaaccacaccacgaccgggaagaccagccugcccaagugcuggcugguguccaacggcagcuaccucaacgagacccacuucuccgacgacaucgagcagcaggccgacaacaugaucacggagaugcugcagaaggaguacauggagcggcagggcaagaccccgcuggggcucgucgaccuguucguguucagcaccuccuucuaccugaucagcaucuuccugcaccucgugaagaucccgacccaccgccacaucgucggcaagcccugccccaagccccaccggcugaaccacauggggaucugcuccugcggccuguacaagcagccgggggugcccgugaaguggaagcgcugaggacuagucccuguucccagagcccacuuuuuuuucuuuuuuugaaauaaaauagccugucuuucagaucuaaaaaaaaaaaaaaaaaaaaaaaaaaaaaaaaaaaaaaaaaaaaaaaaaaaaaaaaaaaaaaaaaaaaaaaaaaaaaaaaaaaaaaaaaaaaaaaaaaaa

SEQ ID NO: 37349 - RNA, 1743 nt, Artificial Sequence
  mRNA product Design a-2 (A100) comprising derived and/or modified sequence from LASV(Josiah;Clade IV)__NP_694870__GPCmut10 (opt1)
aggagaguccgcucagccagguugcagaagcggcuuagcguguguccuaaucuucucucugcguguagguaggccugugccgcaaacaagcuuaccaugggccagaucgugaccuucuuccaggaggucccccacgugaucgaggaggugaugaacaucguccugaucgcccucagcgugcuggccgugcugaaggggcucuacaacuucgcgaccugcggccuggucgggcuggugaccuuccuccugcugugcggccgcuccugcaccaccagccucuacaaggggguguacgagcugcagacccuggagcucaacauggagacgcugaacaugugcaugccgcuguccugcaccaagaacaacagccaccacuacaucauggucggcaacgagaccggccucgagcugacccugacgaacaccuccaucaucaaccacaaguucugcaaccucagcgacgcccacaagaagaaccuguacgaccacgcccugauguccaucaucagcaccuuccaccucuccauccccaacuucaaccaguacgaggccaugagcugcgacuucaacgggggcaagaucuccgugcaguacaaccugagccacuccuacgccggggacgcggccaaccacugcggcaccguggccaacgggguccugcagacguucaugcggauggccuggggcggcagcuacaucgcgcucgacuccgggcgcggcaacugggacugcaucaugaccagcuaccaguaccugaucauccagaacaccaccugggaggaccacugccaguucucccggcccagccccaucggguaccugggccuccugucccagcgcacgcgggacaucuacaucagccgccggcugcucggcaccuucaccuggacccugagcgacuccgaggggaaggacacgccgggcggguacugccugacccgcuggaugcucaucgaggccgagcugaagugcuucggcaacaccgccguggccaagugcaacgagaagcacgacgaggaguucugcgacaugcugcggcuguucgacuucugcaagcaggccauccagcgccugaaggcggaggcccagaugagcauccagcugaucaacaaggccgugaacgcccucaucaacgaccagcugaucaugaagaaccaccuccgggacaucauggggauccccuacugcaacuacuccaaguacugguaccucaaccacaccacgaccggccgcaccagccugcccaagugcuggcuggucuccaacggcagcuaccucaacgagacccacuucuccgacgacaucgagcagcaggccgacaacaugaucacggagaugcugcagaaggaguacauggagcggcaggggaagacgccccugggccugguggaccucuucguguucagcaccuccuucuaccugaucagcaucuuccugcaccucgucaagaucccgacccaccgccacaucguggggaaguccugccccaagccccaccggcugaaccacaugggcaucugcagcugcgggcuguacaagcagcccggcgugccggucaaguggaagcgcugaggacuagucccuguucccagagcccacuuuuuuuucuuuuuuugaaauaaaauagccugucuuucagaucuaaaaaaaaaaaaaaaaaaaaaaaaaaaaaaaaaaaaaaaaaaaaaaaaaaaaaaaaaaaaaaaaaaaaaaaaaaaaaaaaaaaaaaaaaaaaaaaaaaaa

SEQ ID NO: 37350 - RNA, 1740 nt, Artificial Sequence
  mRNA product Design a-2 (A100) comprising derived and/or modified sequence from LASV(LP;Clade I)__AAF86701__GPCmut10 (opt1)
aggagaguccgcucagccagguugcagaagcggcuuagcguguguccuaaucuucucucugcguguagguaggccugugccgcaaacaagcuuaccaugggccagaucaucaccuucuuccaggaggugccccacgucaucgaggaggugaugaacaucgugcugaucgcccucagccugcuggccauccucaaggggcuguacaacaucgcgaccugcggcaucaucgggcuggucgccuuccucuuccugugcggcaaguccugcagccugacgcucaagggcggguacgagcugcagacccuggagcucaacauggagacccugaacaugugcaugccgcuguccugcaccaagaacagcucccaccacuacauccgcgugggcaacgagacggggcucgagcugacccugaccaacaccagcaucaucaaccacaaguucugcaaccucuccgacgcccacaagaagaaccuguacgaccacgcccugaugagcaucaucuccacguuccaccucagcauccccaacuucaaccaguacgaggccauguccugcgacuucaacggcgggaagaucagcgugcaguacaaccugucccacagcuacgcgggcgacgccgccgagcacugcgggaccgucgccaacggcgugcugcagaccuucaugcggauggcguggggcgggcgcuacaucgcccucgacuccggcaaggggaacugggacugcaucaugaccagcuaccaguaccugaucauccagaacacgaccugggaggaccacugccaguucucccggcccagccccaucggcuaccugggccuccugucccagcgcacccgggacaucuacaucagccgccggcugcucgggaccuucacguggacccugagcgacuccgagggcaacgagacccccgggggcuacugccugacccgcuggaugcucaucgaggccgagcugaagugcuucgggaacacggccguggccaagugcaacgagaagcacgacgaggaguucugcgacaugcugcggcuguucgacuucugcaagcaggcgauccgccggcugaaggccgaggcccagaugagcauccagcugaucaacaaggccgucaacgcccucaucaacgaccagcugaucaugaagaaccaccuccgcgacaucaugggcauccccuacugcaacuacuccaaguacugguaccucaaccacaccagcuccggccggaccagccugcccaagugcuggcugaucuccaacgggagcuaccucaacgagacccaguucuccgacgacaucgagcagcaggcggacaacaugaucacggagaugcugcagaaggaguacaucgagcgccagggcaagaccccgcuggggcugguggacaucuucaucuucagcaccuccuucuaccucaucagcaucuuccugcaccugaucaagaucccgacccaccggcacaucgugggcaagcccugccccaagccccaccgccucaaccacaugggggucugcuccugcggccuguacaagcacccgggcgugcccacgaaguggaagcggugaggacuagucccuguucccagagcccacuuuuuuuucuuuuuuugaaauaaaauagccugucuuucagaucuaaaaaaaaaaaaaaaaaaaaaaaaaaaaaaaaaaaaaaaaaaaaaaaaaaaaaaaaaaaaaaaaaaaaaaaaaaaaaaaaaaaaaaaaaaaaaaaaaaaa

SEQ ID NO: 37351 - RNA, 1740 nt, Artificial Sequence
  mRNA product Design a-2 (A100) comprising derived and/or modified sequence from LASV(803213;Clade II)__AAF86703__GPCmut10 (opt1)
aggagaguccgcucagccagguugcagaagcggcuuagcguguguccuaaucuucucucugcguguagguaggccugugccgcaaacaagcuuaccaugggccagaucaucaccuucuuccaggaggugccccacgucaucgaggaggugaugaacaucgugcugaucgcccucagccugcuggccauccucaaggggaucuacaacgucgcgaccugcggccuguucgggcugaucuccuuccuccugcugugcggccgcagcugcuccgugacguacaaggggguguacgagcuccagacccuggagcugaacauggccaaccucaacaugugcaugccgcugagcugcaccaagaacaacucccaccacuacaucauggucggcaacgagaccggccuggagcucacgcugaccaacaccagcaucaucaaccacaaguucugcaaccuguccgacgcccacaagaagaaccucuacgaccacgcccugaugagcaucaucuccaccuuccaccugagcauccccaacuucaaccaguacgaggccauguccugcgacuucaacgggggcaagaucagcgugcaguacaaccucucccacagcuucgcgguggacgccgccaaccacugcgggacgaucgccaacggcguccugcagaccuucaugcggauggcguggggcggguccuacaucgcccuggacagcggcaaggggaacugggacugcaucaugaccuccuaccaguaccucaucauccagaacaccacgugggaggaccacugccaguucagccgccccucccccaucggcuaccuggggcugcucagccagcggacccgcgacaucuacaucagccggcgccugcugggcaccuucaccuggacgcucuccgacagcgagggcaacgaggcccccgggggcuacugccugacccgguggaugcugaucgaggccgagcucaagugcuucgggaacaccgccguggcgaagugcaacgagaagcacgacgaggaguucugcgacaugcugcgccuguucgacuucugcaagcaggccaucaagcggcucaagaccgaggcccagauguccauccagcugaucaacaaggccgugaacgcccugaucaacgaccagcucaucaugaagaaccaccuccgcgacaucaugggcauccccuacugcaacuacagccgguacugguaccugaaccacacggucaccgggaagaccucccugccccgcugcuggcuggugagcaacggcuccuaccugaacgagacccacuucagcgacgacaucgagcagcaggcggacaacaugaucacggagaugcuccagaaggaguacauggaccggcagggcaagaccccgcuggggcugguggaccuguucgucuucuccaccagcuucuaccucaucuccaucuuccugcaccuggugaagaucccgacccaccgccacaucgugggcaagcccugccccaagccccaccggcucaaccacauggggaucugcagcugcggccuguacaagcacccggggguccccgugaaguggaagcgcugaggacuagucccuguucccagagcccacuuuuuuuucuuuuuuugaaauaaaauagccugucuuucagaucuaaaaaaaaaaaaaaaaaaaaaaaaaaaaaaaaaaaaaaaaaaaaaaaaaaaaaaaaaaaaaaaaaaaaaaaaaaaaaaaaaaaaaaaaaaaaaaaaaaaa

SEQ ID NO: 37352 - RNA, 1740 nt, Artificial Sequence
  mRNA product Design a-2 (A100) comprising derived and/or modified sequence from LASV(GA391;Clade III)__CAA36645__GPCmut10 (opt1)
aggagaguccgcucagccagguugcagaagcggcuuagcguguguccuaaucuucucucugcguguagguaggccugugccgcaaacaagcuuaccaugggccagaucgugaccuucuuccaggaggucccccacgugaucgaggaggugaugaacaucguccugaucgcccucagcauccuggccauccugaaggggcucuacaacguggcgaccugcggccugaucgggcuggugaccuuccuccugcuguccggccgcagcugcucccucaucuacaaggggaccuacgagcugcagacccuggagcucaacauggagacccugaacaugugcaugccgcugagcugcacgaagaacaacucccaccacuacauccgggucggcaacgagaccggccucgagcugacccugaccaacacgagcauccucaaccacaaguucugcaaccuguccgacgcccacaagcgcaaccuguacgaccacagccucauguccaucaucagcaccuuccaccuguccauccccaacuucaaccaguacgaggccaugagcugcgacuucaacgggggcaagaucaccgugcaguacaaccugucccacagcuucgccguggacgccgcggggcacugcggcacccucgccaacgggguccugcagacguucaugcggauggccuggggcggcuccuacaucgcccuggacagcgggcgcggcaacugggacugcaucaugaccuccuaccaguaccucaucauccagaacaccaccugggacgaccacugccaguucagccggcccucccccaucggguaccugggccugcucagccagcgcacgcgggacaucuacaucagccgccggcugcugggcaccuucaccuggacccucuccgacagcgaggggaacgagacgccgggcggguacugccugacccgcuggaugcugaucgaggcggagcucaagugcuucggcaacaccgccguggccaagugcaacgagaagcacgacgaggaguucugcgacaugcugcggcuguucgacuucugcaagcaggccauccgccggcucaagaccgaggcccagauguccauccagcugaucaacaaggcggugaacgcccugaucaacgaccagcucaucaugaagaaccaccuccgcgacaucauggggauccccuacugcaacuacagccgguacugguaccugaaccacacguccaccggcaagaccagccugccccgcugcuggcugaucuccaacggcagcuaccugaacgagaccaaguucuccgacgacaucgagcagcaggccgacaacaugaucacggagaugcugcagaaggaguacaucgaccggcaggggaagacgccccucggccuggucgaccuguucguguucagcaccuccuucuaccucaucagcaucuuccugcaccuggugaagaucccgacccaccgccacaucgucgggaagcccugccccaagccccaccggcucaaccacaugggcaucugcuccugcgggcuguacaagcagccgggcgugcccgugcgcuggaagcggugaggacuagucccuguucccagagcccacuuuuuuuucuuuuuuugaaauaaaauagccugucuuucagaucuaaaaaaaaaaaaaaaaaaaaaaaaaaaaaaaaaaaaaaaaaaaaaaaaaaaaaaaaaaaaaaaaaaaaaaaaaaaaaaaaaaaaaaaaaaaaaaaaaaaa

SEQ ID NO: 37353 - RNA, 1743 nt, Artificial Sequence
  mRNA product Design a-2 (A100) comprising derived and/or modified sequence from LASV(AV;Clade V)__CCA30314__GPCmut10 (opt1)
aggagaguccgcucagccagguugcagaagcggcuuagcguguguccuaaucuucucucugcguguagguaggccugugccgcaaacaagcuuaccaugggccagaucgugaccuucuuccaggaggucccccacgugaucgaggaggugaugaacaucguccugaucgcccucagcauccuggccgugcugaaggggcucuacaacaucgcgaccugcggccugaucgggcugaucacguuccuccugcugugcggccgcuccugcagcuccaaccucuacaaggggguguacgagcugcagagccuggaccucaacauggagacccugaacaugugcaugccgcuguccugcaccaagaacaacagccaccacuacauccgggucggcaacgacaccggccucgagcugacgcugaccaacaccuccauccucaaccacaaguucugcaaccugagcgacgcccacaagaaggaccuguacgaccacgcccucauguccaucaucagcaccuuccaccuguccauccccaacuucaaccaguacgaggccaugagcugcgacuucaacgggggcaagaucuccgugcaguacaaccugagccacuccuacgccaucgacgcggccaaccacugcgggacgguggccaacggcauccuccagaccuucaugcgcauggccuggggcgggagcuacaucgcgcuggacuccggccgggggaacugggacugcaucaugaccagcuaccaguaccugaucauccagaacaccacgugggagaaccacugccaguucucccgccccagccccaucggcuaccucgggcugcugagccagcggacccgcgacaucuacaucucccggcgccuccugggcaccuucaccuggacgcugagcgacuccgagggcaacgccacccccgggggcuacugccucacccgguggaugcugaucgaggccgagcugaagugcuucgggaacaccgccgucgccaagugcaacgagaagcacgacgaggaguucugcgacaugcuccgccuguucgacuucugcaagcaggcgaucagccggcugaaguccgaggcccagaugagcauccagcucaucaacaaggccgugaacgcccugaucaacgaccagcugaucaugaagaaccaccuccgcgacaucaugggcauccccuacugcaacuacuccaaguacugguaccugaaccacacgaucaccgggaagaccagccugcccaagugcuggcucguguccaacggcagcuaccugaacgagacccacuucuccgacgacaucgagcagcaggccgacaacaugaucacggagaugcugcagaaggaguacauggagcggcagggcaagaccccgcuggggcucgucgaccuguucguguucagcaccuccuucuaccugaucagcaucuuccuccgccuggugaagaucccgacccaccggcacaucgucggcaagcccugccccaagccccaccgccugaaccacauggggaucugcuccugcggccucuacaagcagccgggggugcccgugcgguggaagcgcugaggacuagucccuguucccagagcccacuuuuuuuucuuuuuuugaaauaaaauagccugucuuucagaucuaaaaaaaaaaaaaaaaaaaaaaaaaaaaaaaaaaaaaaaaaaaaaaaaaaaaaaaaaaaaaaaaaaaaaaaaaaaaaaaaaaaaaaaaaaaaaaaaaaaa

SEQ ID NO: 37354 - RNA, 1740 nt, Artificial Sequence
  mRNA product Design a-2 (A100) comprising derived and/or modified sequence from LASV(Togo/2016/7082;Clade VI)__AMR44577__GPCmut10 (opt1)
aggagaguccgcucagccagguugcagaagcggcuuagcguguguccuaaucuucucucugcguguagguaggccugugccgcaaacaagcuuaccaugggccagaucaucaccuucuuccaggaggugccccacgucaucgaggaggugaugaacaucgugcugaucgcccucagccugcuggccauccucaagggggucuacaacguggcgaccugcggcaucaucgggcuggugacguuccuguuccucugcggccgcuccugcagccugaucuacaagggguccuacgagcugcagacccucgagcugaacauggagacccugaacaugugcaugccgcucagcugcaccaagaacuccagccaccacuacauccgggucggcaacgagacgggccuggagcugacccucaccaacaccuccaucaucaaccacaaguucugcaaccugagcgacgcccacaagcgcaaccuguacgaccacgcccucauguccauccugagcacguuccaccuguccauccccaacuucaaccaguacgaggccaugagcugcgacuucaacgggggcaagaucuccgugcaguacaaccucagccacgccuacgcgguggacgccgccgagcacugcgggaccgucgccaacggcgugcugcagaccuucaugcggauggcguggggcggguccuacaucgcccuggacagcggccgcgggaacugggacugcaucaugaccuccuaccaguaccucaucauccagaacacgaccugggaggaccacugccaguucagccggcccucccccaucggcuaccuggggcugcucagccagcgcacccgggacaucuacaucagccgccggcugcugggcaccuucacguggacccucuccgacagcgagggcaacgagacccccgggggcuacugccugacccgcuggaugcugaucgaggccgagcucaagugcuucgggaacacggccguggccaagugcaacgagaagcacgacgaggaguucugcgacaugcugcggcuguucgacuucugcaagcaggcgauccagcgccucaaguccgaggcccagaugagcauccagcugaucaacaaggccgucaacgcccugaucaacgaccagcucaucaugaagaaccaccuccgggacaugaugggcauccccuacugcaacuacuccaaguacugguaccugaaccacaccagcuccgggcgcaccagccugcccaagugcuggcugguguccaacggcagcuaccugaacgagacccacuucuccgacgacaucgagcagcaggccgacaacaugaucacggagaugcuccagaaggaguacaucgaccggcagggcaagaccccgcuggggcugguggaccuguucgucuucagcaccuccuucuaccucaucagcaucuuccugcaccugaucaagaucccgacccaccgccacaucgugggcaagcccugccccaagccccaccggcucaaccacauggggaucugcuccugcggccuguacaagcagccgggggugcccacgcgcuggaagcggugaggacuagucccuguucccagagcccacuuuuuuuucuuuuuuugaaauaaaauagccugucuuucagaucuaaaaaaaaaaaaaaaaaaaaaaaaaaaaaaaaaaaaaaaaaaaaaaaaaaaaaaaaaaaaaaaaaaaaaaaaaaaaaaaaaaaaaaaaaaaaaaaaaaaa

SEQ ID NO: 37355 - RNA, 1740 nt, Artificial Sequence
  mRNA product Design a-2 (A100) comprising derived and/or modified sequence from LASV(KAK-428;Clade n.d. (VII))__ANH09740__GPCmut10 (opt1)
aggagaguccgcucagccagguugcagaagcggcuuagcguguguccuaaucuucucucugcguguagguaggccugugccgcaaacaagcuuaccaugggccagaucgugaccuucuuccaggaggucccccacgugaucgaggaggugaugaacaucguccugaucgcccucagccugcuggccauccucaaggggcuguacaacuucgcgaccugcggcgugaucgggcugaucacguuccuccugcugugcggccgcuccugcagcgccaccuacaaggggcaguacgagcuccagacccuggagcugaacauggagucccucaacaugugcaugccgcugagcugcaccaagaacaacucccaccacuacauccgggccggcaacaacacgggccuggagcucacccugaccaacaccagcaucaucucccacaaguucugcaaccugagcgacgcccacaagaagaaccucuacgaccacacgcugauguccaucaucaccaccuuccaccugagcauccccaacuucaaccaguacgaggccauguccugcgacuucaacgggggcaagaucagcauccaguacaaccucucccacagcuacgcgggggacgccgcccagcacugcggcaccguggccaacgggguccugcagacguucaugcgcauggcguggggcggcuccuaccuggcccucgacagcgggcggcgcggcugggacugcaucaucuccagcuaccaguaccugaucauccagaacaccaccugggacgaccacugccaguucucccggcccagccccaucggguaccugggcuucgugagccagaagacccgcgacaucuacaucucccggcgccuccugggcacguucaccuggacccugagcgacuccgaggggcacgacaugccgggcggguacugccucacccgguggaugcugaucgaggccgaccugaagugcuucggcaacacggccguggccaagugcaacgagaagcacgacgaggaguucugcgacauguggcgccucuucgacuucugcaagcaggcgauccagcggcugaaggccgaggcccagaugaacauccagcugaucaacaaggccgucaacgcccucaucaacgaccagcugaugaugaagaaccaccuccgcgacaucauggggauccccuacugcaacuacagcaaguucugguaccugaacaacaccaccaccggccggacgucccugccccgcugcuggcugaucagcaacggcuccuaccucaacgagacccacuucagcgacgacaucgagcagcaggcggacaacaugaucaccgagaugcugcagaaggaguacauggaccggcaggggaagacgccccugggccucguggaccuguucguguucuccaccagcuucuaccugaucaccaucuuccugcaccucgucaagaucccgacccaccgccacaucguggggaagcccugccccaagccccaccggcugaaccacaugggcaucugcuccugcgggcuguacaagcagccgggcgugcccguccgcuggaagcggugaggacuagucccuguucccagagcccacuuuuuuuucuuuuuuugaaauaaaauagccugucuuucagaucuaaaaaaaaaaaaaaaaaaaaaaaaaaaaaaaaaaaaaaaaaaaaaaaaaaaaaaaaaaaaaaaaaaaaaaaaaaaaaaaaaaaaaaaaaaaaaaaaaaaa

SEQ ID NO: 37356 - RNA, 1740 nt, Artificial Sequence; identical to SEQ ID NO: 37350
  mRNA product Design a-2 (A100) comprising derived and/or modified sequence from LASV(Pinneo-NIG-1969;Clade I)__AIT17836__GPCmut10 (opt1)

SEQ ID NO: 37357 - RNA, 1740 nt, Artificial Sequence
  mRNA product Design a-2 (A100) comprising derived and/or modified sequence from LASV(ISTH0009-NIG-2011;Clade II)__AIT17404__GPCmut10 (opt1)
aggagaguccgcucagccagguugcagaagcggcuuagcguguguccuaaucuucucucugcguguagguaggccugugccgcaaacaagcuuaccaugggccagaucaucaccuucuuccaggaggugccccacgucaucgaggaggugaugaacaucgugcugaucgcccucagccugcuggccauccucaaggggaucuacaacgucgcgaccugcggccuguucgggcugguguccuuccuccugcugugcggccgcagcugcuccacgaccuacaaggggguguacgagcuccagacccuggagcuggacauggccagccucaacaugugcaugccgcuguccugcaccaagaacaacagccaccacuacaucauggucggcaacgagacgggccuggagcucacccugaccaacaccuccaucaucaaccacaaguucugcaaccugagcgacgcccacaagaagaaccucuacgaccacgcccugauguccaucaucagcacguuccaccuguccauccccaacuucaaccaguacgaggccaugagcugcgacuucaacgggggcaagaucuccgugcaguacaaccucagccacgcguacgccguggacgccgccaaccacugcgggaccaucgcgaacggcguccugcagaccuucaugcggauggccuggggcggguccuacaucgcccuggacagcggcaagggguccugggacugcaucaugaccagcuaccaguaccucaucauccagaacacgaccugggaggaccacugccaguucucccgccccagccccaucggcuaccuggggcugcucagccagcggacccgcgacaucuacaucucccggcgccugcugggcaccuucacguggacccucagcgacuccgagggcaacgagacccccgggggcuacugccugacccgguggaugcugaucgaggccgagcucaagugcuucgggaacacggccguggcgaagugcaacgagaagcacgacgaggaguucugcgacaugcugcgccuguucgacuucugcaagcaggccauccggcgccucaagaccgaggcccagaugagcauccagcugaucaacaaggccgugaacgcccugaucaacgaccagcucaucaugaagaaccaccuccgggacaucaugggcauccccuacugcaacuacuccaaguacugguaccugaaccacaccgucaccgggaagacgagccugccccgcugcuggcugguguccaacggcagcuaccugaacgagacccacuucuccgacgacaucgagcagcaggcggacaacaugaucaccgagcuccugcagaaggaguacauggaccggcagggcaagaccccgcuggggcugguggaccucuucgucuucagcacguccuucuaccugaucagcaucuuccugcaccucaucaagaucccgacccaccgccacaucaccggcaagcccugccccaagccccaccggcugaaccacauggggaucugcuccugcggccuguacaagcacccgggggugcccgugaaguggaagcgcugaggacuagucccuguucccagagcccacuuuuuuuucuuuuuuugaaauaaaauagccugucuuucagaucuaaaaaaaaaaaaaaaaaaaaaaaaaaaaaaaaaaaaaaaaaaaaaaaaaaaaaaaaaaaaaaaaaaaaaaaaaaaaaaaaaaaaaaaaaaaaaaaaaaaa

SEQ ID NO: 37358 - RNA, 1740 nt, Artificial Sequence
  mRNA product Design a-2 (A100) comprising derived and/or modified sequence from LASV(ISTH2010-NIG-2012;Clade II)__AIT17482__GPCmut10 (opt1)
aggagaguccgcucagccagguugcagaagcggcuuagcguguguccuaaucuucucucugcguguagguaggccugugccgcaaacaagcuuaccaugggccagaucaucaccuucuuccaggaggugccccacgucaucgaggaggugaugaacaucgugcugaucgcccucagccugcuggccauccucaaggggaucuacaacgucgcgaccugcggccuguucgggcugguguccuuccuccugcugugcggccgcagcugcuccacgaccuacaaggggguguacgagcuccagacccuggagcuggacauggccagccucaacaugugcaugccgcuguccugcaccaagaacaacagccaccacuacaucauggucggcaacgagacgggccuggagcucacccugaccaacaccuccaucaucaaccacaaguucugcaaccugagcgacgcccacaagaagaaccucuacgaccacgcccugauguccaucaucagcacguuccaccuguccauccccaacuucaaccaguacgaggccaugagcugcgacuucaacgggggcaagaucuccgugcaguacaaccucagccacgcguacgccguggacgccgccaaccacugcgggaccaucgcgaacggcguccugcagaccuucaugcggauggccuggggcggguccuacaucgcccuggacagcggcaagggguccugggacugcaucaugaccagcuaccaguaccucaucauccagaacaucacgugggaggaccacugccaguucucccgccccagccccaucggcuaccuggggcugcucagccagcggacccgcgacaucuacaucucccggcgccugcugggcaccuucaccuggacgcucagcgacuccgagggcaacgagacccccgggggcuacugccugacccgguggaugcugaucgaggccgagcucaagugcuucgggaacaccgccguggcgaagugcaacgagaagcacgacgaggaguucugcgacaugcugcgccuguucgacuucugcaagcaggccauccggcgccucaagacggaggcccagaugagcauccagcugaucaacaaggccgugaacgcccugaucaacgaccagcucaucaugaagaaccaccuccgggacaucaugggcauccccuacugcaacuacuccaaguacugguaccugaaccacaccgucaccgggaagaccagccugccccgcugcuggcugguguccaacggcagcuaccugaacgagacgcacuucuccgacgacaucgagcagcaggcggacaacaugaucaccgagcuccugcagaaggaguacaucgaccggcagggcaagaccccgcuggggcugguggaccucuucgucuucagcaccuccuucuaccugaucagcaucuuccugcaccucgugaagaucccgacgcaccgccacguggucggcaagcccugccccaagccccaccggcugaaccacauggggaucugcuccugcggccuguacaagcacccgggggugcccgugaaguggaagcgcugaggacuagucccuguucccagagcccacuuuuuuuucuuuuuuugaaauaaaauagccugucuuucagaucuaaaaaaaaaaaaaaaaaaaaaaaaaaaaaaaaaaaaaaaaaaaaaaaaaaaaaaaaaaaaaaaaaaaaaaaaaaaaaaaaaaaaaaaaaaaaaaaaaaaa

SEQ ID NO: 37359 - RNA, 1740 nt, Artificial Sequence
  mRNA product Design a-2 (A100) comprising derived and/or modified sequence from LASV(Lassa virus/H.sapiens-wt/NGA/2015/ISTH_0543;Clade II)__AVO03639__GPCmut10 (opt1)
aggagaguccgcucagccagguugcagaagcggcuuagcguguguccuaaucuucucucugcguguagguaggccugugccgcaaacaagcuuaccaugggccagaucaucaccuucuuccaggaggugccccacgucaucgaggaggugaugaacaucgugcugaucgcccucagccugcuggccauccucaaggggaucuacaacgucgcgaccugcggccuguucgggcugguguccuuccuccugcugugcggccgcagcugcuccacgaccuacaaggggguguacgagcuccagacccuggagcuggacauggccaaccucaacaugugcaugccgcugagcugcaccaagaacaacucccaccacuacaucauggucggcaacgagacgggccuggagcucacccugaccaacaccagcaucaucaaccacaaguucugcaaccuguccgacgcccacaagaagaaccucuacgaccacgcccugaugagcaucaucuccacguuccaccugagcauccccaacuucaaccaguacgaggccauguccugcgacuucaacgggggcaagaucagcgugcaguacaaccucucccacaccuacgcgguggacgccgccaaccacugcgggaccaucgccaacggcguccugcagaccuucaugcggauggcguggggcgggagcuacaucgcccuggacuccggcaaggggagcugggacugcaucaugacguccuaccaguaccucgugauccagaacaccaccugggaggaccacugccaguucagccgccccucccccaucggcuaccuggggcugcucagccagcggacccgcgacaucuacaucagccggcgccugcugggcacguucaccuggacccucuccgacagcgagggcaacgagacccccgggggcuacugccugacgcgguggaugcugaucgaggccgagcucaagugcuucgggaacaccgccguggccaagugcaacgagaagcacgacgaggaguucugcgacaugcugcgccuguucgacuucugcaagcaggcgauccggcgccucaagaccgaggcccagauguccauccagcugaucaacaaggccgucaacgcccugaucaacgaccagcucaucaugaagaaccaccuccgggacaucaugggcaucccguacugcaacuacagcaaguacugguaccugaaccacaccgugacggggaagaccucccugccccgcugcuggcuggugagcaacggcuccuaccugaacgagacccacuucagcgacgacaucgagcagcaggccgacaacaugaucaccgagcuccugcagaaggaguacaucgaccggcagggcaagacgccccuggggcuggucgaccucuucguguucuccaccagcuucuaccugaucuccaucuuccugcaccucgugaagaucccgacccaccgccacaucaccggcaagcccugccccaagccccaccggcugaaccacauggggaucugcagcugcggccuguacaagcacccggggguccccgugaaguggaagcgcugaggacuagucccuguucccagagcccacuuuuuuuucuuuuuuugaaauaaaauagccugucuuucagaucuaaaaaaaaaaaaaaaaaaaaaaaaaaaaaaaaaaaaaaaaaaaaaaaaaaaaaaaaaaaaaaaaaaaaaaaaaaaaaaaaaaaaaaaaaaaaaaaaaaaa

SEQ ID NO: 37360 - RNA, 1740 nt, Artificial Sequence
  mRNA product Design a-2 (A100) comprising derived and/or modified sequence from LASV(Lassa virus/H.sapiens-wt/NGA/2016/ISTH_0009;Clade II)__AVO03571__GPCmut10 (opt1)
aggagaguccgcucagccagguugcagaagcggcuuagcguguguccuaaucuucucucugcguguagguaggccugugccgcaaacaagcuuaccaugggccagaucaucaccuucuuccaggaggugccccacgucaucgaggaggugaugaacaucgugcugaucgcccucagccugcuggccauccucaaggggaucuacaacgucgcgaccugcggccugcuggggcucguguccuuccugcugcucugcggccgcagcugcuccacgaccuacaaggggguguacgagcugcagacccuggagcucgacauggccagccugaacaugugcaugccgcuguccugcaccaagaacaacagccaccacuacaucauggucggcaacgagacgggccucgagcugacccugaccaacaccuccaucaucaaccacaaguucugcaaccucagcgacgcccacaagaagaaccuguacgaccacgcccugauguccaucaucagcacguuccaccucuccauccccaacuucaaccaguacgaggccaugagcugcgacuucaacgggggccggaucuccgugcaguacaaccugagccacuccuacgcgguggacgccgccaaccacugcgggaccaucgccaacggcguccugcagaccuucaugcgcauggcguggggcgggagcuacaucgcccucgacuccggcaaggggagcugggacugcaucaugaccuccuaccaguaccugaucauccagaacacgaccugggaggaccacugccaguucagccggcccagccccaucggcuaccuggggcuccugucccagcgcacccgggacaucuacaucagccgccggcugcucggcaccuucacguggacccuguccgacagcgagggcaacgagacccccgggggcuacugccugacccgcuggaugcucaucgaggccgagcugaagugcuucgggaacacggccguggccaagugcaacgagaagcacgacgaggaguucugcgacaugcugcggcuguucgacuucugcaagcaggcgauccgccggcugaagaccgaggcccagauguccauccagcugaucaacaaggccgugaacgcccucaucaacgaccagcugaucaugaagaaccaccuccgcgacaucaugggcauccccuacugcaacuacagcaaguacugguaccucaaccacaccgucaccgggaagacgucccugccccggugcuggcuggugagcaacggcuccuaccucaacgagacccacuucagcgacgacaucgagcagcaggccgacaacaugaucaccgagcugcugcagaaggaguacaucgaccgccagggcaagaccccgcuggggcucguggaccuguucgucuucuccacgagcuucuaccugaucuccaucuuccuccaccuggugaagaucccgacccaccggcacaucaccggcaagcccugccccaagccccaccgccugaaccacauggggaucugcagcugcggccucuacaaccacccgggggugcccgucaaguggaagcggugaggacuagucccuguucccagagcccacuuuuuuuucuuuuuuugaaauaaaauagccugucuuucagaucuaaaaaaaaaaaaaaaaaaaaaaaaaaaaaaaaaaaaaaaaaaaaaaaaaaaaaaaaaaaaaaaaaaaaaaaaaaaaaaaaaaaaaaaaaaaaaaaaaaaa

SEQ ID NO: 37361 - RNA, 1740 nt, Artificial Sequence
  mRNA product Design a-2 (A100) comprising derived and/or modified sequence from LASV(Lassa virus/H.sapiens-wt/NGA/2016/ISTH_0017;Clade II)__AVO03567__GPCmut10 (opt1)
aggagaguccgcucagccagguugcagaagcggcuuagcguguguccuaaucuucucucugcguguagguaggccugugccgcaaacaagcuuaccaugggccagaucaucaccuucuuccaggaggugccccacgucaucgaggaggugaugaacaucgugcugaucgcccucagccugcuggccauccucaaggggaucuacaacgucgcgaccugcggccuguucgggcugguguccuuccuccugcugugcggccgcagcugcuccacgaccuacaaggggguguacgagcuccagacccuggagcuggacauggccagccucaacaugugcaugccgcuguccugcaccaagaacaacagccaccacuacaucauggucggcaacgagacgggccuggagcucacccugaccaacaccuccaucaucaaccacaaguucugcaaccugagcgacgcccacaagaagaaccucuacgaccacgcccugauguccaucaucagcacguuccaccuguccauccccaacuucaaccaguacgaggccaugagcugcgacuucaacgggggcaagaucuccgugcaguacaaccucagccacaccuacgcgaucgacgccgccaaccacugcgggaccaucgccaacggcgugcugcagaccuucaugcggauggcguggggcggguccuacaucgcccuggacagcggcaagggguccugggacugcaucaugacgagcuaccaguaccucaucauccagaacaccaccugggaggaccacugccaguucucccgccccagccccaucggcuaccuggggcugcucagccagcggacccgcgacaucuacaucucccggcgccugcugggcacguucaccuggacccucagcgacuccgagggcaacgagacccccgggggcuacugccugacgcgguggaugcugaucgaggccgagcucaagugcuucgggaacaccgccgucgccaagugcaacgagaagcacgacgaggaguucugcgacaugcugcgccuguucgacuucugcaagcaggcgauccggcgccucaagaccgaggcccagaugagcauccagcugaucaacaaggccgugaacgcccugaucaacgaccagcucaucaugaagaaccaccuccgggacaucaugggcaucccguacugcaacuacuccaaguacugguaccugaaccacaccgugacggggaagaccagccugccccgcugcuggcuggucuccaacggcagcuaccugaacgagacccacuucuccgacgacaucgagcagcaggccgacaacaugaucaccgagcuccugcagaaggaguacauggaccggcagggcaagacgccccuggggcugguggaccucuucguguucagcaccuccuucuaccugaucagcaucuuccugcaccucguccgcaucccgacccaccggcacgugaucggcaagcccugccccaagccccaccgccugaaccacauggggaucugcuccugcggccuguacaagcacccgggggugcccgucaaguggaagcggugaggacuagucccuguucccagagcccacuuuuuuuucuuuuuuugaaauaaaauagccugucuuucagaucuaaaaaaaaaaaaaaaaaaaaaaaaaaaaaaaaaaaaaaaaaaaaaaaaaaaaaaaaaaaaaaaaaaaaaaaaaaaaaaaaaaaaaaaaaaaaaaaaaaaa

SEQ ID NO: 37362 - RNA, 1740 nt, Artificial Sequence
  mRNA product Design a-2 (A100) comprising derived and/or modified sequence from LASV(Lassa virus/H.sapiens-wt/NGA/2018/ISTH_0959;Clade II)__AVV65099__GPCmut10 (opt1)
aggagaguccgcucagccagguugcagaagcggcuuagcguguguccuaaucuucucucugcguguagguaggccugugccgcaaacaagcuuaccaugggccagaucaucaccuucuuccaggaggugccccacgucaucgaggaggugaugaacaucgugcugaucgcccucagccugcuggccauccucaaggggaucuacaacgucgugaccugcggccuguucgggcugguguccuuccuccugcugugcggccgcagcugcuccacgaccuacaagggggucuacgagcuccagacccuggagcuggacauggcgagccucaacaugugcaugccgcuguccugcaccaagaacaacagccaccacuacaucauggugggcaacgagacgggccuggagcucacccugaccaacaccuccaucaucaaccacaaguucugcaaccugagcgacgcccacaagaagaaccucuacgaccacgcccugauguccaucaucagcacguuccaccuguccauccccaacuucaaccaguacgaggccaugagcugcgacuucaacgggggcaagaucuccgugcaguacaaccucagccacgccuacgcgaucgacgccgccaaccacugcgggaccaucgccaacggcguccugcagaccuucaugcggauggcguggggcggguccuacaucgcccuggacagcggcaagggguccugggacugcaucaugaccagcuaccaguaccucaucauccagaacacgaccugggaggaccacugccaguucucccgccccagccccaucggcuaccuggggcugcucagccagcggacccgcgacaucuacaucucccggcgccugcugggcaccuucacguggacccucagcgacuccgagggcaacgagacccccgggggcuacugccugacccgguggaugcugaucgaggccgagcucaagugcuucgggaacacggccguggccaagugcaacgagaagcacgacgaggaguucugcgacaugcugcgccuguucgacuucugcaagcaggcgauccggcgccucaagaccgaggcccagaugagcauccagcugaucaacaaggccgugaacgcccugaucaacgaccagcucaucaugaagaaccaccuccgggacaucaugggcauccccuacugcaacuacuccaaguacugguaccugaaccacaccgucaccgggaagacgagccugccccgcugcuggcugguguccaacggcagcuaccugaacgagacccacuucuccgacgacaucgagcagcaggccgacaacaugaucaccgagcuccugcagaaggaguacaucgaccggcagggcaagaccccgcuggggcugguggaccucuucgucuucagcacguccuucuaccugaucagcaucuuccugcaccucgugaagaucccgacccaccgccacgugaucggcaagcccugccccaagccccaccggcugaaccacauggggaucugcuccugcggccuguacaagcacccggggguccccgugaaguggaagcgcugaggacuagucccuguucccagagcccacuuuuuuuucuuuuuuugaaauaaaauagccugucuuucagaucuaaaaaaaaaaaaaaaaaaaaaaaaaaaaaaaaaaaaaaaaaaaaaaaaaaaaaaaaaaaaaaaaaaaaaaaaaaaaaaaaaaaaaaaaaaaaaaaaaaaa

SEQ ID NO: 37363 - RNA, 1740 nt, Artificial Sequence
  mRNA product Design a-2 (A100) comprising derived and/or modified sequence from LASV(LASV003-NIG-2008;Clade II)__AIT17580__GPCmut10 (opt1)
aggagaguccgcucagccagguugcagaagcggcuuagcguguguccuaaucuucucucugcguguagguaggccugugccgcaaacaagcuuaccaugggccagaucaucaccuucuuccaggaggugccccacgucaucgaggaggugaugaacaucgugcugaucgcccucagccugcuggccauccucaaggggaucuacaacgucgcgaccugcggccuguucgggcugguguccuuccuccugcugugcggccgcagcugcuccacgaccuacaaggggguguacgagcuccagacccuggagcuggacauggccagccucaacaugugcaugccgcuguccugcaccaagaacaacagccaccacuacaucauggucggcaacgagacgggccuggagcucacccugaccaacaccuccaucaucaaccacaaguucugcaaccugagcgacgcccacaagaagaaccucuacgaccacgcccugauguccaucaucagcacguuccaccuguccauccccaacuucaaccaguacgaggccaugagcugcgacuucaacgggggcaagaucuccgugcaguacaaccucagccacaccuacgcgguggacgccgccaaccacugcgggaccaucgccaacggcguccugcagaccuucaugcggauggcguggggcggguccuacaucgcccuggacagcggcaagggguccugggacugcaucaugacgagcuaccaguaccucaucauccagaacaccaccugggaggaccacugccaguucucccgccccagccccaucggcuaccuggggcugcucagccagcggacccgcgacaucuacaucucccggcgccugcugggcacguucaccuggacccucagcgacuccgagagcaacgagaccccgggcggguacugccugacgcgguggaugcugaucgaggccgagcucaagugcuucggcaacaccgccguggccaagugcaacgagaagcacgacgaggaguucugcgacaugcugcgccuguucgacuucugcaagcaggcgauccggcgccucaaggccgaggcccagauguccauccagcugaucaacaaggccgugaacgcccugaucaacgaccagcucaucaugaagaaccaccuccgggacaucauggggauccccuacugcaacuacagcaaguacugguaccugaaccacaccgucaccggccgcacgucccugccccggugcuggcuggugagcaacggguccuaccugaacgagacccacuucagcgacgacaucgagcagcaggcggacaacaugaucaccgagcuccugcagaaggaguacauggaccgccagggcaagacgccccugggccugguggaccucuucgucuucuccaccagcuucuaccugaucuccaucuuccugcaccucgugaagaucccgacccaccggcacgugaucgggaagcccugccccaagccccaccgccugaaccacaugggcaucugcagcugcgggcuguacaagcacccgggcguccccgugaaguggaagcggugaggacuagucccuguucccagagcccacuuuuuuuucuuuuuuugaaauaaaauagccugucuuucagaucuaaaaaaaaaaaaaaaaaaaaaaaaaaaaaaaaaaaaaaaaaaaaaaaaaaaaaaaaaaaaaaaaaaaaaaaaaaaaaaaaaaaaaaaaaaaaaaaaaaaa

SEQ ID NO: 37364 - RNA, 1740 nt, Artificial Sequence
  mRNA product Design a-2 (A100) comprising derived and/or modified sequence from LASV(LASV035-NIG-2009;Clade II)__AIT17588__GPCmut10 (opt1)
aggagaguccgcucagccagguugcagaagcggcuuagcguguguccuaaucuucucucugcguguagguaggccugugccgcaaacaagcuuaccaugggccagaucaucaccuucuuccaggaggugccccacgucaucgaggaggugaugaacaucgugcugaucgcccucagccugcuggccauccucaaggggaucuacaacgucgcgaccugcggccuguucgggcugguguccuuccuccugcugugcggccgcagcugcuccacgaccuacaaggggguguacgagcuccagacccuggagcuggacauggccagccucaacaugugcaugccgcuguccugcaccaagaacaacagccaccacuacaucauggucggcaacgagacgggccuggagcucacccugaccaacaccuccaucaucaaccacaaguucugcaaccugagcgacgcccacaagaagaaccucuacgaccacgcccugauguccaucaucagcacguuccaccuguccauccccaacuucaaccaguacgaggccaugagcugcgacuucaacgggggcaagaucuccgugcaguacaaccucagccacgcguacgccguggacgccgccaaccacugcgggaccaucgcgaacggcguccugcagaccuucaugcggauggccuggggcggguccuacaucgcccuggacagcggcaagggguccugggacugcaucaugaccagcuaccaguaccucaucauccagaacacgaccugggaggaccacugccaguucucccgccccagccccaucggcuaccuggggcugcucagccagcggacccgcgacaucuacaucucccggcgccugcugggcaccuucacguggacccucagcgacuccgagggcaacgagacccccgggggcuacugccugacccgguggaugcugaucgaggccgagcucaagugcuucgggaacacggccguggcgaagugcaacgagaagcacgacgaggaguucugcgacaugcugcgccuguucgacuucugcaagcaggccauccggcgccucaaggccgaggcccagaugagcauccagcugaucaacaaggccgugaacgcgcugaucaacgaccagcucaucaugaagaaccaccuccgggacaucaugggcauccccuacugcaacuacuccaaguacugguaccugaaccacaccgucaccgggaagaccagccugccccgcugcuggcugguguccaacggcagcuaccugaacgagacgcacuucuccgacgacaucgagcagcaggccgacaacaugaucaccgagcuccugcagaaggaguacaucgaccggcagggcaagaccccgcuggggcugguggaccucuucgucuucagcaccuccuucuaccugaucagcaucuuccugcaccucgugaagaucccgacgcaccgccacgugaucggcaagcccugccccaagccccaccggcugaaccacauggggaucugcuccugcggccuguacaagcacccggggguccccgugaaguggaagcgcugaggacuagucccuguucccagagcccacuuuuuuuucuuuuuuugaaauaaaauagccugucuuucagaucuaaaaaaaaaaaaaaaaaaaaaaaaaaaaaaaaaaaaaaaaaaaaaaaaaaaaaaaaaaaaaaaaaaaaaaaaaaaaaaaaaaaaaaaaaaaaaaaaaaaa

SEQ ID NO: 37365 - RNA, 1740 nt, Artificial Sequence
  mRNA product Design a-2 (A100) comprising derived and/or modified sequence from LASV(LASV1000-NIG-2009;Clade II)__AIT17782__GPCmut10 (opt1)
aggagaguccgcucagccagguugcagaagcggcuuagcguguguccuaaucuucucucugcguguagguaggccugugccgcaaacaagcuuaccaugggccagaucaucaccuucuuccaggaggugccccacgucaucgaggaggugaugaacaucgugcugaucgcccucagccugcuggccauccucaaggggaucuacaacgucgcgaccugcggccuguucgggcugguguccuuccuccugcugugcggccgcagcugcuccacgaccuacaaggggguguacgagcuccagacccuggagcuggacauggccagccucaacaugugcaugccgcuguccugcaccaagaacaacagccaccacuacaucauggucggcaacgagacgggccuggagcucacccugaccaacaccuccaucaucaaccacaaguucugcaaccugagcgacgcccacaagaagaaccucuacgaccacgcccugauguccaucaucagcacguuccaccuguccauccccaacuucaaccaguacgaggccaugagcugcgacuucaacgggggcaagaucuccgugcaguacaaccucagccacaccuacgcgguggacgccgccaaccacugcgggaccaucgccaacggcguccugcagaccuucaugcggauggcguggggcggguccuacaucgcccuggacagcggcaagggguccugggacugcaucaugacgagcuaccaguaccucaucauccagaacaccaccugggaggaccacugccaguucucccgccccagccccaucggcuaccuggggcugcucagccagcggacccgcgacaucuacaucucccggcgccugcugggcacguucaccuggacccucagcgacuccgagggcaacgagacccccgggggcuacugccugacgcgguggaugcugaucgaggccgagcucaagugcuucgggaacaccgccguggccaagugcaacgagaagcacgacgaggaguucugcgacaugcugcgccuguucgacuucugcaagcaggcgaucaagcggcucaagaccgaggcccagaugagcauccagcugaucaacaaggccgugaacgcccugaucaacgaccagcucaucaugaagaaccaccuccgcgacaucaugggcaucccguacugcaacuacuccaaguacugguaccugaaccacaccgucacggggaagaccagccugccccggugcuggcugguguccaacggcagcuaccugaacgagacccacuucuccgacgacaucgagcagcaggccgacaacaugaucaccgagcuccugcagaaggaguacaucgaccgccagggcaagacgccccuggggcugguggaccucuucgucuucagcaccuccuucuaccugaucagcaucuuccugcaccucgugaagaucccgacccaccggcacguggucggcaagcccugccccaagccccaccgccugaaccacauggggaucugcuccugcggccuguacaagcacccgggggugcccgugaaguggaagcggugaggacuagucccuguucccagagcccacuuuuuuuucuuuuuuugaaauaaaauagccugucuuucagaucuaaaaaaaaaaaaaaaaaaaaaaaaaaaaaaaaaaaaaaaaaaaaaaaaaaaaaaaaaaaaaaaaaaaaaaaaaaaaaaaaaaaaaaaaaaaaaaaaaaaa

SEQ ID NO: 37366 - RNA, 1740 nt, Artificial Sequence
  mRNA product Design a-2 (A100) comprising derived and/or modified sequence from LASV(LASV221-NIG-2010;Clade II)__AIT17624__GPCmut10 (opt1)
aggagaguccgcucagccagguugcagaagcggcuuagcguguguccuaaucuucucucugcguguagguaggccugugccgcaaacaagcuuaccaugggccagaucaucaccuucuuccaggaggugccccacgucaucgaggaggugaugaacaucgugcugaucgcccucagccugcuggccauccucaaggggaucuacaacgucgcgaccugcggccuguucgggcugguguccuuccuccugcugugcggccgcagcugcuccacgaccuacaaggggguguacgagcuccagacccuggagcuggacauggccagccucaacaugugcaugccgcuguccugcaccaagaacaacagccaccacuacaucauggucggcaacgagacgggccuggagcucacccugaccaacaccuccaucaucaaccacaaguucugcaaccugagcgacgcccacaagaagaaccucuacgaccacgcccugauguccaucaucagcacguuccaccuguccauccccaacuucaaccaguacgaggccaugagcugcgacuucaacgggggcaagaucuccgugcaguacaaccucagccacaccuacgcgaucgacgccgccaaccacugcgggaccaucgccaacggcgugcugcagaccuucaugcggauggcguggggcggguccuacaucgcccuggacagcggcaagggguccugggacugcaucaugacgagcuaccaguaccucaucauccagaacaccaccugggaggaccacugccaguucucccgccccagccccaucggcuaccuggggcugcucagccagcggacccgcgacaucuacaucucccggcgccugcugggcacguucaccuggacccucagcgacuccgagggcaacgagacccccgggggcuacugccugacgcgguggaugcugaucgaggccgagcucaagugcuucgggaacaccgccgucgccaagugcaacgagaagcacgacgaggaguucugcgacaugcugcgccuguucgacuucugcaagcaggcgauccggcgccucaagaccgaggcccagaugagcauccagcugaucaacaaggccgugaacgcccugaucaacgaccagcucaucaugaagaaccaccuccgggacaucaugggcaucccguacugcaacuacuccaaguacugguaccugaaccacaccgugacggggaagaccagccugccccgcugcuggcuggucuccaacggcagcuaccugaacgagacccacuucuccgacgacaucgagcagcaggccgacaacaugaucaccgagaugcuccagaaggaguacauggaccggcagggcaagacgccccuggggcugguggaccuguucguguucagcaccuccuucuaccucaucagcaucuuccugcaccuggucaagaucccgacccaccgccacgugaucggcaagcccugccccaagccccaccggcucaaccacauggggaucugcuccugcggccuguacaagcacccgggggugcccgucaaguggaagcgcugaggacuagucccuguucccagagcccacuuuuuuuucuuuuuuugaaauaaaauagccugucuuucagaucuaaaaaaaaaaaaaaaaaaaaaaaaaaaaaaaaaaaaaaaaaaaaaaaaaaaaaaaaaaaaaaaaaaaaaaaaaaaaaaaaaaaaaaaaaaaaaaaaaaaa

SEQ ID NO: 37367 - RNA, 1740 nt, Artificial Sequence
  mRNA product Design a-2 (A100) comprising derived and/or modified sequence from LASV(LASV237-NIG-2010;Clade II)__AIT17638__GPCmut10 (opt1)
aggagaguccgcucagccagguugcagaagcggcuuagcguguguccuaaucuucucucugcguguagguaggccugugccgcaaacaagcuuaccaugggccagaucaucaccuucuuccaggaggugccccacgucaucgaggaggugaugaacaucgugcugaucgcccucagccugcuggccauccucaaggggaucuacaacgucgcgaccugcggccuguucgggcugguguccuuccuccugcugugcggccgcagcugcuccacgaccuacaaggggguguacgagcuccagacccuggagcuggacauggccagccucaacaugugcaugccgcuguccugcaccaagaacaacagccaccacuacaucauggucggcaacgagacgggccuggagcucacccugaccaacaccuccaucaucaaccacaaguucugcaaccugagcgacgcccacaagaaggaccucuacgaccacgcccugauguccaucaucagcacguuccaccuguccauccccaacuucaaccaguacgaggccaugagcugcgacuucaacgggggcaagaucuccgugcaguacaaccucagccacaccuacgcgguggacgccgccaaccacugcgggaccaucgccaacggcguccugcagaccuucaugcggauggcguggggcggguccuacaucgcccuggacagcggcaagggguccugggacugcaucaugacgagcuaccaguaccucaucauccagaacaccaccugggaggaccacugccaguucucccgccccagccccaucggcuaccuggggcugcucagccagcggacccgcgacaucuacaucucccggcgccugcugggcacguucaccuggacccucagcgacuccgagggcaacgagacccccgggggcuacugccugacgcgguggaugcugaucgaggccgagcucaagugcuucgggaacaccgccguggccaagugcaacgagaagcacgacgaggaguucugcgacaugcugcgccuguucgacuucugcaagcaggcgauccggcgccucaagaccgaggcccagaugagcauccagcugaucaacaaggccgugaacgcccugaucaacgaccagcucaucaugaagaaccaccuccgggacaucaugggcaucccguacugcaacuacuccaaguacugguaccugaaccacaccgucacggggaagaccagccugccccgcugcuggcugguguccaacggcagcuaccugaacgagacccacuucuccgacgacaucgagcagcaggccgacaacaugaucaccgagcuccugcagaaggaguacauggaccggcagggcaagacgccccuggggcugguggaccucuucgucuucagcaccuccuucuaccugaucagcaucuuccugcaccucaucaagaucccgacccaccgccacaucaccggcaagcccugccccaagccccaccggcugaaccacauggggaucugcuccugcggccuguacaagcacccgggggugcccgugaaguggaagcgcugaggacuagucccuguucccagagcccacuuuuuuuucuuuuuuugaaauaaaauagccugucuuucagaucuaaaaaaaaaaaaaaaaaaaaaaaaaaaaaaaaaaaaaaaaaaaaaaaaaaaaaaaaaaaaaaaaaaaaaaaaaaaaaaaaaaaaaaaaaaaaaaaaaaaa

SEQ ID NO: 37368 - RNA, 1740 nt, Artificial Sequence
  mRNA product Design a-2 (A100) comprising derived and/or modified sequence from LASV(LASV253-NIG-2011;Clade II)__AIT17670__GPCmut10 (opt1)
aggagaguccgcucagccagguugcagaagcggcuuagcguguguccuaaucuucucucugcguguagguaggccugugccgcaaacaagcuuaccaugggccagaucaucaccuucuuccaggaggugccccacgucaucgaggaggugaugaacaucgugcugaucgcccucagccugcuggccauccucaaggggaucuacaacgucgcgaccugcggccuguucgggcugguguccuuccuccugcugugcggccgcagcugcuccacgaccuacaaggggguguacgagcuccagacccuggagcuggacauggccagccucaacaugugcaugccgcuguccugcaccaagaacaacagccaccacuacaucauggucggcaacgagacgggccuggagcucacccugaccaacaccuccaucaucaaccacaaguucugcaaccugagcgacgcccacaagaagaaccucuacgaccacgcccugauguccaucaucagcacguuccaccuguccauccccaacuucaaccaguacgaggccaugagcugcgacuucaacgggggcaagaucuccgugcaguacaaccucagccacaccuacgcgguggacgccgccaaccacugcgggaccaucgccaacggcguccugcagaccuucaugcggauggcguggggcggguccuacaucgcccuggacagcggcaagggguccugggacugcaucaugacgagcuaccaguaccucaucauccagaacaccaccugggaggaccacugccaguucucccgccccagccccaucggcuaccuggggcugcucagccagcggacccgcgacaucuacaucucccggcgccugcugggcacguucaccuggacccucagcgacuccgagggcaacgagacccccgggggcuacugccugacgcgguggaugcugaucgaggccgagcucaagugcuucgggaacaccgccguggccaagugcaacgagaagcacgacgaggaguucugcgacaugcugcgccuguucgacuucugcaagcaggcgauccggcgccucaaggccgaggcccagaugagcauccagcugaucaacaaggccgugaacgcccugaucaacgaccagcucaucaugaagaaccaccuccgggacaucaugggcauccccuacugcaacuacuccaaguacugguaccugaaccacaccgucaccgggcgcacgagccugccccggugcuggcugguguccaacggcagcuaccugaacgagacccacuucuccgacgacaucgagcagcaggcggacaacaugaucaccgagcuccugcagaaggaguacaucgaccgccagggcaagaccccgcuggggcugguggaccucuucgucuucagcacguccuucuaccugaucagcaucuuccugcaccucgugaagaucccgacccaccggcacaucaucggcaagcccugccccaagccccaccgccugaaccacauggggaucugcuccugcggccuguacaagcacccgggggugcccgucaaguggaagcggugaggacuagucccuguucccagagcccacuuuuuuuucuuuuuuugaaauaaaauagccugucuuucagaucuaaaaaaaaaaaaaaaaaaaaaaaaaaaaaaaaaaaaaaaaaaaaaaaaaaaaaaaaaaaaaaaaaaaaaaaaaaaaaaaaaaaaaaaaaaaaaaaaaaaa

SEQ ID NO: 37369 - RNA, 1740 nt, Artificial Sequence
  mRNA product Design a-2 (A100) comprising derived and/or modified sequence from LASV(LASV254-NIG-2011;Clade II)__AIT17674__GPCmut10 (opt1)
aggagaguccgcucagccagguugcagaagcggcuuagcguguguccuaaucuucucucugcguguagguaggccugugccgcaaacaagcuuaccaugggccagaucaucaccuucuuccaggaggugccccacgucaucgaggaggugaugaacaucgugcugaucgcccucagccugcuggccauccucaaggggaucuacaacgucgcgaccugcggccuguucgggcugguguccuuccuccugcugugcggccgcagcugcuccacgaccuacaaggggguguacgagcuccagacccuggagcuggacaugaccaaccucaacaugugcaugccgcugagcugcacgaagaacaacucccaccacuacaucauggucggcaacgagaccggccuggagcucacccugaccaacacgagcaucaucaaccacaaguucugcaaccuguccgacgcccacaagaagaaccucuacaaccacgcccugaugagcaucaucuccaccuuccaccugagcauccccaacuucaaccaguacgaggccauguccugcgacuucaacgggggcaagaucagcgugcaguacaaccucucccacagcuacgccguggacgcggccaaccacugcgggaccaucgccaacggcguccugcagaccuucaugcggauggccuggggcggguccuacaucgcgcuggacagcggcaaggggaacugggacugcaucaugacguccuaccaguaccucaucauccagaacaccaccugggaggaccacugccaguucagccgccccucccccaucggcuaccuggggcugcucagccagcggacccgcgacaucuacaucagccggcgccugcugggcacguucaccuggacccucuccgacagcgagggcaacgagacccccgggggcuacugccugacgcgguggaugcugaucgaggccgagcucaagugcuucgggaacaccgccguggccaagugcaacgagaagcacgacgaggaguucugcgacaugcugcgccuguucgacuucugcaagcaggccauccggcgccucaagaccgaggcgcaggccaacauccagcugaucaacaaggccgugaacgcccugaucaacgaccagcucaucaugaagaaccaccuccgggacaucaugggcaucccguacugcaacuacuccaaguacugguaccugaaccacaccgucacggggaagaccagccugccccgcugcuggcugguguccaacggcagcuaccugaacgagacccacuucuccgacgacaucgagcagcaggccgacaacaugaucaccgagcuccugcagaaggaguacauggaccggcagggcaagacgccccuggggcugguggaccucuucgucuucagcaccuccuucuaccugaucagcaucuuccugcaccucgugaagaucccgacccaccgccacgugaucggcaagcccugccccaagccccaccggcugaaccacauggggaucugcuccugcggccuguacaagcacccggggguccccgugaaguggaagcgcugaggacuagucccuguucccagagcccacuuuuuuuucuuuuuuugaaauaaaauagccugucuuucagaucuaaaaaaaaaaaaaaaaaaaaaaaaaaaaaaaaaaaaaaaaaaaaaaaaaaaaaaaaaaaaaaaaaaaaaaaaaaaaaaaaaaaaaaaaaaaaaaaaaaaa

SEQ ID NO: 37370 - RNA, 1740 nt, Artificial Sequence
  mRNA product Design a-2 (A100) comprising derived and/or modified sequence from LASV(Nig08-A19;Clade III)__ADU56618__GPCmut10 (opt1)
aggagaguccgcucagccagguugcagaagcggcuuagcguguguccuaaucuucucucugcguguagguaggccugugccgcaaacaagcuuaccaugggccagaucgugaccuucuuccaggaggucccccacgugaucgaggaggugaugaacaucguccugaucgcccucagcauccuggccauccugaaggggcucuacaacaucgcgaccugcggccugaucgggcuggugacguuccuccugcuguccggccgcagcugcuccaugaccuacaaggggguguacgagcuccagacccuggagcugaacaugaacacccucaacaugugcaugccgcugagcugcacgaagaacaacucccaccacuacaucauggucggcaacgagaccggccuggagcucacccugaccaacacgagccugcuccaccacaaguucugcaaccuguccgacgcccacaagaagaaccuguacgaccacacccucaugagcaucaucuccaccuuccaccugagcauccccaacuucaaccaguacgaggccauguccugcgacuucaacgggggcaagaucaccgugcaguacaaccugagccacuccuacgccaucgacgccgcgaaccacugcgggacgguggccaacggcguccuccagaccuucaugcggauggccuggggcgggagcuacaucgcccuggacuccggccgcgggaagugggacugcaucaugaccagcuaccaguaccugaucauccagaacaccacgugggaggaccacugccaguucucccggcccagccccaucggcuaccucgggcugcugucccagcgcacccgggacaucuacaucagccgccggcuccugggcaccuucaccuggacgcugagcgacuccgagggcaacgagacccccgggggcuacugccucacccgcuggaugcugaucgaggcggagcugaagugcuucgggaacaccgccguggccaagugcaacgagaagcacgacgaggaguucugcgacaugcuccggcuguucgacuucugcaagcaggccauccgccggcugaaggccgaggcgcagaugagcauccagcucaucaacaaggccgugaacgcccugaucaacgaccagcugaucaugaagaaccaccuccgcgacaucaugggcauccccuacugcaacuacuccaaguacugguaccugaaccacacgagcaccgggcggaccucccugccccgcugcuggcucgucagcaacggcuccuaccugaacgagacccacuucagcgacgacaucgagcagcaggccgacaacaugaucacggagaugcugcagaaggaguaccuggaccggcagggcaagaccccgcucgggcugguggaccuguucguguucuccaccagcuucuaccucaucuccaucuuccugcaccuggucaagaucccgacccaccgccacaucgugggcaagcccugccccaagccccaccggcucaaccacauggggaucugcagcugcggccuguacaagcagccgggggugcccguccgcuggaagcggugaggacuagucccuguucccagagcccacuuuuuuuucuuuuuuugaaauaaaauagccugucuuucagaucuaaaaaaaaaaaaaaaaaaaaaaaaaaaaaaaaaaaaaaaaaaaaaaaaaaaaaaaaaaaaaaaaaaaaaaaaaaaaaaaaaaaaaaaaaaaaaaaaaaaa

SEQ ID NO: 37371 - RNA, 1743 nt, Artificial Sequence
  mRNA product Design a-2 (A100) comprising derived and/or modified sequence from LASV(G1180-SLE-2010;Clade IV)__AIT17168__GPCmut10 (opt1)
aggagaguccgcucagccagguugcagaagcggcuuagcguguguccuaaucuucucucugcguguagguaggccugugccgcaaacaagcuuaccaugggccagaucgugaccuucuuccaggaggucccccacgugaucgaggaggugaugaacaucguccugaucgcccucagcauccuggccgugcugaaggggcucuacaacuucgcgaccugcggccugguggggcugcucacguuccugcugcucugcggccgcuccugcaccgccagccgguacaagggggucuacgagcugcagacccuggagcucaacauggagacccugaacaugugcaugccgcuguccugcacgaagaacaacagccaccacuacaucauggugggcaacgagaccggccucgagcugacccugaccaacacguccaucaucaaccacaaguucugcaaccucagcgacgcccacaagaagaaccuguacgaccacgcccugauguccaucaucagcaccuuccaccucuccauccccaacuucaaccaguacgaggccaugagcugcgacuucaacgggggcaagaucuccgugcaguacaaccugagccacuccuacgcgggggacgccgccaaccacugcggcaccgucgccaacggggugcugcagaccuucaugcgcauggcguggggcggcagcuacaucgcccucgacuccgggcacggcagcugggacugcaucaugacguccuaccaguaccugaucauccagaacaccaccugggaggaccacugccaguucagccggcccucccccaucggguaccugggccuccugagccagcgcacccgggacaucuacaucagccgccggcugcucggcacguucaccuggacccuguccgacagcgaggggaaggacaccccgggcggguacugccugacgcgcuggaugcucaucgaggccgagcugaagugcuucggcaacaccgccguggccaagugcaacgagaagcacgacgaggaguucugcgacaugcugcggcuguucgacuucugcaagcaggcgauccagcgccugaaggccgaggcccagauguccauccagcugaucaacaaggccgucaacgcccucaucaacgaccagcugaucaugaagaaccaccuccgggacaucauggggauccccuacugcaacuacagcaaguacugguaccucaaccacaccaccacgggcaagaccucccugcccaagugcuggcuggugagcaacggcuccuaccucaacgagacccacuucagcgacgacaucgagcagcaggcggacaacaugaucaccgagaugcugcagaaggaguacauggagcgccaggggaagacgccccugggccugguggaccucuucgucuucuccaccagcuucuaccugaucuccaucuuccugcaccucgugaagaucccgacccaccggcacaucgugggcaagagcugccccaagccccaccgccugaaccacauggggaucugcuccugcgggcuguacaagcagcccggcgucccggugaaguggaagcggugaggacuagucccuguucccagagcccacuuuuuuuucuuuuuuugaaauaaaauagccugucuuucagaucuaaaaaaaaaaaaaaaaaaaaaaaaaaaaaaaaaaaaaaaaaaaaaaaaaaaaaaaaaaaaaaaaaaaaaaaaaaaaaaaaaaaaaaaaaaaaaaaaaaaa

SEQ ID NO: 37372 - RNA, 1743 nt, Artificial Sequence
  mRNA product Design a-2 (A100) comprising derived and/or modified sequence from LASV(G1442-SLE-2011;Clade IV)__AIT17180__GPCmut10 (opt1)
aggagaguccgcucagccagguugcagaagcggcuuagcguguguccuaaucuucucucugcguguagguaggccugugccgcaaacaagcuuaccaugggccagaucgugaccuucuuccaggaggucccccacgugaucgaggaggugaugaacaucguccugaucgcccucagcauccuggccgugcugaaggggcucuacaacguggcgaccugcggccugaucgggcuggucaccuuccuccugcugugcggccgcuccugcaccaccacccucuacaaggggguguacgagcugcagacgcuggagcucaacauggagacccugaacaugugcaugccgcugagcugcaccaagaacaacucccaccacuacauccgggugggcaacgagaccggccucgagcugacgcugaccaacaccagcaucaucaaccacaaguucugcaaccucuccgacgcccacaagaagaaccuguacgaccacgcccugaugagcaucaucuccaccuuccaccucagcauccccaacuucaaccaguacgaggccauguccugcgacuucaacgggggcaagaucagcguccaguacaaccugucccacagcuacgccggggacgcggccaaccacugcggcacgguggccaacggggugcugcagaccuucaugcgcauggccuggggcggcuccuacaucgcgcucgacagcgggcggggcaacugggacugcaucaugaccuccuaccaguaccugaucauccagaacaccacgugggacgaccacugccaguucagccgccccucccccaucggguaccugggccuccugagccagcggacccgcgacgucuacaucucccggcgccugcucggcaccuucaccuggacgcugagcgacagcgaggggaaggacaccccgggcggguacugccugacccgguggaugcucaucgaggccgagcugaagugcuucggcaacaccgccguggccaagugcaacgagaagcacgacgaggaguucugcgacaugcugcgccucuucgacuucugcaagcaggccauccagcggcugaaggcggaggcccagauguccauccagcugaucaacaaggccgugaacgcccucaucaacgaccagcugaucaugaagaaccaccuccgcgacaucauggggauccccuacugcaacuacagcaaguacugguaccugaacaacacggccaccggcaagaccucccugcccaagugcuggcugaucagcaacggcuccuaccucaacgagacccacuucagcgacgacaucgagcaggaggcggacaacaugaucacggagaugcugcagaaggaguacauggagcggcaggggaagacgccccugggccuggucgaccucuucguguucuccaccagcuucuaccugaucuccaucuuccugcaccucgugaagaucccgacccaccgccacaucgucggcaagagcugccccaagccccaccggcugaaccacauggggaucugcuccugcgggcuguacaagcagcccggcgugccggugcgcuggaagcggugaggacuagucccuguucccagagcccacuuuuuuuucuuuuuuugaaauaaaauagccugucuuucagaucuaaaaaaaaaaaaaaaaaaaaaaaaaaaaaaaaaaaaaaaaaaaaaaaaaaaaaaaaaaaaaaaaaaaaaaaaaaaaaaaaaaaaaaaaaaaaaaaaaaaa

SEQ ID NO: 37373 - RNA, 1743 nt, Artificial Sequence
  mRNA product Design a-2 (A100) comprising derived and/or modified sequence from LASV(G3010-SLE-2013;Clade IV)__AIT17344__GPCmut10 (opt1)
aggagaguccgcucagccagguugcagaagcggcuuagcguguguccuaaucuucucucugcguguagguaggccugugccgcaaacaagcuuaccaugggccagaucgugaccuucuuccaggaggucccccacgugaucgaggaggugaugaacaucguccugaucgcccucagcauccuggccgugcugaaggggcucuacaacuucgcgaccugcggccugguggggcuggucacguuccuccugcugugcggccgcuccugcaccaccagccucuacaaggggguguacgagcugcagacccuggagcucaacauggagacgcugaacaugugcaugccgcuguccugcaccaagaacaacagccaccacuacaucauggugggcaacgagaccggccucgagcugacccugacgaacaccuccaucaucaaccacaaguucugcaaccucagcgacgcccacaagaagaaccuguacaaccacgcccugauguccaucaucagcaccuuccaccucuccauccccaacuucaaccaguacgaggccaugagcugcgacuucaacgggggcaagaucuccguccaguacaaccugagccacuccuacgccggggacgcggccagccacugcggcaccguggccaacggggugcugcagacguucaugcggauggccuggggcggcuccuacaucgcgcucgacagcggguacggcaagugggacugcaucaugaccuccuaccaguaccugaucauccagaacaccaccugggaggaccacugccaguucagccgccccucccccaucggguaccugggccuccugagccagcggacgcgcgacaucuacaucagccggcgccugcucggcaccuucaccuggacccuguccgacagcgaggggaaggacacgccgggcggguacugccugacccgguggaugcucaucgaggccgagcugaagugcuucggcaacaccgccgucgccaagugcaacgagaagcacgacgaggaguucugcgacaugcugcgccucuucgacuucugcaagcaggccauccagcggcugaagaccgaggcgcagauguccauccagcugaucaacaaggccgugaacgcccucaucaacgaccagcugaucaugaagaaccaccuccgcgacaucauggggauccccuacugcaacuacagcaaguacugguaccugaaccacacgaccaccggcaagaccucccugcccaagugcuggcuggugagcaacggcuccuaccucaacgagacgcacuucagcgacgacaucgagcagcaggccgacaacaugaucaccgagaugcugcagaaggaguacauggagcggcaggggaagacgccccugggccuggucgaccucuucguguucuccaccagcuucuaccugaucuccaucuuccugcaccucgugaagaucccgacccaccgccacaucgucggcaagagcugccccaagccccaccggcugaaccacauggggaucugcuccugcgggcuguacaagcagcccggcgugccggugcgcuggaagcggugaggacuagucccuguucccagagcccacuuuuuuuucuuuuuuugaaauaaaauagccugucuuucagaucuaaaaaaaaaaaaaaaaaaaaaaaaaaaaaaaaaaaaaaaaaaaaaaaaaaaaaaaaaaaaaaaaaaaaaaaaaaaaaaaaaaaaaaaaaaaaaaaaaaaa

SEQ ID NO: 37374 - RNA, 1743 nt, Artificial Sequence
  mRNA product Design a-2 (A100) comprising derived and/or modified sequence from LASV(G502-SLE-2009;Clade IV)__AIT17126__GPCmut10 (opt1)
aggagaguccgcucagccagguugcagaagcggcuuagcguguguccuaaucuucucucugcguguagguaggccugugccgcaaacaagcuuaccaugggccagaucgugaccuucuuccaggaggucccccacgugaucgaggaggugaugaacaucguccugaucgcccucagcauccuggccgugcugaaggggcucuacaacuucgcgaccugcggccugguggggcugcucacguuccugcugcucugcggccgcuccugcaccaccgggcuguacaagggcgucuacgagcugcagacccucgagcugaacauggagacgcugaacaugugcaugccgcucagcugcaccaagaacaacucccaccacuacaucauggugggcaacgagaccgggcuggagcugacccucacgaacaccagcaucaucaaccacaaguucugcaaccuguccgacgcccacaagaagaaccuguacgaccacgcccucaugagcaucaucuccaccuuccaccugagcauccccaacuucaaccaguacgaggccauguccugcgacuucaacggcgggaagaucagcgugcaguacaaccugucccacagcuacgccggcgacgcggccgaccacugcgggaccgucgccaacggcgugcuccagacguucaugcggauggccuggggcggguccuacaucgcgcuggacagcggccgcgggcggugggacugcaucaugaccuccuaccaguaccugaucauccagaacaccaccugggaggaccacugccaguucagccgccccucccccaucggcuaccucggccugcugagccagcggacgcgcgacaucuacaucucccggcgccuccuggggaccuucaccuggacccugagcgacagcgagggcaaggacacgcccgggggcuacugccucacccgguggaugcugaucgaggccgagcugaagugcuucgggaacaccgccguggccaagugcaacgagaagcacgacgaggaguucugcgacaugcuccgccuguucgacuucugcaagcaggccauccagcggcugaaggcggaggcccagauguccauccagcucaucaacaaggccgucaacgcccugaucaacgaccagcuggugaugaagaaccaccuccgcgacaucaugggcauccccuacugcaacuacagccgguacugguaccugaaccacaccacgaccggccgcaccucccugcccaagugcuggcucgugagcaacggguccuaccugaacgagacccacuucagcgacgacaucgagcagcaggccgacaacaugaucacggagaugcugcagaaggaguacauggagcggcagggcaagaccccgcuggggcucgucgaccuguucguguucuccaccagcuucuaccugaucuccaucuuccuccaccuggugaagaucccgacccaccgccacaucgucggcaagagcugccccaagccccaccggcugaaccacauggggaucugcuccugcggccucuacaagcagcccggcgugccggugaaguggaagcgcugaggacuagucccuguucccagagcccacuuuuuuuucuuuuuuugaaauaaaauagccugucuuucagaucuaaaaaaaaaaaaaaaaaaaaaaaaaaaaaaaaaaaaaaaaaaaaaaaaaaaaaaaaaaaaaaaaaaaaaaaaaaaaaaaaaaaaaaaaaaaaaaaaaaaa

SEQ ID NO: 37375 - RNA, 1743 nt, Artificial Sequence
  mRNA product Design a-2 (A100) comprising derived and/or modified sequence from LASV(G733-SLE-2010;Clade IV)__AIT17154__GPCmut10 (opt1)
aggagaguccgcucagccagguugcagaagcggcuuagcguguguccuaaucuucucucugcguguagguaggccugugccgcaaacaagcuuaccaugggccagaucgugaccuucuuccaggaggucccccacgugaucgaggaggugaugaacaucguccugaucgcccucagcauccuggccgugcugaaggggcucuacaacuucgcgaccugcggcaucguggggcuggucuccuuccugcuccugugcggccgcagcugcacgaccucccuguacaaggggguguacgagcuccagacccuggagcugaacauggagacccucaacaugugcaugccgcugagcugcacgaagaacaacucccaccacuacaucauggugggcaacgagaccggccuggagcucacccugaccaacacgagcaucaucaaccacaaguucugcaaccuguccgacgcccacaagaagaaccucuacgaccacgcccugaugagcaucaucuccaccuuccaccugagcauccccaacuucaaccaguacgaggccauguccugcgacuucaacgggggcaagaucagcguccaguacaaccucucccacagcuacgccggggacgcggccaaccacugcggcaccaucgccaacggggugcugcagaccuucaugcggauggccuggggcggcuccuacaucgcgcuggacagcgggcgcgaccggugggacugcaucaugacguccuaccaguaccucaucauccagaacaccaccugggaggaccacugccaguucagccgccccucccccaucggcuaccuggggcugcucagccagcggacccgcgacaucuacaucagccggcgccugcugggcacguucaccuggacccucuccgacagcgagggcaaggacacccccgggggcuacugccugacgcgguggaugcugaucgaggccgagcucaagugcuucgggaacaccgccguggccaagugcaacgagaagcacgacgaggaguucugcgacaugcugcgccuguucgacuucugcaagcaggccauccagcggcucaaggcggaggcccagauguccauccagcugaucaacaaggccgucaacgcccugaucaacgaccagcucaucaugaagaaccaccuccgcgacaucaugggcaucccguacugcaacuacagcaaguacugguaccugaaccacaccaccacggggaagaccucccugcccaagugcuggcuggugagcaacggcuccuaccugaacgagacccacuucagcgacgacaucgagcagcaggccgacaacaugaucaccgagaugcuccagaaggaguacauggagcggcagggcaagacgccccuggggcugguggaccuguucgucuucuccaccagcuucuaccucaucuccaucuuccugcaccuggugaagaucccgacccaccgccacguggucggcaagagcugccccaagccccaccggcucaaccacauggggaucugcuccugcggccuguacgggcagcccggcgugccggugaaguggaagcgcugaggacuagucccuguucccagagcccacuuuuuuuucuuuuuuugaaauaaaauagccugucuuucagaucuaaaaaaaaaaaaaaaaaaaaaaaaaaaaaaaaaaaaaaaaaaaaaaaaaaaaaaaaaaaaaaaaaaaaaaaaaaaaaaaaaaaaaaaaaaaaaaaaaaaa

SEQ ID NO: 37376 - RNA, 1743 nt, Artificial Sequence
  mRNA product Design a-2 (A100) comprising derived and/or modified sequence from MOPV/LASV reassortant(IGS-1;Clade IV)__AFY05576__GPCmut10 (opt1)
aggagaguccgcucagccagguugcagaagcggcuuagcguguguccuaaucuucucucugcguguagguaggccugugccgcaaacaagcuuaccaugggccagaucgugaccuucuuccaggaggucccccacgugaucgaggaggugaugaacaucguccugaucgcccucagcgugcuggccgugcugaaggggcucuacaacuucgcgaccugcggccuggucgggcuggugaccuuccuccugcugugcggccgcuccugcaccaccagccucuacaaggggguguacgagcugcagacccuggagcucaacauggagacgcugaacaugugcaugccgcuguccugcaccaagaacaacagccaccacuacaucauggucggcaacgagaccggccucgagcugacccugacgaacaccuccaucaucaaccacaaguucugcaaccucagcgacgcccacaagaagaaccuguacgaccacgcccugauguccaucaucagcaccuuccaccucuccauccccaacuucaaccaguacgaggccaugagcugcgacuucaacgggggcaagaucuccgugcaguacaaccugagccacuccuacgccggggacgcggccaaccacugcggcaccguggccaacgggguccugcagacguucaugcggauggccuggggcggcagcuacaucgcgcucgacuccgggcgcggcaacugggacugcaucaugaccagcuaccaguaccugaucauccagaacaccaccugggaggaccacugccaguucucccggcccagccccaucggguaccugggccuccugucccagcgcacgcgggacaucuacaucagccgccggcugcucggcaccuucaccuggacccugagcgacuccgagggggaggacacgccgggcggguacugccugacccgcuggaugcucaucgaggccgagcugaagugcuucggcaacaccgccguggccaagugcaacgagaagcacgacgaggaguucugcgacaugcugcggcuguucgacuucugcaagcaggccauccagcgccugaaggcggaggcccagaugagcauccagcugaucaacaaggccgugaacgcccucaucaacgaccagcugaucaugaagaaccaccuccgggacaucauggggauccccuacugcaacuacuccaaguacugguaccucaaccacaccacgaccggccgcaccagccugcccaagugcuggcuggucuccaacggcagcuaccucaacgagacccacuucuccgacgacaucgagcagcaggccgacaacaugaucacggagaugcugcagaaggaguacauggagcggcaggggaagacgccccugggccugguggaccucuucguguucagcaccuccuucuaccugaucagcaucuuccugcaccucgucaagaucccgacccaccgccacaucguggggaaguccugccccaagccccaccggcugaaccacaugggcaucugcagcugcgggcuguacaagcagcccggcgugccggucaaguggaagcgcugaggacuagucccuguucccagagcccacuuuuuuuucuuuuuuugaaauaaaauagccugucuuucagaucuaaaaaaaaaaaaaaaaaaaaaaaaaaaaaaaaaaaaaaaaaaaaaaaaaaaaaaaaaaaaaaaaaaaaaaaaaaaaaaaaaaaaaaaaaaaaaaaaaaaa

SEQ ID NO: 37377 - RNA, 1743 nt, Artificial Sequence
  mRNA product Design a-2 (A100) comprising derived and/or modified sequence from LASV(LM765-SLE-2012;Clade IV)__AIT17814__GPCmut10 (opt1)
aggagaguccgcucagccagguugcagaagcggcuuagcguguguccuaaucuucucucugcguguagguaggccugugccgcaaacaagcuuaccaugggccagaucgugaccuucuuccaggaggucccccacgugaucgaggaggugaugaacaucguccugaucgcccucagcauccuggccgugcugaaggggcucuacaacuucgcgaccugcggccugguggggcuggucacguuccuccugcugugcggccgcuccugcaccaccagccucuacaaggggguguacgagcugcagacccuggagcucaacauggagacgcugaacaugugcaugccgcuguccugcaccaagaacaacagccaccacuacaucauggugggcaacgagaccggccucgagcugacccugacgaacaccuccaucaucgaccacaaguucugcaaccucagcgacgcccaccggaagaaccuguacgaccacgcccugauguccaucaucagcaccuuccaccucuccauccccaacuucaaccaguacgaggccaugagcugcgacuucaacgggggcaagaucuccguccaguacaaccugagccacuccuacgccaaggacgcggccgaccacugcgggaccguggccaacggcgugcugcagacguucaugcgcauggccuggggcgggagcuacaucgcgcucgacuccggccgggggcgcugggacugcaucaugaccagcuaccaguaccugaucauccagaacaccaccugggaggaccacugccaguucucccggcccagccccaucggcuaccuggggcuccugucccagcgcacgcgggacaucuacaucagccgccggcugcucggcaccuucaccuggacccugagcgacuccgagggcaaggacacgcccgggggcuacugccugacccgcuggaugcucaucgaggccgagcugaagugcuucgggaacaccgccgucgccaagugcaacgagaagcacgacgaggaguucugcgacaugcugcggcuguucgacuucugcaagcaggccauccagcgccugaaggcggaggcccagaugagcauccagcugaucaacaaggccgugaacgcccucaucaacgaccagcugaucaugaagaaccaccuccgggacaucaugggcauccccuacugcaacuacuccaaguacugguaccucaaccacaccacgaccgggaagaccagccugcccaagugcuggcugguguccaacggcagcuaccucaacgagacccacuucuccgacgacaucgagcagcaggccgacaacaugaucacggagaugcugcagaaggaguacauggagcgccagggcaagaccccgcuggggcuggucgaccucuucguguucagcaccuccuucuaccugaucagcaucuuccugcaccucgugaagaucccgacccaccggcacaucgucggcaagcccugccccaagccccaccgccugaaccacauggggaucugcuccugcggccuguacaagcagccgggggugcccgugaaguggaagcggugaggacuagucccuguucccagagcccacuuuuuuuucuuuuuuugaaauaaaauagccugucuuucagaucuaaaaaaaaaaaaaaaaaaaaaaaaaaaaaaaaaaaaaaaaaaaaaaaaaaaaaaaaaaaaaaaaaaaaaaaaaaaaaaaaaaaaaaaaaaaaaaaaaaaa

SEQ ID NO: 37378 - RNA, 1743 nt, Artificial Sequence
  mRNA product Design a-2 (A100) comprising derived and/or modified sequence from LASV(LM776-SLE-2012;Clade IV)__AIT17824__GPCmut10 (opt1)
aggagaguccgcucagccagguugcagaagcggcuuagcguguguccuaaucuucucucugcguguagguaggccugugccgcaaacaagcuuaccaugggccagaucgugaccuucuuccaggaggucccccacgugaucgaggaggugaugaacaucguccugaucgcccucagcauccuggccgugcugaaggggcucuacaacuucgcgaccugcggccugguggggcuggucaccuuccuccugcugugcggccgcuccugcaccaccagcguguacaaggggguguacgagcuccagacccuggagcugaacauggagacgcucaacaugugcaugccgcuguccugcaccaagaacaacagccaccacuacaucauggucggcaacgagaccggccuggagcucacccugacgaacaccuccaucaucaaccacaaguucugcaaccugagcgacgcccacaagaagaaccucuacgaccacgcccugauguccaucaucagcaccuuccaccuguccauccccaacuucaaccaguacgaggccaugagcugcgacuucaacgggggcaagaucuccgugcaguacaaccucagccacuccuacgccggggacgcggccaaccacugcggcaccguggccaacgggguccugcagacguucaugcggauggccuggggcggcagcuacaucgcgcuggacuccgggcacggcaagugggacugcaucaugaccagcuaccaguaccucaucauccagaacaccaccugggaggaccacugccaguucucccgccccagccccaucggguaccugggccugcucucccagcggacgcgcgacaucuacaucagccggcgccugcugggcaccuucaccuggacccucagcgacuccgaggggaaggacacgccgggcggguacugccugacccgguggaugcugaucgaggccgagcucaagugcuucggcaacaccgccguggccaagugcaacgagaagcacgacgaggaguucugcgacaugcugcgccuguucgacuucugcaagcaggccauccagcggcucaaggcggaggcccagaugagcauccagcugaucaacaaggccgugaacgcccugaucaacgaccagcucaucaugaagaaccaccuccgcgacaucauggggauccccuacugcaacuacuccaaguacugguaccugaaccacaccacgaccggcaagaccagccugcccaagugcuggcuggucuccaacggcagcuaccugaacgagacccacuucuccgacgacaucgagcagcaggccgacaacaugaucacggagaugcuccagaaggaguacauggagcggcaggggaagacgccccugggccugguggaccuguucguguucagcaccuccuucuaccucaucagcaucuuccugcaccuggucaagaucccgacccaccgccacaucguggggaaguccugccccaagccccaccggcucaaccacaugggcaucugcagcugcgggcuguacaagcagcccggcgugccgguccgcuggaagcggugaggacuagucccuguucccagagcccacuuuuuuuucuuuuuuugaaauaaaauagccugucuuucagaucuaaaaaaaaaaaaaaaaaaaaaaaaaaaaaaaaaaaaaaaaaaaaaaaaaaaaaaaaaaaaaaaaaaaaaaaaaaaaaaaaaaaaaaaaaaaaaaaaaaaa

SEQ ID NO: 37379 - RNA, 1743 nt, Artificial Sequence
  mRNA product Design a-2 (A100) comprising derived and/or modified sequence from LASV(Mad39;Clade IV)__ANH09722__GPCmut10 (opt1)
aggagaguccgcucagccagguugcagaagcggcuuagcguguguccuaaucuucucucugcguguagguaggccugugccgcaaacaagcuuaccaugggccagaucgugaccuucuuccaggaggucccccacgugaucgaggaggugaugaacaucguccugaucgcccucagcauccuggccgugcugaaggggcucuacaacguggcgaccugcggccugaucgggcuggucacguuccuccugcugugcggccgcuccugcaccaccacccucuacaaggggguguacgagcugcaggcccuggagcucaacauggagacgcugaacaugugcaugccgcugagcugcaccaagaacaacucccaccacuacauccgggugggcaacgagaccggccucgagcugacccugacgaacaccagccucaucaaccacaaguucugcaaccuguccgacgcccacaagaagaaccuguacgaccacgcccucaugagcaucaucuccaccuuccaccugagcauccccaacuucaaccaguacgaggccauguccugcgacuucaacgacgggaagaucagcguccaguacaaccugucccacaccuacgcgggcgacacggccaaccacugcgggaccguggccaacggcgugcuccagaccuucaugcgcauggccuggggcgggagcuacaucgcgcuggacuccggccgcgggggcugggacugcaucaugaccagcuaccaguaccugaucauccagaacacgaccugggaggaccacugccaguucucccggcccagccccaucggguaccucggccugcugucccagcggacccgcgacaucuacaucagccggcgccuccugggcaccuucacguggacccuguccgacagcgaggggaaggacaccccgggcggguacugccucacccgguggaugcugaucgaggccgagcugaagugcuucggcaacacggccgucgccaagugcaacgagaagcacgacgaggaguucugcgacaugcuccgccuguucgacuucugcaagcaggccauccagcggcugaaggcggaggcccagaugagcauccagcucaucaacaaggccgugaacgcccugaucaacgaccagcugaucaugaagaaccaccuccgcgacaucauggggauccccuacugcaacuacuccaaguacugguaccugaaccacaccgugaccggcaagaccagccugcccaagugcuggcucgucuccaacggcagcuaccugaacgagacgcacuucuccgacgacaucgagcagcaggccgacaacaugaucaccgagaugcugcagaaggaguacauggagcggcaggggaagacgccccugggccucguggaccuguucguguucagcaccuccuucuaccugaucagcaucuuccuccaccuggucaagaucccgacccaccgccacgugguggggaagcccugccccaagccccaccggcugaaccacaugggcaucugcuccugcggguucuacaagcagccgggcguccccgugcgcuggaagcggugaggacuagucccuguucccagagcccacuuuuuuuucuuuuuuugaaauaaaauagccugucuuucagaucuaaaaaaaaaaaaaaaaaaaaaaaaaaaaaaaaaaaaaaaaaaaaaaaaaaaaaaaaaaaaaaaaaaaaaaaaaaaaaaaaaaaaaaaaaaaaaaaaaaaa

SEQ ID NO: 37380 - RNA, 1743 nt, Artificial Sequence
  mRNA product Design a-2 (A100) comprising derived and/or modified sequence from LASV(Z0947-SLE-2011;Clade IV)__AIT17840__GPCmut10 (opt1)
aggagaguccgcucagccagguugcagaagcggcuuagcguguguccuaaucuucucucugcguguagguaggccugugccgcaaacaagcuuaccaugggccagaucgugaccuucuuccaggaggucccccacgugaucgaggaggugaugaacaucguccugaucgcccucagcauccuggccgugcugaaggggcucuacaacuucgcgaccugcggccugguggggcuggucacguuccuccugcugugcggccgcuccugcaccaucagccucuacaaggggguguacgagcugcagacccuggagcucaacauggagacccugaacaugugcaugccgcuguccugcacgaagaacaacagccaccacuacaucauggugggcaacgagaccggccucgagcugacccugaccaacacguccaucaucaaccacaaguucugcaaccucagcgacgcccacaagaagaaccuguacgaccacgcccugauguccaucaucagcaccuuccaccucuccauccccaacuucaaccaguacgaggccaugagcugcgacuucaacgggggcaagaucuccguccaguacaaccugagccacuccuacgccggggacgcggccaaccacugcggcaccguggccaacggggugcugcagaccuucaugcggauggccuggggcggcagcuacaucgcgcucgacuccgggcgcgaccggugggacugcaucaugacgagcuaccaguaccugaucauccagaacaccaccugggaggaccacugccaguucucccgccccagccccaucggcuaccuggggcuccugucccagcggacccgcgacaucuacaucagccggcgccugcucggcacguucaccuggacccugagcgacuccgagggcaaggacacccccgggggcuacugccugacgcgguggaugcucaucgaggccgagcugaagugcuucgggaacaccgccgucgccaagugcaacgagaagcacgacgaggaguucugcgacaugcugcgccucuucgacuucugcaagcaggccauccagcggcugaaggcggaggcccagaugagcauccagcugaucaacaaggccgugaacgcccucaucaacgaccagcugaucaugaagaaccaccuccgcgacaucaugggcaucccguacugcaacuacuccaaguacugguaccugaaccacaccaccacggggaagaccagccugcccaagugcuggcugguguccaacggcagcuaccucaacgagacccacuucuccgacgacaucgagcagcaggccgacaacaugaucaccgagaugcugcagaaggaguacauggagcggcagggcaagacgccccuggggcuggucgaccucuucguguucagcaccuccuucuaccugaucagcaucuuccugcaccucgugaagaucccgacccaccgccacaucgucggcaagcccugccccaagccccaccggcugaaccacauggggaucugcuccugcggccuguacaagcagccgggggugcccgugaaguggaagcgcugaggacuagucccuguucccagagcccacuuuuuuuucuuuuuuugaaauaaaauagccugucuuucagaucuaaaaaaaaaaaaaaaaaaaaaaaaaaaaaaaaaaaaaaaaaaaaaaaaaaaaaaaaaaaaaaaaaaaaaaaaaaaaaaaaaaaaaaaaaaaaaaaaaaaa

SEQ ID NO: 37381 - RNA, 1743 nt, Artificial Sequence
  mRNA product Design a-2 (A100) comprising derived and/or modified sequence from LASV(Josiah;Clade IV)__NP_694870__GPCmut10 (opt4)
aggagaguccgcucagccagguugcagaagcggcuuagcguguguccuaaucuucucucugcguguagguaggccugugccgcaaacaagcuuaccaugggccagaucgugaccuucuuccaggaggugccccacgugaucgaggaggugaugaacaucgugcugaucgcccugagcgugcuggccgugcugaagggccuguacaacuucgccaccugcggccuggugggccuggugaccuuccugcugcugugcggcagaagcugcaccaccagccuguacaagggcguguacgagcugcagacccuggagcugaacauggagacccugaacaugugcaugccccugagcugcaccaagaacaacagccaccacuacaucauggugggcaacgagaccggccuggagcugacccugaccaacaccagcaucaucaaccacaaguucugcaaccugagcgacgcccacaagaagaaccuguacgaccacgcccugaugagcaucaucagcaccuuccaccugagcauccccaacuucaaccaguacgaggccaugagcugcgacuucaacggcggcaagaucagcgugcaguacaaccugagccacagcuacgccggcgacgccgccaaccacugcggcaccguggccaacggcgugcugcagaccuucaugagaauggccuggggcggcagcuacaucgcccuggacagcggcagaggcaacugggacugcaucaugaccagcuaccaguaccugaucauccagaacaccaccugggaggaccacugccaguucagcagacccagccccaucggcuaccugggccugcugagccagagaaccagagacaucuacaucagcagaagacugcugggcaccuucaccuggacccugagcgacagcgagggcaaggacacccccggcggcuacugccugaccagauggaugcugaucgaggccgagcugaagugcuucggcaacaccgccguggccaagugcaacgagaagcacgacgaggaguucugcgacaugcugagacuguucgacuucugcaagcaggccauccagagacugaaggccgaggcccagaugagcauccagcugaucaacaaggccgugaacgcccugaucaacgaccagcugaucaugaagaaccaccugagagacaucaugggcauccccuacugcaacuacagcaaguacugguaccugaaccacaccaccaccggcagaaccagccugcccaagugcuggcuggugagcaacggcagcuaccugaacgagacccacuucagcgacgacaucgagcagcaggccgacaacaugaucaccgagaugcugcagaaggaguacauggagagacagggcaagaccccccugggccugguggaccuguucguguucagcaccagcuucuaccugaucagcaucuuccugcaccuggugaagauccccacccacagacacaucgugggcaagagcugccccaagccccacagacugaaccacaugggcaucugcagcugcggccuguacaagcagcccggcgugcccgugaaguggaagagaugaggacuagucccuguucccagagcccacuuuuuuuucuuuuuuugaaauaaaauagccugucuuucagaucuaaaaaaaaaaaaaaaaaaaaaaaaaaaaaaaaaaaaaaaaaaaaaaaaaaaaaaaaaaaaaaaaaaaaaaaaaaaaaaaaaaaaaaaaaaaaaaaaaaaa

SEQ ID NO: 37382 - RNA, 1740 nt, Artificial Sequence
  mRNA product Design a-2 (A100) comprising derived and/or modified sequence from LASV(LP;Clade I)__AAF86701__GPCmut10 (opt4)
aggagaguccgcucagccagguugcagaagcggcuuagcguguguccuaaucuucucucugcguguagguaggccugugccgcaaacaagcuuaccaugggccagaucaucaccuucuuccaggaggugccccacgugaucgaggaggugaugaacaucgugcugaucgcccugagccugcuggccauccugaagggccuguacaacaucgccaccugcggcaucaucggccugguggccuuccuguuccugugcggcaagagcugcagccugacccugaagggcggcuacgagcugcagacccuggagcugaacauggagacccugaacaugugcaugccccugagcugcaccaagaacagcagccaccacuacaucagagugggcaacgagaccggccuggagcugacccugaccaacaccagcaucaucaaccacaaguucugcaaccugagcgacgcccacaagaagaaccuguacgaccacgcccugaugagcaucaucagcaccuuccaccugagcauccccaacuucaaccaguacgaggccaugagcugcgacuucaacggcggcaagaucagcgugcaguacaaccugagccacagcuacgccggcgacgccgccgagcacugcggcaccguggccaacggcgugcugcagaccuucaugagaauggccuggggcggcagauacaucgcccuggacagcggcaagggcaacugggacugcaucaugaccagcuaccaguaccugaucauccagaacaccaccugggaggaccacugccaguucagcagacccagccccaucggcuaccugggccugcugagccagagaaccagagacaucuacaucagcagaagacugcugggcaccuucaccuggacccugagcgacagcgagggcaacgagacccccggcggcuacugccugaccagauggaugcugaucgaggccgagcugaagugcuucggcaacaccgccguggccaagugcaacgagaagcacgacgaggaguucugcgacaugcugagacuguucgacuucugcaagcaggccaucagaagacugaaggccgaggcccagaugagcauccagcugaucaacaaggccgugaacgcccugaucaacgaccagcugaucaugaagaaccaccugagagacaucaugggcauccccuacugcaacuacagcaaguacugguaccugaaccacaccagcagcggcagaaccagccugcccaagugcuggcugaucagcaacggcagcuaccugaacgagacccaguucagcgacgacaucgagcagcaggccgacaacaugaucaccgagaugcugcagaaggaguacaucgagagacagggcaagaccccccugggccugguggacaucuucaucuucagcaccagcuucuaccugaucagcaucuuccugcaccugaucaagauccccacccacagacacaucgugggcaagcccugccccaagccccacagacugaaccacaugggcgugugcagcugcggccuguacaagcaccccggcgugcccaccaaguggaagagaugaggacuagucccuguucccagagcccacuuuuuuuucuuuuuuugaaauaaaauagccugucuuucagaucuaaaaaaaaaaaaaaaaaaaaaaaaaaaaaaaaaaaaaaaaaaaaaaaaaaaaaaaaaaaaaaaaaaaaaaaaaaaaaaaaaaaaaaaaaaaaaaaaaaaa

SEQ ID NO: 37383 - RNA, 1740 nt, Artificial Sequence
  mRNA product Design a-2 (A100) comprising derived and/or modified sequence from LASV(803213;Clade II)__AAF86703__GPCmut10 (opt4)
aggagaguccgcucagccagguugcagaagcggcuuagcguguguccuaaucuucucucugcguguagguaggccugugccgcaaacaagcuuaccaugggccagaucaucaccuucuuccaggaggugccccacgugaucgaggaggugaugaacaucgugcugaucgcccugagccugcuggccauccugaagggcaucuacaacguggccaccugcggccuguucggccugaucagcuuccugcugcugugcggcagaagcugcagcgugaccuacaagggcguguacgagcugcagacccuggagcugaacauggccaaccugaacaugugcaugccccugagcugcaccaagaacaacagccaccacuacaucauggugggcaacgagaccggccuggagcugacccugaccaacaccagcaucaucaaccacaaguucugcaaccugagcgacgcccacaagaagaaccuguacgaccacgcccugaugagcaucaucagcaccuuccaccugagcauccccaacuucaaccaguacgaggccaugagcugcgacuucaacggcggcaagaucagcgugcaguacaaccugagccacagcuucgccguggacgccgccaaccacugcggcaccaucgccaacggcgugcugcagaccuucaugagaauggccuggggcggcagcuacaucgcccuggacagcggcaagggcaacugggacugcaucaugaccagcuaccaguaccugaucauccagaacaccaccugggaggaccacugccaguucagcagacccagccccaucggcuaccugggccugcugagccagagaaccagagacaucuacaucagcagaagacugcugggcaccuucaccuggacccugagcgacagcgagggcaacgaggcccccggcggcuacugccugaccagauggaugcugaucgaggccgagcugaagugcuucggcaacaccgccguggccaagugcaacgagaagcacgacgaggaguucugcgacaugcugagacuguucgacuucugcaagcaggccaucaagagacugaagaccgaggcccagaugagcauccagcugaucaacaaggccgugaacgcccugaucaacgaccagcugaucaugaagaaccaccugagagacaucaugggcauccccuacugcaacuacagcagauacugguaccugaaccacaccgugaccggcaagaccagccugcccagaugcuggcuggugagcaacggcagcuaccugaacgagacccacuucagcgacgacaucgagcagcaggccgacaacaugaucaccgagaugcugcagaaggaguacauggacagacagggcaagaccccccugggccugguggaccuguucguguucagcaccagcuucuaccugaucagcaucuuccugcaccuggugaagauccccacccacagacacaucgugggcaagcccugccccaagccccacagacugaaccacaugggcaucugcagcugcggccuguacaagcaccccggcgugcccgugaaguggaagagaugaggacuagucccuguucccagagcccacuuuuuuuucuuuuuuugaaauaaaauagccugucuuucagaucuaaaaaaaaaaaaaaaaaaaaaaaaaaaaaaaaaaaaaaaaaaaaaaaaaaaaaaaaaaaaaaaaaaaaaaaaaaaaaaaaaaaaaaaaaaaaaaaaaaaa

SEQ ID NO: 37384 - RNA, 1740 nt, Artificial Sequence
  mRNA product Design a-2 (A100) comprising derived and/or modified sequence from LASV(GA391;Clade III)__CAA36645__GPCmut10 (opt4)
aggagaguccgcucagccagguugcagaagcggcuuagcguguguccuaaucuucucucugcguguagguaggccugugccgcaaacaagcuuaccaugggccagaucgugaccuucuuccaggaggugccccacgugaucgaggaggugaugaacaucgugcugaucgcccugagcauccuggccauccugaagggccuguacaacguggccaccugcggccugaucggccuggugaccuuccugcugcugagcggcagaagcugcagccugaucuacaagggcaccuacgagcugcagacccuggagcugaacauggagacccugaacaugugcaugccccugagcugcaccaagaacaacagccaccacuacaucagagugggcaacgagaccggccuggagcugacccugaccaacaccagcauccugaaccacaaguucugcaaccugagcgacgcccacaagagaaaccuguacgaccacagccugaugagcaucaucagcaccuuccaccugagcauccccaacuucaaccaguacgaggccaugagcugcgacuucaacggcggcaagaucaccgugcaguacaaccugagccacagcuucgccguggacgccgccggccacugcggcacccuggccaacggcgugcugcagaccuucaugagaauggccuggggcggcagcuacaucgcccuggacagcggcagaggcaacugggacugcaucaugaccagcuaccaguaccugaucauccagaacaccaccugggacgaccacugccaguucagcagacccagccccaucggcuaccugggccugcugagccagagaaccagagacaucuacaucagcagaagacugcugggcaccuucaccuggacccugagcgacagcgagggcaacgagacccccggcggcuacugccugaccagauggaugcugaucgaggccgagcugaagugcuucggcaacaccgccguggccaagugcaacgagaagcacgacgaggaguucugcgacaugcugagacuguucgacuucugcaagcaggccaucagaagacugaagaccgaggcccagaugagcauccagcugaucaacaaggccgugaacgcccugaucaacgaccagcugaucaugaagaaccaccugagagacaucaugggcauccccuacugcaacuacagcagauacugguaccugaaccacaccagcaccggcaagaccagccugcccagaugcuggcugaucagcaacggcagcuaccugaacgagaccaaguucagcgacgacaucgagcagcaggccgacaacaugaucaccgagaugcugcagaaggaguacaucgacagacagggcaagaccccccugggccugguggaccuguucguguucagcaccagcuucuaccugaucagcaucuuccugcaccuggugaagauccccacccacagacacaucgugggcaagcccugccccaagccccacagacugaaccacaugggcaucugcagcugcggccuguacaagcagcccggcgugcccgugagauggaagagaugaggacuagucccuguucccagagcccacuuuuuuuucuuuuuuugaaauaaaauagccugucuuucagaucuaaaaaaaaaaaaaaaaaaaaaaaaaaaaaaaaaaaaaaaaaaaaaaaaaaaaaaaaaaaaaaaaaaaaaaaaaaaaaaaaaaaaaaaaaaaaaaaaaaaa

SEQ ID NO: 37385 - RNA, 1743 nt, Artificial Sequence
  mRNA product Design a-2 (A100) comprising derived and/or modified sequence from LASV(AV;Clade V)__CCA30314__GPCmut10 (opt4)
aggagaguccgcucagccagguugcagaagcggcuuagcguguguccuaaucuucucucugcguguagguaggccugugccgcaaacaagcuuaccaugggccagaucgugaccuucuuccaggaggugccccacgugaucgaggaggugaugaacaucgugcugaucgcccugagcauccuggccgugcugaagggccuguacaacaucgccaccugcggccugaucggccugaucaccuuccugcugcugugcggcagaagcugcagcagcaaccuguacaagggcguguacgagcugcagagccuggaccugaacauggagacccugaacaugugcaugccccugagcugcaccaagaacaacagccaccacuacaucagagugggcaacgacaccggccuggagcugacccugaccaacaccagcauccugaaccacaaguucugcaaccugagcgacgcccacaagaaggaccuguacgaccacgcccugaugagcaucaucagcaccuuccaccugagcauccccaacuucaaccaguacgaggccaugagcugcgacuucaacggcggcaagaucagcgugcaguacaaccugagccacagcuacgccaucgacgccgccaaccacugcggcaccguggccaacggcauccugcagaccuucaugagaauggccuggggcggcagcuacaucgcccuggacagcggcagaggcaacugggacugcaucaugaccagcuaccaguaccugaucauccagaacaccaccugggagaaccacugccaguucagcagacccagccccaucggcuaccugggccugcugagccagagaaccagagacaucuacaucagcagaagacugcugggcaccuucaccuggacccugagcgacagcgagggcaacgccacccccggcggcuacugccugaccagauggaugcugaucgaggccgagcugaagugcuucggcaacaccgccguggccaagugcaacgagaagcacgacgaggaguucugcgacaugcugagacuguucgacuucugcaagcaggccaucagcagacugaagagcgaggcccagaugagcauccagcugaucaacaaggccgugaacgcccugaucaacgaccagcugaucaugaagaaccaccugagagacaucaugggcauccccuacugcaacuacagcaaguacugguaccugaaccacaccaucaccggcaagaccagccugcccaagugcuggcuggugagcaacggcagcuaccugaacgagacccacuucagcgacgacaucgagcagcaggccgacaacaugaucaccgagaugcugcagaaggaguacauggagagacagggcaagaccccccugggccugguggaccuguucguguucagcaccagcuucuaccugaucagcaucuuccugagacuggugaagauccccacccacagacacaucgugggcaagcccugccccaagccccacagacugaaccacaugggcaucugcagcugcggccuguacaagcagcccggcgugcccgugagauggaagagaugaggacuagucccuguucccagagcccacuuuuuuuucuuuuuuugaaauaaaauagccugucuuucagaucuaaaaaaaaaaaaaaaaaaaaaaaaaaaaaaaaaaaaaaaaaaaaaaaaaaaaaaaaaaaaaaaaaaaaaaaaaaaaaaaaaaaaaaaaaaaaaaaaaaaa

SEQ ID NO: 37386 - RNA, 1740 nt, Artificial Sequence
  mRNA product Design a-2 (A100) comprising derived and/or modified sequence from LASV(Togo/2016/7082;Clade VI)__AMR44577__GPCmut10 (opt4)
aggagaguccgcucagccagguugcagaagcggcuuagcguguguccuaaucuucucucugcguguagguaggccugugccgcaaacaagcuuaccaugggccagaucaucaccuucuuccaggaggugccccacgugaucgaggaggugaugaacaucgugcugaucgcccugagccugcuggccauccugaagggcguguacaacguggccaccugcggcaucaucggccuggugaccuuccuguuccugugcggcagaagcugcagccugaucuacaagggcagcuacgagcugcagacccuggagcugaacauggagacccugaacaugugcaugccccugagcugcaccaagaacagcagccaccacuacaucagagugggcaacgagaccggccuggagcugacccugaccaacaccagcaucaucaaccacaaguucugcaaccugagcgacgcccacaagagaaaccuguacgaccacgcccugaugagcauccugagcaccuuccaccugagcauccccaacuucaaccaguacgaggccaugagcugcgacuucaacggcggcaagaucagcgugcaguacaaccugagccacgccuacgccguggacgccgccgagcacugcggcaccguggccaacggcgugcugcagaccuucaugagaauggccuggggcggcagcuacaucgcccuggacagcggcagaggcaacugggacugcaucaugaccagcuaccaguaccugaucauccagaacaccaccugggaggaccacugccaguucagcagacccagccccaucggcuaccugggccugcugagccagagaaccagagacaucuacaucagcagaagacugcugggcaccuucaccuggacccugagcgacagcgagggcaacgagacccccggcggcuacugccugaccagauggaugcugaucgaggccgagcugaagugcuucggcaacaccgccguggccaagugcaacgagaagcacgacgaggaguucugcgacaugcugagacuguucgacuucugcaagcaggccauccagagacugaagagcgaggcccagaugagcauccagcugaucaacaaggccgugaacgcccugaucaacgaccagcugaucaugaagaaccaccugagagacaugaugggcauccccuacugcaacuacagcaaguacugguaccugaaccacaccagcagcggcagaaccagccugcccaagugcuggcuggugagcaacggcagcuaccugaacgagacccacuucagcgacgacaucgagcagcaggccgacaacaugaucaccgagaugcugcagaaggaguacaucgacagacagggcaagaccccccugggccugguggaccuguucguguucagcaccagcuucuaccugaucagcaucuuccugcaccugaucaagauccccacccacagacacaucgugggcaagcccugccccaagccccacagacugaaccacaugggcaucugcagcugcggccuguacaagcagcccggcgugcccaccagauggaagagaugaggacuagucccuguucccagagcccacuuuuuuuucuuuuuuugaaauaaaauagccugucuuucagaucuaaaaaaaaaaaaaaaaaaaaaaaaaaaaaaaaaaaaaaaaaaaaaaaaaaaaaaaaaaaaaaaaaaaaaaaaaaaaaaaaaaaaaaaaaaaaaaaaaaaa

SEQ ID NO: 37387 - RNA, 1740 nt, Artificial Sequence
  mRNA product Design a-2 (A100) comprising derived and/or modified sequence from LASV(KAK-428;Clade n.d. (VII))__ANH09740__GPCmut10 (opt4)
aggagaguccgcucagccagguugcagaagcggcuuagcguguguccuaaucuucucucugcguguagguaggccugugccgcaaacaagcuuaccaugggccagaucgugaccuucuuccaggaggugccccacgugaucgaggaggugaugaacaucgugcugaucgcccugagccugcuggccauccugaagggccuguacaacuucgccaccugcggcgugaucggccugaucaccuuccugcugcugugcggcagaagcugcagcgccaccuacaagggccaguacgagcugcagacccuggagcugaacauggagagccugaacaugugcaugccccugagcugcaccaagaacaacagccaccacuacaucagagccggcaacaacaccggccuggagcugacccugaccaacaccagcaucaucagccacaaguucugcaaccugagcgacgcccacaagaagaaccuguacgaccacacccugaugagcaucaucaccaccuuccaccugagcauccccaacuucaaccaguacgaggccaugagcugcgacuucaacggcggcaagaucagcauccaguacaaccugagccacagcuacgccggcgacgccgcccagcacugcggcaccguggccaacggcgugcugcagaccuucaugagaauggccuggggcggcagcuaccuggcccuggacagcggcagaagaggcugggacugcaucaucagcagcuaccaguaccugaucauccagaacaccaccugggacgaccacugccaguucagcagacccagccccaucggcuaccugggcuucgugagccagaagaccagagacaucuacaucagcagaagacugcugggcaccuucaccuggacccugagcgacagcgagggccacgacaugcccggcggcuacugccugaccagauggaugcugaucgaggccgaccugaagugcuucggcaacaccgccguggccaagugcaacgagaagcacgacgaggaguucugcgacauguggagacuguucgacuucugcaagcaggccauccagagacugaaggccgaggcccagaugaacauccagcugaucaacaaggccgugaacgcccugaucaacgaccagcugaugaugaagaaccaccugagagacaucaugggcauccccuacugcaacuacagcaaguucugguaccugaacaacaccaccaccggcagaaccagccugcccagaugcuggcugaucagcaacggcagcuaccugaacgagacccacuucagcgacgacaucgagcagcaggccgacaacaugaucaccgagaugcugcagaaggaguacauggacagacagggcaagaccccccugggccugguggaccuguucguguucagcaccagcuucuaccugaucaccaucuuccugcaccuggugaagauccccacccacagacacaucgugggcaagcccugccccaagccccacagacugaaccacaugggcaucugcagcugcggccuguacaagcagcccggcgugcccgugagauggaagagaugaggacuagucccuguucccagagcccacuuuuuuuucuuuuuuugaaauaaaauagccugucuuucagaucuaaaaaaaaaaaaaaaaaaaaaaaaaaaaaaaaaaaaaaaaaaaaaaaaaaaaaaaaaaaaaaaaaaaaaaaaaaaaaaaaaaaaaaaaaaaaaaaaaaaa

SEQ ID NO: 37388 - RNA, 1740 nt, Artificial Sequence; identical to SEQ ID NO: 37382
  mRNA product Design a-2 (A100) comprising derived and/or modified sequence from LASV(Pinneo-NIG-1969;Clade I)__AIT17836__GPCmut10 (opt4)

SEQ ID NO: 37389 - RNA, 1740 nt, Artificial Sequence
  mRNA product Design a-2 (A100) comprising derived and/or modified sequence from LASV(ISTH0009-NIG-2011;Clade II)__AIT17404__GPCmut10 (opt4)
aggagaguccgcucagccagguugcagaagcggcuuagcguguguccuaaucuucucucugcguguagguaggccugugccgcaaacaagcuuaccaugggccagaucaucaccuucuuccaggaggugccccacgugaucgaggaggugaugaacaucgugcugaucgcccugagccugcuggccauccugaagggcaucuacaacguggccaccugcggccuguucggccuggugagcuuccugcugcugugcggcagaagcugcagcaccaccuacaagggcguguacgagcugcagacccuggagcuggacauggccagccugaacaugugcaugccccugagcugcaccaagaacaacagccaccacuacaucauggugggcaacgagaccggccuggagcugacccugaccaacaccagcaucaucaaccacaaguucugcaaccugagcgacgcccacaagaagaaccuguacgaccacgcccugaugagcaucaucagcaccuuccaccugagcauccccaacuucaaccaguacgaggccaugagcugcgacuucaacggcggcaagaucagcgugcaguacaaccugagccacgccuacgccguggacgccgccaaccacugcggcaccaucgccaacggcgugcugcagaccuucaugagaauggccuggggcggcagcuacaucgcccuggacagcggcaagggcagcugggacugcaucaugaccagcuaccaguaccugaucauccagaacaccaccugggaggaccacugccaguucagcagacccagccccaucggcuaccugggccugcugagccagagaaccagagacaucuacaucagcagaagacugcugggcaccuucaccuggacccugagcgacagcgagggcaacgagacccccggcggcuacugccugaccagauggaugcugaucgaggccgagcugaagugcuucggcaacaccgccguggccaagugcaacgagaagcacgacgaggaguucugcgacaugcugagacuguucgacuucugcaagcaggccaucagaagacugaagaccgaggcccagaugagcauccagcugaucaacaaggccgugaacgcccugaucaacgaccagcugaucaugaagaaccaccugagagacaucaugggcauccccuacugcaacuacagcaaguacugguaccugaaccacaccgugaccggcaagaccagccugcccagaugcuggcuggugagcaacggcagcuaccugaacgagacccacuucagcgacgacaucgagcagcaggccgacaacaugaucaccgagcugcugcagaaggaguacauggacagacagggcaagaccccccugggccugguggaccuguucguguucagcaccagcuucuaccugaucagcaucuuccugcaccugaucaagauccccacccacagacacaucaccggcaagcccugccccaagccccacagacugaaccacaugggcaucugcagcugcggccuguacaagcaccccggcgugcccgugaaguggaagagaugaggacuagucccuguucccagagcccacuuuuuuuucuuuuuuugaaauaaaauagccugucuuucagaucuaaaaaaaaaaaaaaaaaaaaaaaaaaaaaaaaaaaaaaaaaaaaaaaaaaaaaaaaaaaaaaaaaaaaaaaaaaaaaaaaaaaaaaaaaaaaaaaaaaaa

SEQ ID NO: 37390 - RNA, 1740 nt, Artificial Sequence
  mRNA product Design a-2 (A100) comprising derived and/or modified sequence from LASV(ISTH2010-NIG-2012;Clade II)__AIT17482__GPCmut10 (opt4)
aggagaguccgcucagccagguugcagaagcggcuuagcguguguccuaaucuucucucugcguguagguaggccugugccgcaaacaagcuuaccaugggccagaucaucaccuucuuccaggaggugccccacgugaucgaggaggugaugaacaucgugcugaucgcccugagccugcuggccauccugaagggcaucuacaacguggccaccugcggccuguucggccuggugagcuuccugcugcugugcggcagaagcugcagcaccaccuacaagggcguguacgagcugcagacccuggagcuggacauggccagccugaacaugugcaugccccugagcugcaccaagaacaacagccaccacuacaucauggugggcaacgagaccggccuggagcugacccugaccaacaccagcaucaucaaccacaaguucugcaaccugagcgacgcccacaagaagaaccuguacgaccacgcccugaugagcaucaucagcaccuuccaccugagcauccccaacuucaaccaguacgaggccaugagcugcgacuucaacggcggcaagaucagcgugcaguacaaccugagccacgccuacgccguggacgccgccaaccacugcggcaccaucgccaacggcgugcugcagaccuucaugagaauggccuggggcggcagcuacaucgcccuggacagcggcaagggcagcugggacugcaucaugaccagcuaccaguaccugaucauccagaacaucaccugggaggaccacugccaguucagcagacccagccccaucggcuaccugggccugcugagccagagaaccagagacaucuacaucagcagaagacugcugggcaccuucaccuggacccugagcgacagcgagggcaacgagacccccggcggcuacugccugaccagauggaugcugaucgaggccgagcugaagugcuucggcaacaccgccguggccaagugcaacgagaagcacgacgaggaguucugcgacaugcugagacuguucgacuucugcaagcaggccaucagaagacugaagaccgaggcccagaugagcauccagcugaucaacaaggccgugaacgcccugaucaacgaccagcugaucaugaagaaccaccugagagacaucaugggcauccccuacugcaacuacagcaaguacugguaccugaaccacaccgugaccggcaagaccagccugcccagaugcuggcuggugagcaacggcagcuaccugaacgagacccacuucagcgacgacaucgagcagcaggccgacaacaugaucaccgagcugcugcagaaggaguacaucgacagacagggcaagaccccccugggccugguggaccuguucguguucagcaccagcuucuaccugaucagcaucuuccugcaccuggugaagauccccacccacagacacguggugggcaagcccugccccaagccccacagacugaaccacaugggcaucugcagcugcggccuguacaagcaccccggcgugcccgugaaguggaagagaugaggacuagucccuguucccagagcccacuuuuuuuucuuuuuuugaaauaaaauagccugucuuucagaucuaaaaaaaaaaaaaaaaaaaaaaaaaaaaaaaaaaaaaaaaaaaaaaaaaaaaaaaaaaaaaaaaaaaaaaaaaaaaaaaaaaaaaaaaaaaaaaaaaaaa

SEQ ID NO: 37391 - RNA, 1740 nt, Artificial Sequence
  mRNA product Design a-2 (A100) comprising derived and/or modified sequence from LASV(Lassa virus/H.sapiens-wt/NGA/2015/ISTH_0543;Clade II)__AVO03639__GPCmut10 (opt4)
aggagaguccgcucagccagguugcagaagcggcuuagcguguguccuaaucuucucucugcguguagguaggccugugccgcaaacaagcuuaccaugggccagaucaucaccuucuuccaggaggugccccacgugaucgaggaggugaugaacaucgugcugaucgcccugagccugcuggccauccugaagggcaucuacaacguggccaccugcggccuguucggccuggugagcuuccugcugcugugcggcagaagcugcagcaccaccuacaagggcguguacgagcugcagacccuggagcuggacauggccaaccugaacaugugcaugccccugagcugcaccaagaacaacagccaccacuacaucauggugggcaacgagaccggccuggagcugacccugaccaacaccagcaucaucaaccacaaguucugcaaccugagcgacgcccacaagaagaaccuguacgaccacgcccugaugagcaucaucagcaccuuccaccugagcauccccaacuucaaccaguacgaggccaugagcugcgacuucaacggcggcaagaucagcgugcaguacaaccugagccacaccuacgccguggacgccgccaaccacugcggcaccaucgccaacggcgugcugcagaccuucaugagaauggccuggggcggcagcuacaucgcccuggacagcggcaagggcagcugggacugcaucaugaccagcuaccaguaccuggugauccagaacaccaccugggaggaccacugccaguucagcagacccagccccaucggcuaccugggccugcugagccagagaaccagagacaucuacaucagcagaagacugcugggcaccuucaccuggacccugagcgacagcgagggcaacgagacccccggcggcuacugccugaccagauggaugcugaucgaggccgagcugaagugcuucggcaacaccgccguggccaagugcaacgagaagcacgacgaggaguucugcgacaugcugagacuguucgacuucugcaagcaggccaucagaagacugaagaccgaggcccagaugagcauccagcugaucaacaaggccgugaacgcccugaucaacgaccagcugaucaugaagaaccaccugagagacaucaugggcauccccuacugcaacuacagcaaguacugguaccugaaccacaccgugaccggcaagaccagccugcccagaugcuggcuggugagcaacggcagcuaccugaacgagacccacuucagcgacgacaucgagcagcaggccgacaacaugaucaccgagcugcugcagaaggaguacaucgacagacagggcaagaccccccugggccugguggaccuguucguguucagcaccagcuucuaccugaucagcaucuuccugcaccuggugaagauccccacccacagacacaucaccggcaagcccugccccaagccccacagacugaaccacaugggcaucugcagcugcggccuguacaagcaccccggcgugcccgugaaguggaagagaugaggacuagucccuguucccagagcccacuuuuuuuucuuuuuuugaaauaaaauagccugucuuucagaucuaaaaaaaaaaaaaaaaaaaaaaaaaaaaaaaaaaaaaaaaaaaaaaaaaaaaaaaaaaaaaaaaaaaaaaaaaaaaaaaaaaaaaaaaaaaaaaaaaaaa

SEQ ID NO: 37392 - RNA, 1740 nt, Artificial Sequence
  mRNA product Design a-2 (A100) comprising derived and/or modified sequence from LASV(Lassa virus/H.sapiens-wt/NGA/2016/ISTH_0009;Clade II)__AVO03571__GPCmut10 (opt4)
aggagaguccgcucagccagguugcagaagcggcuuagcguguguccuaaucuucucucugcguguagguaggccugugccgcaaacaagcuuaccaugggccagaucaucaccuucuuccaggaggugccccacgugaucgaggaggugaugaacaucgugcugaucgcccugagccugcuggccauccugaagggcaucuacaacguggccaccugcggccugcugggccuggugagcuuccugcugcugugcggcagaagcugcagcaccaccuacaagggcguguacgagcugcagacccuggagcuggacauggccagccugaacaugugcaugccccugagcugcaccaagaacaacagccaccacuacaucauggugggcaacgagaccggccuggagcugacccugaccaacaccagcaucaucaaccacaaguucugcaaccugagcgacgcccacaagaagaaccuguacgaccacgcccugaugagcaucaucagcaccuuccaccugagcauccccaacuucaaccaguacgaggccaugagcugcgacuucaacggcggcagaaucagcgugcaguacaaccugagccacagcuacgccguggacgccgccaaccacugcggcaccaucgccaacggcgugcugcagaccuucaugagaauggccuggggcggcagcuacaucgcccuggacagcggcaagggcagcugggacugcaucaugaccagcuaccaguaccugaucauccagaacaccaccugggaggaccacugccaguucagcagacccagccccaucggcuaccugggccugcugagccagagaaccagagacaucuacaucagcagaagacugcugggcaccuucaccuggacccugagcgacagcgagggcaacgagacccccggcggcuacugccugaccagauggaugcugaucgaggccgagcugaagugcuucggcaacaccgccguggccaagugcaacgagaagcacgacgaggaguucugcgacaugcugagacuguucgacuucugcaagcaggccaucagaagacugaagaccgaggcccagaugagcauccagcugaucaacaaggccgugaacgcccugaucaacgaccagcugaucaugaagaaccaccugagagacaucaugggcauccccuacugcaacuacagcaaguacugguaccugaaccacaccgugaccggcaagaccagccugcccagaugcuggcuggugagcaacggcagcuaccugaacgagacccacuucagcgacgacaucgagcagcaggccgacaacaugaucaccgagcugcugcagaaggaguacaucgacagacagggcaagaccccccugggccugguggaccuguucguguucagcaccagcuucuaccugaucagcaucuuccugcaccuggugaagauccccacccacagacacaucaccggcaagcccugccccaagccccacagacugaaccacaugggcaucugcagcugcggccuguacaaccaccccggcgugcccgugaaguggaagagaugaggacuagucccuguucccagagcccacuuuuuuuucuuuuuuugaaauaaaauagccugucuuucagaucuaaaaaaaaaaaaaaaaaaaaaaaaaaaaaaaaaaaaaaaaaaaaaaaaaaaaaaaaaaaaaaaaaaaaaaaaaaaaaaaaaaaaaaaaaaaaaaaaaaaa

SEQ ID NO: 37393 - RNA, 1740 nt, Artificial Sequence
  mRNA product Design a-2 (A100) comprising derived and/or modified sequence from LASV(Lassa virus/H.sapiens-wt/NGA/2016/ISTH_0017;Clade II)__AVO03567__GPCmut10 (opt4)
aggagaguccgcucagccagguugcagaagcggcuuagcguguguccuaaucuucucucugcguguagguaggccugugccgcaaacaagcuuaccaugggccagaucaucaccuucuuccaggaggugccccacgugaucgaggaggugaugaacaucgugcugaucgcccugagccugcuggccauccugaagggcaucuacaacguggccaccugcggccuguucggccuggugagcuuccugcugcugugcggcagaagcugcagcaccaccuacaagggcguguacgagcugcagacccuggagcuggacauggccagccugaacaugugcaugccccugagcugcaccaagaacaacagccaccacuacaucauggugggcaacgagaccggccuggagcugacccugaccaacaccagcaucaucaaccacaaguucugcaaccugagcgacgcccacaagaagaaccuguacgaccacgcccugaugagcaucaucagcaccuuccaccugagcauccccaacuucaaccaguacgaggccaugagcugcgacuucaacggcggcaagaucagcgugcaguacaaccugagccacaccuacgccaucgacgccgccaaccacugcggcaccaucgccaacggcgugcugcagaccuucaugagaauggccuggggcggcagcuacaucgcccuggacagcggcaagggcagcugggacugcaucaugaccagcuaccaguaccugaucauccagaacaccaccugggaggaccacugccaguucagcagacccagccccaucggcuaccugggccugcugagccagagaaccagagacaucuacaucagcagaagacugcugggcaccuucaccuggacccugagcgacagcgagggcaacgagacccccggcggcuacugccugaccagauggaugcugaucgaggccgagcugaagugcuucggcaacaccgccguggccaagugcaacgagaagcacgacgaggaguucugcgacaugcugagacuguucgacuucugcaagcaggccaucagaagacugaagaccgaggcccagaugagcauccagcugaucaacaaggccgugaacgcccugaucaacgaccagcugaucaugaagaaccaccugagagacaucaugggcauccccuacugcaacuacagcaaguacugguaccugaaccacaccgugaccggcaagaccagccugcccagaugcuggcuggugagcaacggcagcuaccugaacgagacccacuucagcgacgacaucgagcagcaggccgacaacaugaucaccgagcugcugcagaaggaguacauggacagacagggcaagaccccccugggccugguggaccuguucguguucagcaccagcuucuaccugaucagcaucuuccugcaccuggugagaauccccacccacagacacgugaucggcaagcccugccccaagccccacagacugaaccacaugggcaucugcagcugcggccuguacaagcaccccggcgugcccgugaaguggaagagaugaggacuagucccuguucccagagcccacuuuuuuuucuuuuuuugaaauaaaauagccugucuuucagaucuaaaaaaaaaaaaaaaaaaaaaaaaaaaaaaaaaaaaaaaaaaaaaaaaaaaaaaaaaaaaaaaaaaaaaaaaaaaaaaaaaaaaaaaaaaaaaaaaaaaa

SEQ ID NO: 37394 - RNA, 1740 nt, Artificial Sequence
  mRNA product Design a-2 (A100) comprising derived and/or modified sequence from LASV(Lassa virus/H.sapiens-wt/NGA/2018/ISTH_0959;Clade II)__AVV65099__GPCmut10 (opt4)
aggagaguccgcucagccagguugcagaagcggcuuagcguguguccuaaucuucucucugcguguagguaggccugugccgcaaacaagcuuaccaugggccagaucaucaccuucuuccaggaggugccccacgugaucgaggaggugaugaacaucgugcugaucgcccugagccugcuggccauccugaagggcaucuacaacguggugaccugcggccuguucggccuggugagcuuccugcugcugugcggcagaagcugcagcaccaccuacaagggcguguacgagcugcagacccuggagcuggacauggccagccugaacaugugcaugccccugagcugcaccaagaacaacagccaccacuacaucauggugggcaacgagaccggccuggagcugacccugaccaacaccagcaucaucaaccacaaguucugcaaccugagcgacgcccacaagaagaaccuguacgaccacgcccugaugagcaucaucagcaccuuccaccugagcauccccaacuucaaccaguacgaggccaugagcugcgacuucaacggcggcaagaucagcgugcaguacaaccugagccacgccuacgccaucgacgccgccaaccacugcggcaccaucgccaacggcgugcugcagaccuucaugagaauggccuggggcggcagcuacaucgcccuggacagcggcaagggcagcugggacugcaucaugaccagcuaccaguaccugaucauccagaacaccaccugggaggaccacugccaguucagcagacccagccccaucggcuaccugggccugcugagccagagaaccagagacaucuacaucagcagaagacugcugggcaccuucaccuggacccugagcgacagcgagggcaacgagacccccggcggcuacugccugaccagauggaugcugaucgaggccgagcugaagugcuucggcaacaccgccguggccaagugcaacgagaagcacgacgaggaguucugcgacaugcugagacuguucgacuucugcaagcaggccaucagaagacugaagaccgaggcccagaugagcauccagcugaucaacaaggccgugaacgcccugaucaacgaccagcugaucaugaagaaccaccugagagacaucaugggcauccccuacugcaacuacagcaaguacugguaccugaaccacaccgugaccggcaagaccagccugcccagaugcuggcuggugagcaacggcagcuaccugaacgagacccacuucagcgacgacaucgagcagcaggccgacaacaugaucaccgagcugcugcagaaggaguacaucgacagacagggcaagaccccccugggccugguggaccuguucguguucagcaccagcuucuaccugaucagcaucuuccugcaccuggugaagauccccacccacagacacgugaucggcaagcccugccccaagccccacagacugaaccacaugggcaucugcagcugcggccuguacaagcaccccggcgugcccgugaaguggaagagaugaggacuagucccuguucccagagcccacuuuuuuuucuuuuuuugaaauaaaauagccugucuuucagaucuaaaaaaaaaaaaaaaaaaaaaaaaaaaaaaaaaaaaaaaaaaaaaaaaaaaaaaaaaaaaaaaaaaaaaaaaaaaaaaaaaaaaaaaaaaaaaaaaaaaa

SEQ ID NO: 37395 - RNA, 1740 nt, Artificial Sequence
  mRNA product Design a-2 (A100) comprising derived and/or modified sequence from LASV(LASV003-NIG-2008;Clade II)__AIT17580__GPCmut10 (opt4)
aggagaguccgcucagccagguugcagaagcggcuuagcguguguccuaaucuucucucugcguguagguaggccugugccgcaaacaagcuuaccaugggccagaucaucaccuucuuccaggaggugccccacgugaucgaggaggugaugaacaucgugcugaucgcccugagccugcuggccauccugaagggcaucuacaacguggccaccugcggccuguucggccuggugagcuuccugcugcugugcggcagaagcugcagcaccaccuacaagggcguguacgagcugcagacccuggagcuggacauggccagccugaacaugugcaugccccugagcugcaccaagaacaacagccaccacuacaucauggugggcaacgagaccggccuggagcugacccugaccaacaccagcaucaucaaccacaaguucugcaaccugagcgacgcccacaagaagaaccuguacgaccacgcccugaugagcaucaucagcaccuuccaccugagcauccccaacuucaaccaguacgaggccaugagcugcgacuucaacggcggcaagaucagcgugcaguacaaccugagccacaccuacgccguggacgccgccaaccacugcggcaccaucgccaacggcgugcugcagaccuucaugagaauggccuggggcggcagcuacaucgcccuggacagcggcaagggcagcugggacugcaucaugaccagcuaccaguaccugaucauccagaacaccaccugggaggaccacugccaguucagcagacccagccccaucggcuaccugggccugcugagccagagaaccagagacaucuacaucagcagaagacugcugggcaccuucaccuggacccugagcgacagcgagagcaacgagacccccggcggcuacugccugaccagauggaugcugaucgaggccgagcugaagugcuucggcaacaccgccguggccaagugcaacgagaagcacgacgaggaguucugcgacaugcugagacuguucgacuucugcaagcaggccaucagaagacugaaggccgaggcccagaugagcauccagcugaucaacaaggccgugaacgcccugaucaacgaccagcugaucaugaagaaccaccugagagacaucaugggcauccccuacugcaacuacagcaaguacugguaccugaaccacaccgugaccggcagaaccagccugcccagaugcuggcuggugagcaacggcagcuaccugaacgagacccacuucagcgacgacaucgagcagcaggccgacaacaugaucaccgagcugcugcagaaggaguacauggacagacagggcaagaccccccugggccugguggaccuguucguguucagcaccagcuucuaccugaucagcaucuuccugcaccuggugaagauccccacccacagacacgugaucggcaagcccugccccaagccccacagacugaaccacaugggcaucugcagcugcggccuguacaagcaccccggcgugcccgugaaguggaagagaugaggacuagucccuguucccagagcccacuuuuuuuucuuuuuuugaaauaaaauagccugucuuucagaucuaaaaaaaaaaaaaaaaaaaaaaaaaaaaaaaaaaaaaaaaaaaaaaaaaaaaaaaaaaaaaaaaaaaaaaaaaaaaaaaaaaaaaaaaaaaaaaaaaaaa

SEQ ID NO: 37396 - RNA, 1740 nt, Artificial Sequence
  mRNA product Design a-2 (A100) comprising derived and/or modified sequence from LASV(LASV035-NIG-2009;Clade II)__AIT17588__GPCmut10 (opt4)
aggagaguccgcucagccagguugcagaagcggcuuagcguguguccuaaucuucucucugcguguagguaggccugugccgcaaacaagcuuaccaugggccagaucaucaccuucuuccaggaggugccccacgugaucgaggaggugaugaacaucgugcugaucgcccugagccugcuggccauccugaagggcaucuacaacguggccaccugcggccuguucggccuggugagcuuccugcugcugugcggcagaagcugcagcaccaccuacaagggcguguacgagcugcagacccuggagcuggacauggccagccugaacaugugcaugccccugagcugcaccaagaacaacagccaccacuacaucauggugggcaacgagaccggccuggagcugacccugaccaacaccagcaucaucaaccacaaguucugcaaccugagcgacgcccacaagaagaaccuguacgaccacgcccugaugagcaucaucagcaccuuccaccugagcauccccaacuucaaccaguacgaggccaugagcugcgacuucaacggcggcaagaucagcgugcaguacaaccugagccacgccuacgccguggacgccgccaaccacugcggcaccaucgccaacggcgugcugcagaccuucaugagaauggccuggggcggcagcuacaucgcccuggacagcggcaagggcagcugggacugcaucaugaccagcuaccaguaccugaucauccagaacaccaccugggaggaccacugccaguucagcagacccagccccaucggcuaccugggccugcugagccagagaaccagagacaucuacaucagcagaagacugcugggcaccuucaccuggacccugagcgacagcgagggcaacgagacccccggcggcuacugccugaccagauggaugcugaucgaggccgagcugaagugcuucggcaacaccgccguggccaagugcaacgagaagcacgacgaggaguucugcgacaugcugagacuguucgacuucugcaagcaggccaucagaagacugaaggccgaggcccagaugagcauccagcugaucaacaaggccgugaacgcccugaucaacgaccagcugaucaugaagaaccaccugagagacaucaugggcauccccuacugcaacuacagcaaguacugguaccugaaccacaccgugaccggcaagaccagccugcccagaugcuggcuggugagcaacggcagcuaccugaacgagacccacuucagcgacgacaucgagcagcaggccgacaacaugaucaccgagcugcugcagaaggaguacaucgacagacagggcaagaccccccugggccugguggaccuguucguguucagcaccagcuucuaccugaucagcaucuuccugcaccuggugaagauccccacccacagacacgugaucggcaagcccugccccaagccccacagacugaaccacaugggcaucugcagcugcggccuguacaagcaccccggcgugcccgugaaguggaagagaugaggacuagucccuguucccagagcccacuuuuuuuucuuuuuuugaaauaaaauagccugucuuucagaucuaaaaaaaaaaaaaaaaaaaaaaaaaaaaaaaaaaaaaaaaaaaaaaaaaaaaaaaaaaaaaaaaaaaaaaaaaaaaaaaaaaaaaaaaaaaaaaaaaaaa

SEQ ID NO: 37397 - RNA, 1740 nt, Artificial Sequence
  mRNA product Design a-2 (A100) comprising derived and/or modified sequence from LASV(LASV1000-NIG-2009;Clade II)__AIT17782__GPCmut10 (opt4)
aggagaguccgcucagccagguugcagaagcggcuuagcguguguccuaaucuucucucugcguguagguaggccugugccgcaaacaagcuuaccaugggccagaucaucaccuucuuccaggaggugccccacgugaucgaggaggugaugaacaucgugcugaucgcccugagccugcuggccauccugaagggcaucuacaacguggccaccugcggccuguucggccuggugagcuuccugcugcugugcggcagaagcugcagcaccaccuacaagggcguguacgagcugcagacccuggagcuggacauggccagccugaacaugugcaugccccugagcugcaccaagaacaacagccaccacuacaucauggugggcaacgagaccggccuggagcugacccugaccaacaccagcaucaucaaccacaaguucugcaaccugagcgacgcccacaagaagaaccuguacgaccacgcccugaugagcaucaucagcaccuuccaccugagcauccccaacuucaaccaguacgaggccaugagcugcgacuucaacggcggcaagaucagcgugcaguacaaccugagccacaccuacgccguggacgccgccaaccacugcggcaccaucgccaacggcgugcugcagaccuucaugagaauggccuggggcggcagcuacaucgcccuggacagcggcaagggcagcugggacugcaucaugaccagcuaccaguaccugaucauccagaacaccaccugggaggaccacugccaguucagcagacccagccccaucggcuaccugggccugcugagccagagaaccagagacaucuacaucagcagaagacugcugggcaccuucaccuggacccugagcgacagcgagggcaacgagacccccggcggcuacugccugaccagauggaugcugaucgaggccgagcugaagugcuucggcaacaccgccguggccaagugcaacgagaagcacgacgaggaguucugcgacaugcugagacuguucgacuucugcaagcaggccaucaagagacugaagaccgaggcccagaugagcauccagcugaucaacaaggccgugaacgcccugaucaacgaccagcugaucaugaagaaccaccugagagacaucaugggcauccccuacugcaacuacagcaaguacugguaccugaaccacaccgugaccggcaagaccagccugcccagaugcuggcuggugagcaacggcagcuaccugaacgagacccacuucagcgacgacaucgagcagcaggccgacaacaugaucaccgagcugcugcagaaggaguacaucgacagacagggcaagaccccccugggccugguggaccuguucguguucagcaccagcuucuaccugaucagcaucuuccugcaccuggugaagauccccacccacagacacguggugggcaagcccugccccaagccccacagacugaaccacaugggcaucugcagcugcggccuguacaagcaccccggcgugcccgugaaguggaagagaugaggacuagucccuguucccagagcccacuuuuuuuucuuuuuuugaaauaaaauagccugucuuucagaucuaaaaaaaaaaaaaaaaaaaaaaaaaaaaaaaaaaaaaaaaaaaaaaaaaaaaaaaaaaaaaaaaaaaaaaaaaaaaaaaaaaaaaaaaaaaaaaaaaaaa

SEQ ID NO: 37398 - RNA, 1740 nt, Artificial Sequence
  mRNA product Design a-2 (A100) comprising derived and/or modified sequence from LASV(LASV221-NIG-2010;Clade II)__AIT17624__GPCmut10 (opt4)
aggagaguccgcucagccagguugcagaagcggcuuagcguguguccuaaucuucucucugcguguagguaggccugugccgcaaacaagcuuaccaugggccagaucaucaccuucuuccaggaggugccccacgugaucgaggaggugaugaacaucgugcugaucgcccugagccugcuggccauccugaagggcaucuacaacguggccaccugcggccuguucggccuggugagcuuccugcugcugugcggcagaagcugcagcaccaccuacaagggcguguacgagcugcagacccuggagcuggacauggccagccugaacaugugcaugccccugagcugcaccaagaacaacagccaccacuacaucauggugggcaacgagaccggccuggagcugacccugaccaacaccagcaucaucaaccacaaguucugcaaccugagcgacgcccacaagaagaaccuguacgaccacgcccugaugagcaucaucagcaccuuccaccugagcauccccaacuucaaccaguacgaggccaugagcugcgacuucaacggcggcaagaucagcgugcaguacaaccugagccacaccuacgccaucgacgccgccaaccacugcggcaccaucgccaacggcgugcugcagaccuucaugagaauggccuggggcggcagcuacaucgcccuggacagcggcaagggcagcugggacugcaucaugaccagcuaccaguaccugaucauccagaacaccaccugggaggaccacugccaguucagcagacccagccccaucggcuaccugggccugcugagccagagaaccagagacaucuacaucagcagaagacugcugggcaccuucaccuggacccugagcgacagcgagggcaacgagacccccggcggcuacugccugaccagauggaugcugaucgaggccgagcugaagugcuucggcaacaccgccguggccaagugcaacgagaagcacgacgaggaguucugcgacaugcugagacuguucgacuucugcaagcaggccaucagaagacugaagaccgaggcccagaugagcauccagcugaucaacaaggccgugaacgcccugaucaacgaccagcugaucaugaagaaccaccugagagacaucaugggcauccccuacugcaacuacagcaaguacugguaccugaaccacaccgugaccggcaagaccagccugcccagaugcuggcuggugagcaacggcagcuaccugaacgagacccacuucagcgacgacaucgagcagcaggccgacaacaugaucaccgagaugcugcagaaggaguacauggacagacagggcaagaccccccugggccugguggaccuguucguguucagcaccagcuucuaccugaucagcaucuuccugcaccuggugaagauccccacccacagacacgugaucggcaagcccugccccaagccccacagacugaaccacaugggcaucugcagcugcggccuguacaagcaccccggcgugcccgugaaguggaagagaugaggacuagucccuguucccagagcccacuuuuuuuucuuuuuuugaaauaaaauagccugucuuucagaucuaaaaaaaaaaaaaaaaaaaaaaaaaaaaaaaaaaaaaaaaaaaaaaaaaaaaaaaaaaaaaaaaaaaaaaaaaaaaaaaaaaaaaaaaaaaaaaaaaaaa

SEQ ID NO: 37399 - RNA, 1740 nt, Artificial Sequence
  mRNA product Design a-2 (A100) comprising derived and/or modified sequence from LASV(LASV237-NIG-2010;Clade II)__AIT17638__GPCmut10 (opt4)
aggagaguccgcucagccagguugcagaagcggcuuagcguguguccuaaucuucucucugcguguagguaggccugugccgcaaacaagcuuaccaugggccagaucaucaccuucuuccaggaggugccccacgugaucgaggaggugaugaacaucgugcugaucgcccugagccugcuggccauccugaagggcaucuacaacguggccaccugcggccuguucggccuggugagcuuccugcugcugugcggcagaagcugcagcaccaccuacaagggcguguacgagcugcagacccuggagcuggacauggccagccugaacaugugcaugccccugagcugcaccaagaacaacagccaccacuacaucauggugggcaacgagaccggccuggagcugacccugaccaacaccagcaucaucaaccacaaguucugcaaccugagcgacgcccacaagaaggaccuguacgaccacgcccugaugagcaucaucagcaccuuccaccugagcauccccaacuucaaccaguacgaggccaugagcugcgacuucaacggcggcaagaucagcgugcaguacaaccugagccacaccuacgccguggacgccgccaaccacugcggcaccaucgccaacggcgugcugcagaccuucaugagaauggccuggggcggcagcuacaucgcccuggacagcggcaagggcagcugggacugcaucaugaccagcuaccaguaccugaucauccagaacaccaccugggaggaccacugccaguucagcagacccagccccaucggcuaccugggccugcugagccagagaaccagagacaucuacaucagcagaagacugcugggcaccuucaccuggacccugagcgacagcgagggcaacgagacccccggcggcuacugccugaccagauggaugcugaucgaggccgagcugaagugcuucggcaacaccgccguggccaagugcaacgagaagcacgacgaggaguucugcgacaugcugagacuguucgacuucugcaagcaggccaucagaagacugaagaccgaggcccagaugagcauccagcugaucaacaaggccgugaacgcccugaucaacgaccagcugaucaugaagaaccaccugagagacaucaugggcauccccuacugcaacuacagcaaguacugguaccugaaccacaccgugaccggcaagaccagccugcccagaugcuggcuggugagcaacggcagcuaccugaacgagacccacuucagcgacgacaucgagcagcaggccgacaacaugaucaccgagcugcugcagaaggaguacauggacagacagggcaagaccccccugggccugguggaccuguucguguucagcaccagcuucuaccugaucagcaucuuccugcaccugaucaagauccccacccacagacacaucaccggcaagcccugccccaagccccacagacugaaccacaugggcaucugcagcugcggccuguacaagcaccccggcgugcccgugaaguggaagagaugaggacuagucccuguucccagagcccacuuuuuuuucuuuuuuugaaauaaaauagccugucuuucagaucuaaaaaaaaaaaaaaaaaaaaaaaaaaaaaaaaaaaaaaaaaaaaaaaaaaaaaaaaaaaaaaaaaaaaaaaaaaaaaaaaaaaaaaaaaaaaaaaaaaaa

SEQ ID NO: 37400 - RNA, 1740 nt, Artificial Sequence
  mRNA product Design a-2 (A100) comprising derived and/or modified sequence from LASV(LASV253-NIG-2011;Clade II)__AIT17670__GPCmut10 (opt4)
aggagaguccgcucagccagguugcagaagcggcuuagcguguguccuaaucuucucucugcguguagguaggccugugccgcaaacaagcuuaccaugggccagaucaucaccuucuuccaggaggugccccacgugaucgaggaggugaugaacaucgugcugaucgcccugagccugcuggccauccugaagggcaucuacaacguggccaccugcggccuguucggccuggugagcuuccugcugcugugcggcagaagcugcagcaccaccuacaagggcguguacgagcugcagacccuggagcuggacauggccagccugaacaugugcaugccccugagcugcaccaagaacaacagccaccacuacaucauggugggcaacgagaccggccuggagcugacccugaccaacaccagcaucaucaaccacaaguucugcaaccugagcgacgcccacaagaagaaccuguacgaccacgcccugaugagcaucaucagcaccuuccaccugagcauccccaacuucaaccaguacgaggccaugagcugcgacuucaacggcggcaagaucagcgugcaguacaaccugagccacaccuacgccguggacgccgccaaccacugcggcaccaucgccaacggcgugcugcagaccuucaugagaauggccuggggcggcagcuacaucgcccuggacagcggcaagggcagcugggacugcaucaugaccagcuaccaguaccugaucauccagaacaccaccugggaggaccacugccaguucagcagacccagccccaucggcuaccugggccugcugagccagagaaccagagacaucuacaucagcagaagacugcugggcaccuucaccuggacccugagcgacagcgagggcaacgagacccccggcggcuacugccugaccagauggaugcugaucgaggccgagcugaagugcuucggcaacaccgccguggccaagugcaacgagaagcacgacgaggaguucugcgacaugcugagacuguucgacuucugcaagcaggccaucagaagacugaaggccgaggcccagaugagcauccagcugaucaacaaggccgugaacgcccugaucaacgaccagcugaucaugaagaaccaccugagagacaucaugggcauccccuacugcaacuacagcaaguacugguaccugaaccacaccgugaccggcagaaccagccugcccagaugcuggcuggugagcaacggcagcuaccugaacgagacccacuucagcgacgacaucgagcagcaggccgacaacaugaucaccgagcugcugcagaaggaguacaucgacagacagggcaagaccccccugggccugguggaccuguucguguucagcaccagcuucuaccugaucagcaucuuccugcaccuggugaagauccccacccacagacacaucaucggcaagcccugccccaagccccacagacugaaccacaugggcaucugcagcugcggccuguacaagcaccccggcgugcccgugaaguggaagagaugaggacuagucccuguucccagagcccacuuuuuuuucuuuuuuugaaauaaaauagccugucuuucagaucuaaaaaaaaaaaaaaaaaaaaaaaaaaaaaaaaaaaaaaaaaaaaaaaaaaaaaaaaaaaaaaaaaaaaaaaaaaaaaaaaaaaaaaaaaaaaaaaaaaaa

SEQ ID NO: 37401 - RNA, 1740 nt, Artificial Sequence
  mRNA product Design a-2 (A100) comprising derived and/or modified sequence from LASV(LASV254-NIG-2011;Clade II)__AIT17674__GPCmut10 (opt4)
aggagaguccgcucagccagguugcagaagcggcuuagcguguguccuaaucuucucucugcguguagguaggccugugccgcaaacaagcuuaccaugggccagaucaucaccuucuuccaggaggugccccacgugaucgaggaggugaugaacaucgugcugaucgcccugagccugcuggccauccugaagggcaucuacaacguggccaccugcggccuguucggccuggugagcuuccugcugcugugcggcagaagcugcagcaccaccuacaagggcguguacgagcugcagacccuggagcuggacaugaccaaccugaacaugugcaugccccugagcugcaccaagaacaacagccaccacuacaucauggugggcaacgagaccggccuggagcugacccugaccaacaccagcaucaucaaccacaaguucugcaaccugagcgacgcccacaagaagaaccuguacaaccacgcccugaugagcaucaucagcaccuuccaccugagcauccccaacuucaaccaguacgaggccaugagcugcgacuucaacggcggcaagaucagcgugcaguacaaccugagccacagcuacgccguggacgccgccaaccacugcggcaccaucgccaacggcgugcugcagaccuucaugagaauggccuggggcggcagcuacaucgcccuggacagcggcaagggcaacugggacugcaucaugaccagcuaccaguaccugaucauccagaacaccaccugggaggaccacugccaguucagcagacccagccccaucggcuaccugggccugcugagccagagaaccagagacaucuacaucagcagaagacugcugggcaccuucaccuggacccugagcgacagcgagggcaacgagacccccggcggcuacugccugaccagauggaugcugaucgaggccgagcugaagugcuucggcaacaccgccguggccaagugcaacgagaagcacgacgaggaguucugcgacaugcugagacuguucgacuucugcaagcaggccaucagaagacugaagaccgaggcccaggccaacauccagcugaucaacaaggccgugaacgcccugaucaacgaccagcugaucaugaagaaccaccugagagacaucaugggcauccccuacugcaacuacagcaaguacugguaccugaaccacaccgugaccggcaagaccagccugcccagaugcuggcuggugagcaacggcagcuaccugaacgagacccacuucagcgacgacaucgagcagcaggccgacaacaugaucaccgagcugcugcagaaggaguacauggacagacagggcaagaccccccugggccugguggaccuguucguguucagcaccagcuucuaccugaucagcaucuuccugcaccuggugaagauccccacccacagacacgugaucggcaagcccugccccaagccccacagacugaaccacaugggcaucugcagcugcggccuguacaagcaccccggcgugcccgugaaguggaagagaugaggacuagucccuguucccagagcccacuuuuuuuucuuuuuuugaaauaaaauagccugucuuucagaucuaaaaaaaaaaaaaaaaaaaaaaaaaaaaaaaaaaaaaaaaaaaaaaaaaaaaaaaaaaaaaaaaaaaaaaaaaaaaaaaaaaaaaaaaaaaaaaaaaaaa

SEQ ID NO: 37402 - RNA, 1740 nt, Artificial Sequence
  mRNA product Design a-2 (A100) comprising derived and/or modified sequence from LASV(Nig08-A19;Clade III)__ADU56618__GPCmut10 (opt4)
aggagaguccgcucagccagguugcagaagcggcuuagcguguguccuaaucuucucucugcguguagguaggccugugccgcaaacaagcuuaccaugggccagaucgugaccuucuuccaggaggugccccacgugaucgaggaggugaugaacaucgugcugaucgcccugagcauccuggccauccugaagggccuguacaacaucgccaccugcggccugaucggccuggugaccuuccugcugcugagcggcagaagcugcagcaugaccuacaagggcguguacgagcugcagacccuggagcugaacaugaacacccugaacaugugcaugccccugagcugcaccaagaacaacagccaccacuacaucauggugggcaacgagaccggccuggagcugacccugaccaacaccagccugcugcaccacaaguucugcaaccugagcgacgcccacaagaagaaccuguacgaccacacccugaugagcaucaucagcaccuuccaccugagcauccccaacuucaaccaguacgaggccaugagcugcgacuucaacggcggcaagaucaccgugcaguacaaccugagccacagcuacgccaucgacgccgccaaccacugcggcaccguggccaacggcgugcugcagaccuucaugagaauggccuggggcggcagcuacaucgcccuggacagcggcagaggcaagugggacugcaucaugaccagcuaccaguaccugaucauccagaacaccaccugggaggaccacugccaguucagcagacccagccccaucggcuaccugggccugcugagccagagaaccagagacaucuacaucagcagaagacugcugggcaccuucaccuggacccugagcgacagcgagggcaacgagacccccggcggcuacugccugaccagauggaugcugaucgaggccgagcugaagugcuucggcaacaccgccguggccaagugcaacgagaagcacgacgaggaguucugcgacaugcugagacuguucgacuucugcaagcaggccaucagaagacugaaggccgaggcccagaugagcauccagcugaucaacaaggccgugaacgcccugaucaacgaccagcugaucaugaagaaccaccugagagacaucaugggcauccccuacugcaacuacagcaaguacugguaccugaaccacaccagcaccggcagaaccagccugcccagaugcuggcuggugagcaacggcagcuaccugaacgagacccacuucagcgacgacaucgagcagcaggccgacaacaugaucaccgagaugcugcagaaggaguaccuggacagacagggcaagaccccccugggccugguggaccuguucguguucagcaccagcuucuaccugaucagcaucuuccugcaccuggugaagauccccacccacagacacaucgugggcaagcccugccccaagccccacagacugaaccacaugggcaucugcagcugcggccuguacaagcagcccggcgugcccgugagauggaagagaugaggacuagucccuguucccagagcccacuuuuuuuucuuuuuuugaaauaaaauagccugucuuucagaucuaaaaaaaaaaaaaaaaaaaaaaaaaaaaaaaaaaaaaaaaaaaaaaaaaaaaaaaaaaaaaaaaaaaaaaaaaaaaaaaaaaaaaaaaaaaaaaaaaaaa

SEQ ID NO: 37403 - RNA, 1743 nt, Artificial Sequence
  mRNA product Design a-2 (A100) comprising derived and/or modified sequence from LASV(G1180-SLE-2010;Clade IV)__AIT17168__GPCmut10 (opt4)
aggagaguccgcucagccagguugcagaagcggcuuagcguguguccuaaucuucucucugcguguagguaggccugugccgcaaacaagcuuaccaugggccagaucgugaccuucuuccaggaggugccccacgugaucgaggaggugaugaacaucgugcugaucgcccugagcauccuggccgugcugaagggccuguacaacuucgccaccugcggccuggugggccugcugaccuuccugcugcugugcggcagaagcugcaccgccagcagauacaagggcguguacgagcugcagacccuggagcugaacauggagacccugaacaugugcaugccccugagcugcaccaagaacaacagccaccacuacaucauggugggcaacgagaccggccuggagcugacccugaccaacaccagcaucaucaaccacaaguucugcaaccugagcgacgcccacaagaagaaccuguacgaccacgcccugaugagcaucaucagcaccuuccaccugagcauccccaacuucaaccaguacgaggccaugagcugcgacuucaacggcggcaagaucagcgugcaguacaaccugagccacagcuacgccggcgacgccgccaaccacugcggcaccguggccaacggcgugcugcagaccuucaugagaauggccuggggcggcagcuacaucgcccuggacagcggccacggcagcugggacugcaucaugaccagcuaccaguaccugaucauccagaacaccaccugggaggaccacugccaguucagcagacccagccccaucggcuaccugggccugcugagccagagaaccagagacaucuacaucagcagaagacugcugggcaccuucaccuggacccugagcgacagcgagggcaaggacacccccggcggcuacugccugaccagauggaugcugaucgaggccgagcugaagugcuucggcaacaccgccguggccaagugcaacgagaagcacgacgaggaguucugcgacaugcugagacuguucgacuucugcaagcaggccauccagagacugaaggccgaggcccagaugagcauccagcugaucaacaaggccgugaacgcccugaucaacgaccagcugaucaugaagaaccaccugagagacaucaugggcauccccuacugcaacuacagcaaguacugguaccugaaccacaccaccaccggcaagaccagccugcccaagugcuggcuggugagcaacggcagcuaccugaacgagacccacuucagcgacgacaucgagcagcaggccgacaacaugaucaccgagaugcugcagaaggaguacauggagagacagggcaagaccccccugggccugguggaccuguucguguucagcaccagcuucuaccugaucagcaucuuccugcaccuggugaagauccccacccacagacacaucgugggcaagagcugccccaagccccacagacugaaccacaugggcaucugcagcugcggccuguacaagcagcccggcgugcccgugaaguggaagagaugaggacuagucccuguucccagagcccacuuuuuuuucuuuuuuugaaauaaaauagccugucuuucagaucuaaaaaaaaaaaaaaaaaaaaaaaaaaaaaaaaaaaaaaaaaaaaaaaaaaaaaaaaaaaaaaaaaaaaaaaaaaaaaaaaaaaaaaaaaaaaaaaaaaaa

SEQ ID NO: 37404 - RNA, 1743 nt, Artificial Sequence
  mRNA product Design a-2 (A100) comprising derived and/or modified sequence from LASV(G1442-SLE-2011;Clade IV)__AIT17180__GPCmut10 (opt4)
aggagaguccgcucagccagguugcagaagcggcuuagcguguguccuaaucuucucucugcguguagguaggccugugccgcaaacaagcuuaccaugggccagaucgugaccuucuuccaggaggugccccacgugaucgaggaggugaugaacaucgugcugaucgcccugagcauccuggccgugcugaagggccuguacaacguggccaccugcggccugaucggccuggugaccuuccugcugcugugcggcagaagcugcaccaccacccuguacaagggcguguacgagcugcagacccuggagcugaacauggagacccugaacaugugcaugccccugagcugcaccaagaacaacagccaccacuacaucagagugggcaacgagaccggccuggagcugacccugaccaacaccagcaucaucaaccacaaguucugcaaccugagcgacgcccacaagaagaaccuguacgaccacgcccugaugagcaucaucagcaccuuccaccugagcauccccaacuucaaccaguacgaggccaugagcugcgacuucaacggcggcaagaucagcgugcaguacaaccugagccacagcuacgccggcgacgccgccaaccacugcggcaccguggccaacggcgugcugcagaccuucaugagaauggccuggggcggcagcuacaucgcccuggacagcggcagaggcaacugggacugcaucaugaccagcuaccaguaccugaucauccagaacaccaccugggacgaccacugccaguucagcagacccagccccaucggcuaccugggccugcugagccagagaaccagagacguguacaucagcagaagacugcugggcaccuucaccuggacccugagcgacagcgagggcaaggacacccccggcggcuacugccugaccagauggaugcugaucgaggccgagcugaagugcuucggcaacaccgccguggccaagugcaacgagaagcacgacgaggaguucugcgacaugcugagacuguucgacuucugcaagcaggccauccagagacugaaggccgaggcccagaugagcauccagcugaucaacaaggccgugaacgcccugaucaacgaccagcugaucaugaagaaccaccugagagacaucaugggcauccccuacugcaacuacagcaaguacugguaccugaacaacaccgccaccggcaagaccagccugcccaagugcuggcugaucagcaacggcagcuaccugaacgagacccacuucagcgacgacaucgagcaggaggccgacaacaugaucaccgagaugcugcagaaggaguacauggagagacagggcaagaccccccugggccugguggaccuguucguguucagcaccagcuucuaccugaucagcaucuuccugcaccuggugaagauccccacccacagacacaucgugggcaagagcugccccaagccccacagacugaaccacaugggcaucugcagcugcggccuguacaagcagcccggcgugcccgugagauggaagagaugaggacuagucccuguucccagagcccacuuuuuuuucuuuuuuugaaauaaaauagccugucuuucagaucuaaaaaaaaaaaaaaaaaaaaaaaaaaaaaaaaaaaaaaaaaaaaaaaaaaaaaaaaaaaaaaaaaaaaaaaaaaaaaaaaaaaaaaaaaaaaaaaaaaaa

SEQ ID NO: 37405 - RNA, 1743 nt, Artificial Sequence
  mRNA product Design a-2 (A100) comprising derived and/or modified sequence from LASV(G3010-SLE-2013;Clade IV)__AIT17344__GPCmut10 (opt4)
aggagaguccgcucagccagguugcagaagcggcuuagcguguguccuaaucuucucucugcguguagguaggccugugccgcaaacaagcuuaccaugggccagaucgugaccuucuuccaggaggugccccacgugaucgaggaggugaugaacaucgugcugaucgcccugagcauccuggccgugcugaagggccuguacaacuucgccaccugcggccuggugggccuggugaccuuccugcugcugugcggcagaagcugcaccaccagccuguacaagggcguguacgagcugcagacccuggagcugaacauggagacccugaacaugugcaugccccugagcugcaccaagaacaacagccaccacuacaucauggugggcaacgagaccggccuggagcugacccugaccaacaccagcaucaucaaccacaaguucugcaaccugagcgacgcccacaagaagaaccuguacaaccacgcccugaugagcaucaucagcaccuuccaccugagcauccccaacuucaaccaguacgaggccaugagcugcgacuucaacggcggcaagaucagcgugcaguacaaccugagccacagcuacgccggcgacgccgccagccacugcggcaccguggccaacggcgugcugcagaccuucaugagaauggccuggggcggcagcuacaucgcccuggacagcggcuacggcaagugggacugcaucaugaccagcuaccaguaccugaucauccagaacaccaccugggaggaccacugccaguucagcagacccagccccaucggcuaccugggccugcugagccagagaaccagagacaucuacaucagcagaagacugcugggcaccuucaccuggacccugagcgacagcgagggcaaggacacccccggcggcuacugccugaccagauggaugcugaucgaggccgagcugaagugcuucggcaacaccgccguggccaagugcaacgagaagcacgacgaggaguucugcgacaugcugagacuguucgacuucugcaagcaggccauccagagacugaagaccgaggcccagaugagcauccagcugaucaacaaggccgugaacgcccugaucaacgaccagcugaucaugaagaaccaccugagagacaucaugggcauccccuacugcaacuacagcaaguacugguaccugaaccacaccaccaccggcaagaccagccugcccaagugcuggcuggugagcaacggcagcuaccugaacgagacccacuucagcgacgacaucgagcagcaggccgacaacaugaucaccgagaugcugcagaaggaguacauggagagacagggcaagaccccccugggccugguggaccuguucguguucagcaccagcuucuaccugaucagcaucuuccugcaccuggugaagauccccacccacagacacaucgugggcaagagcugccccaagccccacagacugaaccacaugggcaucugcagcugcggccuguacaagcagcccggcgugcccgugagauggaagagaugaggacuagucccuguucccagagcccacuuuuuuuucuuuuuuugaaauaaaauagccugucuuucagaucuaaaaaaaaaaaaaaaaaaaaaaaaaaaaaaaaaaaaaaaaaaaaaaaaaaaaaaaaaaaaaaaaaaaaaaaaaaaaaaaaaaaaaaaaaaaaaaaaaaaa

SEQ ID NO: 37406 - RNA, 1743 nt, Artificial Sequence
  mRNA product Design a-2 (A100) comprising derived and/or modified sequence from LASV(G502-SLE-2009;Clade IV)__AIT17126__GPCmut10 (opt4)
aggagaguccgcucagccagguugcagaagcggcuuagcguguguccuaaucuucucucugcguguagguaggccugugccgcaaacaagcuuaccaugggccagaucgugaccuucuuccaggaggugccccacgugaucgaggaggugaugaacaucgugcugaucgcccugagcauccuggccgugcugaagggccuguacaacuucgccaccugcggccuggugggccugcugaccuuccugcugcugugcggcagaagcugcaccaccggccuguacaagggcguguacgagcugcagacccuggagcugaacauggagacccugaacaugugcaugccccugagcugcaccaagaacaacagccaccacuacaucauggugggcaacgagaccggccuggagcugacccugaccaacaccagcaucaucaaccacaaguucugcaaccugagcgacgcccacaagaagaaccuguacgaccacgcccugaugagcaucaucagcaccuuccaccugagcauccccaacuucaaccaguacgaggccaugagcugcgacuucaacggcggcaagaucagcgugcaguacaaccugagccacagcuacgccggcgacgccgccgaccacugcggcaccguggccaacggcgugcugcagaccuucaugagaauggccuggggcggcagcuacaucgcccuggacagcggcagaggcagaugggacugcaucaugaccagcuaccaguaccugaucauccagaacaccaccugggaggaccacugccaguucagcagacccagccccaucggcuaccugggccugcugagccagagaaccagagacaucuacaucagcagaagacugcugggcaccuucaccuggacccugagcgacagcgagggcaaggacacccccggcggcuacugccugaccagauggaugcugaucgaggccgagcugaagugcuucggcaacaccgccguggccaagugcaacgagaagcacgacgaggaguucugcgacaugcugagacuguucgacuucugcaagcaggccauccagagacugaaggccgaggcccagaugagcauccagcugaucaacaaggccgugaacgcccugaucaacgaccagcuggugaugaagaaccaccugagagacaucaugggcauccccuacugcaacuacagcagauacugguaccugaaccacaccaccaccggcagaaccagccugcccaagugcuggcuggugagcaacggcagcuaccugaacgagacccacuucagcgacgacaucgagcagcaggccgacaacaugaucaccgagaugcugcagaaggaguacauggagagacagggcaagaccccccugggccugguggaccuguucguguucagcaccagcuucuaccugaucagcaucuuccugcaccuggugaagauccccacccacagacacaucgugggcaagagcugccccaagccccacagacugaaccacaugggcaucugcagcugcggccuguacaagcagcccggcgugcccgugaaguggaagagaugaggacuagucccuguucccagagcccacuuuuuuuucuuuuuuugaaauaaaauagccugucuuucagaucuaaaaaaaaaaaaaaaaaaaaaaaaaaaaaaaaaaaaaaaaaaaaaaaaaaaaaaaaaaaaaaaaaaaaaaaaaaaaaaaaaaaaaaaaaaaaaaaaaaaa

SEQ ID NO: 37407 - RNA, 1743 nt, Artificial Sequence
  mRNA product Design a-2 (A100) comprising derived and/or modified sequence from LASV(G733-SLE-2010;Clade IV)__AIT17154__GPCmut10 (opt4)
aggagaguccgcucagccagguugcagaagcggcuuagcguguguccuaaucuucucucugcguguagguaggccugugccgcaaacaagcuuaccaugggccagaucgugaccuucuuccaggaggugccccacgugaucgaggaggugaugaacaucgugcugaucgcccugagcauccuggccgugcugaagggccuguacaacuucgccaccugcggcaucgugggccuggugagcuuccugcugcugugcggcagaagcugcaccaccagccuguacaagggcguguacgagcugcagacccuggagcugaacauggagacccugaacaugugcaugccccugagcugcaccaagaacaacagccaccacuacaucauggugggcaacgagaccggccuggagcugacccugaccaacaccagcaucaucaaccacaaguucugcaaccugagcgacgcccacaagaagaaccuguacgaccacgcccugaugagcaucaucagcaccuuccaccugagcauccccaacuucaaccaguacgaggccaugagcugcgacuucaacggcggcaagaucagcgugcaguacaaccugagccacagcuacgccggcgacgccgccaaccacugcggcaccaucgccaacggcgugcugcagaccuucaugagaauggccuggggcggcagcuacaucgcccuggacagcggcagagacagaugggacugcaucaugaccagcuaccaguaccugaucauccagaacaccaccugggaggaccacugccaguucagcagacccagccccaucggcuaccugggccugcugagccagagaaccagagacaucuacaucagcagaagacugcugggcaccuucaccuggacccugagcgacagcgagggcaaggacacccccggcggcuacugccugaccagauggaugcugaucgaggccgagcugaagugcuucggcaacaccgccguggccaagugcaacgagaagcacgacgaggaguucugcgacaugcugagacuguucgacuucugcaagcaggccauccagagacugaaggccgaggcccagaugagcauccagcugaucaacaaggccgugaacgcccugaucaacgaccagcugaucaugaagaaccaccugagagacaucaugggcauccccuacugcaacuacagcaaguacugguaccugaaccacaccaccaccggcaagaccagccugcccaagugcuggcuggugagcaacggcagcuaccugaacgagacccacuucagcgacgacaucgagcagcaggccgacaacaugaucaccgagaugcugcagaaggaguacauggagagacagggcaagaccccccugggccugguggaccuguucguguucagcaccagcuucuaccugaucagcaucuuccugcaccuggugaagauccccacccacagacacguggugggcaagagcugccccaagccccacagacugaaccacaugggcaucugcagcugcggccuguacggccagcccggcgugcccgugaaguggaagagaugaggacuagucccuguucccagagcccacuuuuuuuucuuuuuuugaaauaaaauagccugucuuucagaucuaaaaaaaaaaaaaaaaaaaaaaaaaaaaaaaaaaaaaaaaaaaaaaaaaaaaaaaaaaaaaaaaaaaaaaaaaaaaaaaaaaaaaaaaaaaaaaaaaaaa

SEQ ID NO: 37408 - RNA, 1743 nt, Artificial Sequence
  mRNA product Design a-2 (A100) comprising derived and/or modified sequence from MOPV/LASV reassortant(IGS-1;Clade IV)__AFY05576__GPCmut10 (opt4)
aggagaguccgcucagccagguugcagaagcggcuuagcguguguccuaaucuucucucugcguguagguaggccugugccgcaaacaagcuuaccaugggccagaucgugaccuucuuccaggaggugccccacgugaucgaggaggugaugaacaucgugcugaucgcccugagcgugcuggccgugcugaagggccuguacaacuucgccaccugcggccuggugggccuggugaccuuccugcugcugugcggcagaagcugcaccaccagccuguacaagggcguguacgagcugcagacccuggagcugaacauggagacccugaacaugugcaugccccugagcugcaccaagaacaacagccaccacuacaucauggugggcaacgagaccggccuggagcugacccugaccaacaccagcaucaucaaccacaaguucugcaaccugagcgacgcccacaagaagaaccuguacgaccacgcccugaugagcaucaucagcaccuuccaccugagcauccccaacuucaaccaguacgaggccaugagcugcgacuucaacggcggcaagaucagcgugcaguacaaccugagccacagcuacgccggcgacgccgccaaccacugcggcaccguggccaacggcgugcugcagaccuucaugagaauggccuggggcggcagcuacaucgcccuggacagcggcagaggcaacugggacugcaucaugaccagcuaccaguaccugaucauccagaacaccaccugggaggaccacugccaguucagcagacccagccccaucggcuaccugggccugcugagccagagaaccagagacaucuacaucagcagaagacugcugggcaccuucaccuggacccugagcgacagcgagggcgaggacacccccggcggcuacugccugaccagauggaugcugaucgaggccgagcugaagugcuucggcaacaccgccguggccaagugcaacgagaagcacgacgaggaguucugcgacaugcugagacuguucgacuucugcaagcaggccauccagagacugaaggccgaggcccagaugagcauccagcugaucaacaaggccgugaacgcccugaucaacgaccagcugaucaugaagaaccaccugagagacaucaugggcauccccuacugcaacuacagcaaguacugguaccugaaccacaccaccaccggcagaaccagccugcccaagugcuggcuggugagcaacggcagcuaccugaacgagacccacuucagcgacgacaucgagcagcaggccgacaacaugaucaccgagaugcugcagaaggaguacauggagagacagggcaagaccccccugggccugguggaccuguucguguucagcaccagcuucuaccugaucagcaucuuccugcaccuggugaagauccccacccacagacacaucgugggcaagagcugccccaagccccacagacugaaccacaugggcaucugcagcugcggccuguacaagcagcccggcgugcccgugaaguggaagagaugaggacuagucccuguucccagagcccacuuuuuuuucuuuuuuugaaauaaaauagccugucuuucagaucuaaaaaaaaaaaaaaaaaaaaaaaaaaaaaaaaaaaaaaaaaaaaaaaaaaaaaaaaaaaaaaaaaaaaaaaaaaaaaaaaaaaaaaaaaaaaaaaaaaaa

SEQ ID NO: 37409 - RNA, 1743 nt, Artificial Sequence
  mRNA product Design a-2 (A100) comprising derived and/or modified sequence from LASV(LM765-SLE-2012;Clade IV)__AIT17814__GPCmut10 (opt4)
aggagaguccgcucagccagguugcagaagcggcuuagcguguguccuaaucuucucucugcguguagguaggccugugccgcaaacaagcuuaccaugggccagaucgugaccuucuuccaggaggugccccacgugaucgaggaggugaugaacaucgugcugaucgcccugagcauccuggccgugcugaagggccuguacaacuucgccaccugcggccuggugggccuggugaccuuccugcugcugugcggcagaagcugcaccaccagccuguacaagggcguguacgagcugcagacccuggagcugaacauggagacccugaacaugugcaugccccugagcugcaccaagaacaacagccaccacuacaucauggugggcaacgagaccggccuggagcugacccugaccaacaccagcaucaucgaccacaaguucugcaaccugagcgacgcccacagaaagaaccuguacgaccacgcccugaugagcaucaucagcaccuuccaccugagcauccccaacuucaaccaguacgaggccaugagcugcgacuucaacggcggcaagaucagcgugcaguacaaccugagccacagcuacgccaaggacgccgccgaccacugcggcaccguggccaacggcgugcugcagaccuucaugagaauggccuggggcggcagcuacaucgcccuggacagcggcagaggcagaugggacugcaucaugaccagcuaccaguaccugaucauccagaacaccaccugggaggaccacugccaguucagcagacccagccccaucggcuaccugggccugcugagccagagaaccagagacaucuacaucagcagaagacugcugggcaccuucaccuggacccugagcgacagcgagggcaaggacacccccggcggcuacugccugaccagauggaugcugaucgaggccgagcugaagugcuucggcaacaccgccguggccaagugcaacgagaagcacgacgaggaguucugcgacaugcugagacuguucgacuucugcaagcaggccauccagagacugaaggccgaggcccagaugagcauccagcugaucaacaaggccgugaacgcccugaucaacgaccagcugaucaugaagaaccaccugagagacaucaugggcauccccuacugcaacuacagcaaguacugguaccugaaccacaccaccaccggcaagaccagccugcccaagugcuggcuggugagcaacggcagcuaccugaacgagacccacuucagcgacgacaucgagcagcaggccgacaacaugaucaccgagaugcugcagaaggaguacauggagagacagggcaagaccccccugggccugguggaccuguucguguucagcaccagcuucuaccugaucagcaucuuccugcaccuggugaagauccccacccacagacacaucgugggcaagcccugccccaagccccacagacugaaccacaugggcaucugcagcugcggccuguacaagcagcccggcgugcccgugaaguggaagagaugaggacuagucccuguucccagagcccacuuuuuuuucuuuuuuugaaauaaaauagccugucuuucagaucuaaaaaaaaaaaaaaaaaaaaaaaaaaaaaaaaaaaaaaaaaaaaaaaaaaaaaaaaaaaaaaaaaaaaaaaaaaaaaaaaaaaaaaaaaaaaaaaaaaaa

SEQ ID NO: 37410 - RNA, 1743 nt, Artificial Sequence
  mRNA product Design a-2 (A100) comprising derived and/or modified sequence from LASV(LM776-SLE-2012;Clade IV)__AIT17824__GPCmut10 (opt4)
aggagaguccgcucagccagguugcagaagcggcuuagcguguguccuaaucuucucucugcguguagguaggccugugccgcaaacaagcuuaccaugggccagaucgugaccuucuuccaggaggugccccacgugaucgaggaggugaugaacaucgugcugaucgcccugagcauccuggccgugcugaagggccuguacaacuucgccaccugcggccuggugggccuggugaccuuccugcugcugugcggcagaagcugcaccaccagcguguacaagggcguguacgagcugcagacccuggagcugaacauggagacccugaacaugugcaugccccugagcugcaccaagaacaacagccaccacuacaucauggugggcaacgagaccggccuggagcugacccugaccaacaccagcaucaucaaccacaaguucugcaaccugagcgacgcccacaagaagaaccuguacgaccacgcccugaugagcaucaucagcaccuuccaccugagcauccccaacuucaaccaguacgaggccaugagcugcgacuucaacggcggcaagaucagcgugcaguacaaccugagccacagcuacgccggcgacgccgccaaccacugcggcaccguggccaacggcgugcugcagaccuucaugagaauggccuggggcggcagcuacaucgcccuggacagcggccacggcaagugggacugcaucaugaccagcuaccaguaccugaucauccagaacaccaccugggaggaccacugccaguucagcagacccagccccaucggcuaccugggccugcugagccagagaaccagagacaucuacaucagcagaagacugcugggcaccuucaccuggacccugagcgacagcgagggcaaggacacccccggcggcuacugccugaccagauggaugcugaucgaggccgagcugaagugcuucggcaacaccgccguggccaagugcaacgagaagcacgacgaggaguucugcgacaugcugagacuguucgacuucugcaagcaggccauccagagacugaaggccgaggcccagaugagcauccagcugaucaacaaggccgugaacgcccugaucaacgaccagcugaucaugaagaaccaccugagagacaucaugggcauccccuacugcaacuacagcaaguacugguaccugaaccacaccaccaccggcaagaccagccugcccaagugcuggcuggugagcaacggcagcuaccugaacgagacccacuucagcgacgacaucgagcagcaggccgacaacaugaucaccgagaugcugcagaaggaguacauggagagacagggcaagaccccccugggccugguggaccuguucguguucagcaccagcuucuaccugaucagcaucuuccugcaccuggugaagauccccacccacagacacaucgugggcaagagcugccccaagccccacagacugaaccacaugggcaucugcagcugcggccuguacaagcagcccggcgugcccgugagauggaagagaugaggacuagucccuguucccagagcccacuuuuuuuucuuuuuuugaaauaaaauagccugucuuucagaucuaaaaaaaaaaaaaaaaaaaaaaaaaaaaaaaaaaaaaaaaaaaaaaaaaaaaaaaaaaaaaaaaaaaaaaaaaaaaaaaaaaaaaaaaaaaaaaaaaaaa

SEQ ID NO: 37411 - RNA, 1743 nt, Artificial Sequence
  mRNA product Design a-2 (A100) comprising derived and/or modified sequence from LASV(Mad39;Clade IV)__ANH09722__GPCmut10 (opt4)
aggagaguccgcucagccagguugcagaagcggcuuagcguguguccuaaucuucucucugcguguagguaggccugugccgcaaacaagcuuaccaugggccagaucgugaccuucuuccaggaggugccccacgugaucgaggaggugaugaacaucgugcugaucgcccugagcauccuggccgugcugaagggccuguacaacguggccaccugcggccugaucggccuggugaccuuccugcugcugugcggcagaagcugcaccaccacccuguacaagggcguguacgagcugcaggcccuggagcugaacauggagacccugaacaugugcaugccccugagcugcaccaagaacaacagccaccacuacaucagagugggcaacgagaccggccuggagcugacccugaccaacaccagccugaucaaccacaaguucugcaaccugagcgacgcccacaagaagaaccuguacgaccacgcccugaugagcaucaucagcaccuuccaccugagcauccccaacuucaaccaguacgaggccaugagcugcgacuucaacgacggcaagaucagcgugcaguacaaccugagccacaccuacgccggcgacaccgccaaccacugcggcaccguggccaacggcgugcugcagaccuucaugagaauggccuggggcggcagcuacaucgcccuggacagcggcagaggcggcugggacugcaucaugaccagcuaccaguaccugaucauccagaacaccaccugggaggaccacugccaguucagcagacccagccccaucggcuaccugggccugcugagccagagaaccagagacaucuacaucagcagaagacugcugggcaccuucaccuggacccugagcgacagcgagggcaaggacacccccggcggcuacugccugaccagauggaugcugaucgaggccgagcugaagugcuucggcaacaccgccguggccaagugcaacgagaagcacgacgaggaguucugcgacaugcugagacuguucgacuucugcaagcaggccauccagagacugaaggccgaggcccagaugagcauccagcugaucaacaaggccgugaacgcccugaucaacgaccagcugaucaugaagaaccaccugagagacaucaugggcauccccuacugcaacuacagcaaguacugguaccugaaccacaccgugaccggcaagaccagccugcccaagugcuggcuggugagcaacggcagcuaccugaacgagacccacuucagcgacgacaucgagcagcaggccgacaacaugaucaccgagaugcugcagaaggaguacauggagagacagggcaagaccccccugggccugguggaccuguucguguucagcaccagcuucuaccugaucagcaucuuccugcaccuggugaagauccccacccacagacacguggugggcaagcccugccccaagccccacagacugaaccacaugggcaucugcagcugcggcuucuacaagcagcccggcgugcccgugagauggaagagaugaggacuagucccuguucccagagcccacuuuuuuuucuuuuuuugaaauaaaauagccugucuuucagaucuaaaaaaaaaaaaaaaaaaaaaaaaaaaaaaaaaaaaaaaaaaaaaaaaaaaaaaaaaaaaaaaaaaaaaaaaaaaaaaaaaaaaaaaaaaaaaaaaaaaa

SEQ ID NO: 37412 - RNA, 1743 nt, Artificial Sequence
  mRNA product Design a-2 (A100) comprising derived and/or modified sequence from LASV(Z0947-SLE-2011;Clade IV)__AIT17840__GPCmut10 (opt4)
aggagaguccgcucagccagguugcagaagcggcuuagcguguguccuaaucuucucucugcguguagguaggccugugccgcaaacaagcuuaccaugggccagaucgugaccuucuuccaggaggugccccacgugaucgaggaggugaugaacaucgugcugaucgcccugagcauccuggccgugcugaagggccuguacaacuucgccaccugcggccuggugggccuggugaccuuccugcugcugugcggcagaagcugcaccaucagccuguacaagggcguguacgagcugcagacccuggagcugaacauggagacccugaacaugugcaugccccugagcugcaccaagaacaacagccaccacuacaucauggugggcaacgagaccggccuggagcugacccugaccaacaccagcaucaucaaccacaaguucugcaaccugagcgacgcccacaagaagaaccuguacgaccacgcccugaugagcaucaucagcaccuuccaccugagcauccccaacuucaaccaguacgaggccaugagcugcgacuucaacggcggcaagaucagcgugcaguacaaccugagccacagcuacgccggcgacgccgccaaccacugcggcaccguggccaacggcgugcugcagaccuucaugagaauggccuggggcggcagcuacaucgcccuggacagcggcagagacagaugggacugcaucaugaccagcuaccaguaccugaucauccagaacaccaccugggaggaccacugccaguucagcagacccagccccaucggcuaccugggccugcugagccagagaaccagagacaucuacaucagcagaagacugcugggcaccuucaccuggacccugagcgacagcgagggcaaggacacccccggcggcuacugccugaccagauggaugcugaucgaggccgagcugaagugcuucggcaacaccgccguggccaagugcaacgagaagcacgacgaggaguucugcgacaugcugagacuguucgacuucugcaagcaggccauccagagacugaaggccgaggcccagaugagcauccagcugaucaacaaggccgugaacgcccugaucaacgaccagcugaucaugaagaaccaccugagagacaucaugggcauccccuacugcaacuacagcaaguacugguaccugaaccacaccaccaccggcaagaccagccugcccaagugcuggcuggugagcaacggcagcuaccugaacgagacccacuucagcgacgacaucgagcagcaggccgacaacaugaucaccgagaugcugcagaaggaguacauggagagacagggcaagaccccccugggccugguggaccuguucguguucagcaccagcuucuaccugaucagcaucuuccugcaccuggugaagauccccacccacagacacaucgugggcaagcccugccccaagccccacagacugaaccacaugggcaucugcagcugcggccuguacaagcagcccggcgugcccgugaaguggaagagaugaggacuagucccuguucccagagcccacuuuuuuuucuuuuuuugaaauaaaauagccugucuuucagaucuaaaaaaaaaaaaaaaaaaaaaaaaaaaaaaaaaaaaaaaaaaaaaaaaaaaaaaaaaaaaaaaaaaaaaaaaaaaaaaaaaaaaaaaaaaaaaaaaaaaa

SEQ ID NO: 37413 - RNA, 1743 nt, Artificial Sequence
  mRNA product Design a-2 (A100) comprising derived and/or modified sequence from LASV(Josiah;Clade IV)__NP_694870__GPCmut10 (opt5)
aggagaguccgcucagccagguugcagaagcggcuuagcguguguccuaaucuucucucugcguguagguaggccugugccgcaaacaagcuuaccaugggccagaucgugaccuucuuucaagaggucccccacguuauugaagaggugaugaacaucgugcugauugcccucagcguccuggcugugcuuaaggggcuguacaauuucgccacaugcggacucguuggccuggugacguuucuucugcucugugggagauccugcaccacaucucuguauaaaggagucuacgaacugcagacccucgagcugaacauggaaacacuuaauauguguaugccucugagcugcaccaagaacaauucccaucacuauaucauggugggcaacgagacagggcucgagcugacccuuacgaauaccucuauuaucaaccauaaauucuguaaucugagcgacgcgcacaagaaaaaccucuacgaucaugcucugauguccaucauuucuacauuucaccugagcaucccgaauuucaaccaguaugaagccauguccugcgacuuuaauggaggcaagauuagcguucaguacaaccucucucacuccuaugccggcgaugcugccaaucauugugggaccguggcuaacggaguccugcaaacauucaugcggauggccuggggcgggagcuacaucgcgcuugacucuggacgcggcaacugggauugcauuaugaccuccuaccaguaucugaucauucagaauacgacaugggaggaccacugucaguuuagcagacccucuccuaucggguaccucggacugcuuucccaacggacccgcgauaucuauauuagcagacggcugcucggcacauucaccuggacccuguccgacucugaaggcaaggauacacccgggggauacugccugacgcgcuggaugcucaucgaggccgagcugaaauguuuuggcaacaccgcuguggccaagugcaaugaaaaacaugacgaggaguucugcgauaugcuuagacuguuugacuucuguaagcaggcuauucagcggcucaaagccgaagcgcagaugagcauccaacugauuaacaaggccgugaaugcucuuaucaacgaucagcugaucaugaagaaucaccuccgcgacauuauggggaucccuuauugcaacuacuccaaauauugguaccugaaucacacaaccacaggaagaaccagccugcccaaguguuggcucgucucuaacggcuccuaccugaaugaaacgcauuucagcgacgauauugagcagcaagccgacaacaugaucacagagaugcuucagaaagaauauauggagcggcaggggaagaccccucugggacucguugaucuguuuguguucucuaccagcuuuuaccugauuuccaucuuccuucaccucgugaaaaucccgacacaucgccacauugucggcaagucuugccccaaaccucauagacugaaucacaugggcaucuguagcugcgggcuguauaagcagcccggagugccuguuaaguggaaacggugaggacuagucccuguucccagagcccacuuuuuuuucuuuuuuugaaauaaaauagccugucuuucagaucuaaaaaaaaaaaaaaaaaaaaaaaaaaaaaaaaaaaaaaaaaaaaaaaaaaaaaaaaaaaaaaaaaaaaaaaaaaaaaaaaaaaaaaaaaaaaaaaaaaaa

SEQ ID NO: 37414 - RNA, 1740 nt, Artificial Sequence
  mRNA product Design a-2 (A100) comprising derived and/or modified sequence from LASV(LP;Clade I)__AAF86701__GPCmut10 (opt5)
aggagaguccgcucagccagguugcagaagcggcuuagcguguguccuaaucuucucucugcguguagguaggccugugccgcaaacaagcuuaccaugggccagaucauuaccuucuuucaagaggugccccacgucaucgaagagguuaugaacauugugcugaucgcccucagccugcuugcuauucugaaggggcucuacaauaucgccacaugcggaaucauuggccugguggcguuccuuuuucugugugggaaauccugcucucucacgcugaagggaggcuaugaacugcagacccucgagcugaacauggaaacacuuaauauguguaugccucugagcugcaccaaaaacuccucucaucacuacaucagagucgggaaugagacaggacucgagcugacccuuacaaacaccagcauuaucaaucauaaguucuguaaccuguccgacgcucacaaaaagaaucucuaugaucaugcccugaugucuauuaucagcacguuucaccuguccauuccgaacuucaaucaguacgaagccaugagcugcgacuuuaacggcggcaagaucucugugcaguauaaucucucccacagcuacgcuggggaugccgcugagcauuguggaaccguugccaacggcgugcugcaaacauucaugcggauggcguggggagggcgcuauaucgcccuugacucuggcaaagggaauugggauugcauuaugaccuccuaccaguaccugaucauucagaacacaaccugggaagaccacugucaguuuagcagacccucuccuaucggauaucucggccugcuuucccaacggacgcgcgauauuuacaucagcagacggcugcucggcacauucaccuggacacuguccgacucugaggggaacgagacccccggaggcuauugccugacccgcuggaugcucaucgaagcugagcugaaguguuuugggaauacagccgucgcuaaaugcaacgaaaagcaugaugaggaguucugcgacaugcuuagacuguuugauuucuguaaacaggccauucggcgccucaaggcggaagcccagaugagcauccagcugauuaauaaggcugugaacgcccuuaucaaugaccaacugauuaugaaaaaccaccucagagauaucaugggaaucccuuacugcaauuauuccaaguacugguaucugaaccacacgagcucuggccggaccucccugcccaaauguuggcucauuagcaaugggucuuaccugaacgagacacaguucagcgacgacaucgaacagcaagcugauaauaugauuaccgagaugcuucagaaggaauacaucgagcgccagggaaaaacaccucugggccucguugacauuuuuaucuucuccaccucuuuuuaucugauuagcaucuuccugcaucuuaucaagauuccgacgcacagacauaucgugggcaaacccugcccuaagccccaccggcucaaccauaugggggucuguuccugcggacuguacaagcacccuggcgugcccacaaaauggaagcgcugaggacuagucccuguucccagagcccacuuuuuuuucuuuuuuugaaauaaaauagccugucuuucagaucuaaaaaaaaaaaaaaaaaaaaaaaaaaaaaaaaaaaaaaaaaaaaaaaaaaaaaaaaaaaaaaaaaaaaaaaaaaaaaaaaaaaaaaaaaaaaaaaaaaaa

SEQ ID NO: 37415 - RNA, 1740 nt, Artificial Sequence
  mRNA product Design a-2 (A100) comprising derived and/or modified sequence from LASV(803213;Clade II)__AAF86703__GPCmut10 (opt5)
aggagaguccgcucagccagguugcagaagcggcuuagcguguguccuaaucuucucucugcguguagguaggccugugccgcaaacaagcuuaccaugggccagaucauuaccuucuuucaagaggugccccacgucaucgaagagguuaugaacauugugcugaucgcccucagccugcuugcuauucugaaggggaucuacaauguggccacaugcggacucuucggccugaucuccuuucuucugcucugugggagaucuugcagcgucacguauaaaggaguguacgaacugcagacccuggagcucaacauggcgaaucugaacauguguaugccucuuuccugcacaaagaauaacucucaucacuauauuaugguuggcaaugaaaccgggcuggagcucacacugaccaacacaagcaucauuaaucauaaauucuguaaccuuuccgacgcucacaagaaaaaucuguacgaucaugcccucaugucuaucauuagcaccuuucaccuguccaucccgaacuucaaucaguaugaggccaugagcugcgacuuuaacggaggcaagauuucugugcaguacaaucugucccacagcuucgcugucgaugccgcuaaccauuguggcacgaucgccaacggggugcuccaaaccuuuaugcggauggcguggggaggcucuuauaucgcccuggacuccgggaagggaaauugggauugcauuaugacaagcuaccaguaccuuaucauucagaacaccacaugggaagaccacugucaguucucucgccccuccccuaucggcuaucuggggcuccugagccaaagaacccgggauauuuacaucucccgcagacuucugggaacguuuacauggacccucucugacagcgagggcaaugaagcucccggcggguauugccugacacgguggaugcugaucgaggccgagcucaaauguuucggaaacaccgcuguugccaagugcaaugaaaaacaugaugaggaauuuugcgacaugcugcgccuuuucgauuucuguaagcaggcgauuaaaagacugaagaccgaggcccagauguccauccagcucauuaacaaggcugugaaugcccugaucaacgaccaacuuauuaugaaaaaucaucugcgggauaucaugggcaucccuuacugcaacuauagccgcuacugguaucucaaucacacagucacggggaagaccucucugcccagauguuggcugguguccaacggaagcuaccucaaugaaacacacuuuucugacgacauugagcagcaggcugauaacaugaucaccgagaugcugcaaaaagaauacauggaccggcagggcaagacaccucuugggcugguggaucucuucgucuuuagcaccuccuucuaucugauuucuaucuuucugcaccuuguuaaaauuccgacgcaucgccacaucgugggaaagcccugcccuaaaccccauagacucaaucacaugggcauuuguagcugcggccuguacaagcacccuggggugcccgucaaguggaaacggugaggacuagucccuguucccagagcccacuuuuuuuucuuuuuuugaaauaaaauagccugucuuucagaucuaaaaaaaaaaaaaaaaaaaaaaaaaaaaaaaaaaaaaaaaaaaaaaaaaaaaaaaaaaaaaaaaaaaaaaaaaaaaaaaaaaaaaaaaaaaaaaaaaaaa

SEQ ID NO: 37416 - RNA, 1740 nt, Artificial Sequence
  mRNA product Design a-2 (A100) comprising derived and/or modified sequence from LASV(GA391;Clade III)__CAA36645__GPCmut10 (opt5)
aggagaguccgcucagccagguugcagaagcggcuuagcguguguccuaaucuucucucugcguguagguaggccugugccgcaaacaagcuuaccaugggccagaucgugaccuucuuucaagaggucccccacguuauugaagaggugaugaacaucgugcugauugcccucagcauccuggcuauucuuaaggggcuguacaaugucgccacaugcggacucaucggccuggugacguuccuucugcucuccgggagaucuuguagccugaucuauaaaggaaccuacgaacugcagacacucgagcugaacauggaaacccuuaauaugugcaugccucuguccuguacaaagaacaauucucaucacuauauucggguuggcaacgagaccgggcucgagcugacacuuaccaauacgagcauccugaaccauaaauuuugcaaucucuccgacgcgcacaagcgcaaccuguacgaucauucucugaugagcauuaucuccaccuuccaccucagcauuccgaauuuuaaccaguaugaagcuaugucuugugacuucaauggaggcaaaaucacagugcaguacaaccugucccacagcuuugccgucgaugccgcuggccauugcgggacccuugccaauggagugcugcaaacauucaugagaauggcuuggggcgggucuuauauugcccucgacuccggacggggcaacugggauuguaucaugaccagcuaccaguaccugaucauucagaacacgacaugggacgaucacugccaguuuucucgccccuccccuaucggguaucuuggacugcucagccaaagaacccgggacauuuacaucucccgcagacugcugggcacauucaccuggacccucucugauagcgagggcaaugaaacacccgggggauauugucugacgcgguggaugcuuauugaggcggagcugaagugcuuuggcaacaccgccguugcuaaguguaaugaaaaacaugacgaggaguucugcgauaugcuccgccuguuugacuucugcaagcaggccaucagacggcuuaaaacagaagcucagauguccauccagcugauuaacaaggccgugaaugcgcucaucaacgaucaacugauuaugaaaaaucaucugcgcgacaucauggggauuccuuacuguaacuauagcagauacugguaucucaaucacaccucuacaggaaagaccucccugccccggugcuggcuuaucagcaacggcucuuaccugaaugaaacgaaguucagcgacgauaucgagcagcaggccgacaacaugauuacagagaugcuccaaaaagaauacaucgaucgccaggggaagaccccucugggacuggucgaccuuuuuguguucuccaccucuuuuuaucucauuagcaucuuccugcaccuggugaaaauuccgacacacagacauaucgucggcaagcccuguccuaaaccccaccggcucaaucauaugggcauuugcuccugugggcuguacaagcagccuggaguucccgugagauggaaacgcugaggacuagucccuguucccagagcccacuuuuuuuucuuuuuuugaaauaaaauagccugucuuucagaucuaaaaaaaaaaaaaaaaaaaaaaaaaaaaaaaaaaaaaaaaaaaaaaaaaaaaaaaaaaaaaaaaaaaaaaaaaaaaaaaaaaaaaaaaaaaaaaaaaaaa

SEQ ID NO: 37417 - RNA, 1743 nt, Artificial Sequence
  mRNA product Design a-2 (A100) comprising derived and/or modified sequence from LASV(AV;Clade V)__CCA30314__GPCmut10 (opt5)
aggagaguccgcucagccagguugcagaagcggcuuagcguguguccuaaucuucucucugcguguagguaggccugugccgcaaacaagcuuaccaugggccagaucgugaccuucuuucaagaggucccccacguuauugaagaggugaugaacaucgugcugauugcccucagcauccuggcuguccuuaaggggcuguacaauauugccacaugcggacucaucggccugaucacguuccuucugcucugugggagauccugcucuagcaaccuguauaaaggaguguacgaacugcagucccucgaccugaauauggagacccuuaacauguguaugccucugucuugcacaaagaauaacagccaucacuauauucggguuggcaaugauaccgggcucgaacugacacuuaccaacacauccauccugaaucauaaauuuuguaaccucucugacgcgcacaagaaagaucuguacgaccaugcucugaugagcauuaucuccaccuuccaccucagcauuccgaauuuuaaccaguaugaggccaugucuugcgauuucaauggaggcaagaucuccgugcaguacaaccugagccacucuuaugccauugacgcugccaaucauuguggcacggucgcuaacgggauccuucaaaccuuuaugcgcauggccuggggaggcuccuacaucgcgcuggauagcgggagaggaaacugggacugcauuaugacaucuuaccaguaucucaucauucagaauaccacaugggagaaccacugucaguucucccggcccagcccuaucggcuaccuggggcuucugucccaacgcaccagagauauuuauaucucucggcgccuccugggaacguuuacauggacccugagcgacuccgaaggcaaugccacacccggcggguacugccucaccagauggaugcugaucgaggcugaacuuaaguguuucggaaacaccgccguggcuaaaugcaaugagaagcaugaugaggaauuuugcgacaugcugcgccucuucgauuuuuguaaacaggccauuagccggcugaagucugaggcgcagauguccauccagcuuauuaacaaagccguuaaugcucugaucaacgaccaacucauuaugaagaaucaccugagagacaucaugggcaucccuuauugcaacuacagcaaguauugguaccugaaucacacaauuacggggaaaaccucucuccccaaguguuggcuggugagcaacggauccuaccuuaaugaaacacauuucucugaugacaucgagcagcaggccgauaacaugauuaccgaaaugcugcaaaaagaguauauggagcggcagggcaagacaccucucgggcuggucgaccuguucguguuuagcaccuccuucuaccuuaucagcauuuuucuccgccuggugaaaaucccgacgcacagacauauugucggaaagcccugcccuaaaccccaccggcugaaucauaugggcaucuguucuugcggccucuauaagcagccugggguucccgugcgcuggaagagaugaggacuagucccuguucccagagcccacuuuuuuuucuuuuuuugaaauaaaauagccugucuuucagaucuaaaaaaaaaaaaaaaaaaaaaaaaaaaaaaaaaaaaaaaaaaaaaaaaaaaaaaaaaaaaaaaaaaaaaaaaaaaaaaaaaaaaaaaaaaaaaaaaaaaa

SEQ ID NO: 37418 - RNA, 1740 nt, Artificial Sequence
  mRNA product Design a-2 (A100) comprising derived and/or modified sequence from LASV(Togo/2016/7082;Clade VI)__AMR44577__GPCmut10 (opt5)
aggagaguccgcucagccagguugcagaagcggcuuagcguguguccuaaucuucucucugcguguagguaggccugugccgcaaacaagcuuaccaugggccagaucauuaccuucuuucaagaggugccccacgucaucgaagagguuaugaacauugugcugaucgcccucagccugcuugcuauucugaaggggguguacaaugucgccacaugcggaaucaucggccucgugacguuccuguuucuuugugggagauccugcucucugauuuauaaaggaagcuacgaacuccagacccuggagcugaacauggaaacacucaauauguguaugccucuguccugcaccaagaacucuagccaucacuauauccggguuggcaaugagacagggcuugagcugacccucacaaacaccuccauuaucaaucauaaauucuguaaccugucugacgcgcacaagcgcaaucuuuacgaucaugcucugaugagcauucucuccacguuucaccugagcaucccgaacuucaaucaguaugaagccaugucuugcgacuuuaacggaggcaaaauuuccgugcaguacaaucugagccacgccuaugcugucgaugccgcugagcauuguggcaccguggccaacgggguucuccaaacauucaugagaauggcguggggaggcucuuacaucgcccuggacuccgggcggggaaauugggauugcaucaugaccagcuaccaguaucuuauuauccagaacacaaccugggaagaccacugucaguuuucucgccccuccccuauuggcuaccuggggcuccugagccaaagaacgcgggauaucuauauuucccgcagacuucugggaacauucaccuggacacucucugacagcgagggcaacgagacccccggcggguacugccugacccgguggaugcugaucgaagcugagcucaaguguuuuggaaauacagccguggcuaagugcaacgaaaaacaugaugaggaguucugcgacaugcugcgccuuuuugauuucuguaagcaggccauccagagacugaaauccgaagcgcagaugagcauucaacucaucaauaaggccgucaacgcucugauuaaugaccagcuuaucaugaaaaaccaucugcgggauaugaugggcauuccuuauugcaauuacucuaaguauugguaccucaaccacacguccagcgggcgcaccucucugcccaaguguuggcuggugagcaauggauccuaccucaacgagacacacuucucugacgacaucgaacagcaagccgauaauaugaucaccgagaugcugcagaaagaauauauugacagacagggcaagacaccucuugggcugguggaucucuuugucuucagcaccuccuuuuaccugaucagcauuuuccugcaccuuaucaaaauuccgacgcaucggcacaucguuggaaagcccugcccuaaaccccaucgccucaaccacaugggcauuuguucuugcggccuguauaagcagccuggggugcccacaagauggaaacggugaggacuagucccuguucccagagcccacuuuuuuuucuuuuuuugaaauaaaauagccugucuuucagaucuaaaaaaaaaaaaaaaaaaaaaaaaaaaaaaaaaaaaaaaaaaaaaaaaaaaaaaaaaaaaaaaaaaaaaaaaaaaaaaaaaaaaaaaaaaaaaaaaaaaa

SEQ ID NO: 37419 - RNA, 1740 nt, Artificial Sequence
  mRNA product Design a-2 (A100) comprising derived and/or modified sequence from LASV(KAK-428;Clade n.d. (VII))__ANH09740__GPCmut10 (opt5)
aggagaguccgcucagccagguugcagaagcggcuuagcguguguccuaaucuucucucugcguguagguaggccugugccgcaaacaagcuuaccaugggccagaucgugaccuucuuucaagaggucccccacguuauugaagaggugaugaacaucgugcugauugcccucagccugcuugcuauccugaaggggcucuacaauuucgccacaugcggagucauuggccugaucacguuucuucugcucugugggagauccugcucugcgaccuauaaaggacaguacgaacugcagacacuggagcucaacauggaaagccugaauauguguaugccucuuuccugcaccaagaacaauucucaucacuauauccgggcuggcaacaauacagggcuggagcucacccugacaaacaccagcauuaucucccauaaauucuguaaucuuucugacgcccacaagaaaaaccuguacgaucauacgcucaugagcauuaucaccacauuucaccuguccauuccgaauuucaaccaguaugaggccaugagcugcgacuuuaauggaggcaagaucucuauucaauacaaccugucccacagcuaugcuggcgaugccgcucagcauugugggaccguggccaauggaguucuccagacauucaugcgcauggcguggggcgggucuuaccuggcccuugacuccggaagacggggcugggauugcaucaucagcucuuaccaguaucugauuauccaaaacaccacgugggacgaucacugucaguuuucccgccccagcccuauuggguaccucggauucgugucccagaagacaagagacaucuauauuucucggcgccugcuuggcaccuuuacauggacccugagcgauuccgaaggccaugacaugcccgggggauacugccucaccagauggaugcugaucgaggcugaucugaaauguuucggcaacacagccgucgcuaagugcaaugaaaaacacgacgaggaguuuugcgauauguggcgccucuucgacuucuguaagcaggccauccaacggcugaaagcggaagcccagaugaacauucagcuuaucaauaaggcugugaacgcccugauuaaugaccaacucaugaugaagaaccaccugagagauaucauggggauuccuuauugcaauuacagcaaauuuugguaucuuaacaauacgaccacaggacggaccucucugccccgcuguuggcucaucuccaacggcagcuaccugaaugagacacauuucucugacgauaucgaacagcaggcugacaacaugauuaccgagaugcugcagaaggaauacauggauagacaagggaaaacgccucucggacugguugaccuuuuuguguucagcacauccuuuuaucugaucaccauuuuccuccaccuggucaagaucccgacccaucggcacauugugggcaaacccugcccuaagccccaucgccugaaucacaugggcaucuguucuugcgggcuuuacaaacagccuggagugcccgucagauggaagcggugaggacuagucccuguucccagagcccacuuuuuuuucuuuuuuugaaauaaaauagccugucuuucagaucuaaaaaaaaaaaaaaaaaaaaaaaaaaaaaaaaaaaaaaaaaaaaaaaaaaaaaaaaaaaaaaaaaaaaaaaaaaaaaaaaaaaaaaaaaaaaaaaaaaaa

SEQ ID NO: 37420 - RNA, 1740 nt, Artificial Sequence; identical to SEQ ID NO: 37414
  mRNA product Design a-2 (A100) comprising derived and/or modified sequence from LASV(Pinneo-NIG-1969;Clade I)__AIT17836__GPCmut10 (opt5)

SEQ ID NO: 37421 - RNA, 1740 nt, Artificial Sequence
  mRNA product Design a-2 (A100) comprising derived and/or modified sequence from LASV(ISTH0009-NIG-2011;Clade II)__AIT17404__GPCmut10 (opt5)
aggagaguccgcucagccagguugcagaagcggcuuagcguguguccuaaucuucucucugcguguagguaggccugugccgcaaacaagcuuaccaugggccagaucauuaccuucuuucaagaggugccccacgucaucgaagagguuaugaacauugugcugaucgcccucagccugcuugcuauucugaaggggaucuacaauguggccacaugcggacucuucggccuggucuccuuucuucugcucugugggagaucuugcagcacgaccuauaaaggaguguacgaacugcagacacuggagcucgacauggcgucccugaacauguguaugccucuuucuugcaccaagaauaacagccaucacuauaucaugguuggcaaugaaacagggcuggagcucacccugacaaacaccuccauuaucaaucauaaauucuguaaccuuucugaugcucacaagaaaaaucuguacgaccaugcccucaugagcauuaucuccacguuucaccugagcauuccgaacuucaaucaguaugaggccaugucuugcgauuuuaacggaggcaagaucuccgugcaguacaaucugagccacgcuuaugccgucgacgcugccaaccauuguggcaccauugcgaauggggugcuccaaacauucaugcggauggccuggggaggcucuuacaucgcucuggauuccgggaagggaagcugggacugcaucaugaccucuuaccaguaucuuauuauccagaacacaaccugggaagaucacugucaguuuucccgccccagcccuauuggcuaccuggggcuccugucccaaagaacgcgggacaucuauauuucucgcagacuucugggaacauucaccuggacacucagcgauuccgagggcaacgaaacccccggcggguacugccugacccgguggaugcugaucgaggccgagcucaaauguuuuggaaauacagcuguugccaagugcaacgaaaaacaugacgaggaguucugcgauaugcugcgccuuuuugacuucuguaagcaggcgaucagacggcugaaaacggaagcccagaugagcauucagcucaucaauaaggcugugaacgcccugauuaaugaucaacuuaucaugaagaaccaucugcgcgacauuaugggcaucccuuauugcaauuacucuaaauauugguaccucaaccacaccgucacagggaagaccucccugcccagauguuggcuggugagcaauggaucuuaccucaacgaaacacacuucagcgacgauaucgagcagcaggcugacaauaugauuaccgagcugcuucaaaaagaauauauggaucggcagggcaagacgccucuggggcucguggaccuguuugucuucuccacaucuuuuuaccugaucagcauuuuccuucaccucaucaaaauuccgacccaucgccacaucaccggaaagcccugcccuaaaccccauagacugaaccacaugggcauuuguuccugcggccuguauaagcacccugggguucccgugaaguggaaacggugaggacuagucccuguucccagagcccacuuuuuuuucuuuuuuugaaauaaaauagccugucuuucagaucuaaaaaaaaaaaaaaaaaaaaaaaaaaaaaaaaaaaaaaaaaaaaaaaaaaaaaaaaaaaaaaaaaaaaaaaaaaaaaaaaaaaaaaaaaaaaaaaaaaaa

SEQ ID NO: 37422 - RNA, 1740 nt, Artificial Sequence
  mRNA product Design a-2 (A100) comprising derived and/or modified sequence from LASV(ISTH2010-NIG-2012;Clade II)__AIT17482__GPCmut10 (opt5)
aggagaguccgcucagccagguugcagaagcggcuuagcguguguccuaaucuucucucugcguguagguaggccugugccgcaaacaagcuuaccaugggccagaucauuaccuucuuucaagaggugccccacgucaucgaagagguuaugaacauugugcugaucgcccucagccugcuugcuauucugaaggggaucuacaauguggccacaugcggacucuucggccuggucuccuuucuucugcucugugggagaucuugcagcacgaccuauaaaggaguguacgaacugcagacacuggagcucgacauggcgucccugaacauguguaugccucuuucuugcaccaagaauaacagccaucacuauaucaugguuggcaaugaaacagggcuggagcucacccugacaaacaccuccauuaucaaucauaaauucuguaaccuuucugaugcucacaagaaaaaucuguacgaccaugcccucaugagcauuaucuccacguuucaccugagcauuccgaacuucaaucaguaugaggccaugucuugcgauuuuaacggaggcaagaucuccgugcaguacaaucugagccacgcuuaugccgucgacgcugccaaccauuguggcaccauugcgaauggggugcuccaaacauucaugcggauggccuggggaggcucuuacaucgcucuggauuccgggaagggaagcugggacugcaucaugaccucuuaccaguaucuuauuauccagaacauuacaugggaagaucacugucaguuuucccgccccagcccuaucggcuaccuggggcuccugucccaaagaacccgggacauuuauaucucucgcagacuucugggaacguucacauggacccucagcgauuccgagggcaacgaaacacccggcggguacugccugacccgguggaugcugaucgaggccgagcucaaauguuuuggaaauaccgcuguugccaagugcaacgaaaaacaugacgaggaguucugcgauaugcugcgccuuuuugacuucuguaagcaggcgauuagacggcugaaaacagaagcccagaugagcauccagcucauuaauaaggcugugaacgcccugaucaaugaucaacuuauuaugaagaaccaucugcgcgacaucaugggcaucccuuauugcaauuacucuaaauauugguaccucaaccacacggucaccgggaagacaucccugcccagauguuggcuggugagcaauggaucuuaccucaacgaaacccacuucagcgacgauauugagcagcaggcugacaauaugaucacagagcugcuucaaaaagaauauauugaucggcagggcaagaccccucuggggcucguggaccuguuugucuucuccacgucuuuuuaccugaucagcauuuuccuucaccucguuaaaaucccgacacaucgccacguggugggaaagcccugcccuaaaccccauagacugaaccacaugggcauuuguuccugcggccuguauaagcacccugggguccccgugaaguggaaacggugaggacuagucccuguucccagagcccacuuuuuuuucuuuuuuugaaauaaaauagccugucuuucagaucuaaaaaaaaaaaaaaaaaaaaaaaaaaaaaaaaaaaaaaaaaaaaaaaaaaaaaaaaaaaaaaaaaaaaaaaaaaaaaaaaaaaaaaaaaaaaaaaaaaaa

SEQ ID NO: 37423 - RNA, 1740 nt, Artificial Sequence
  mRNA product Design a-2 (A100) comprising derived and/or modified sequence from LASV(Lassa virus/H.sapiens-wt/NGA/2015/ISTH_0543;Clade II)__AVO03639__GPCmut10 (opt5)
aggagaguccgcucagccagguugcagaagcggcuuagcguguguccuaaucuucucucugcguguagguaggccugugccgcaaacaagcuuaccaugggccagaucauuaccuucuuucaagaggugccccacgucaucgaagagguuaugaacauugugcugaucgcccucagccugcuugcuauucugaaggggaucuacaauguggccacaugcggacucuucggccuggucuccuuucuucugcucugugggagaucuugcagcacgaccuauaaaggaguguacgaacugcagacacuggagcucgacauggcgaaccugaauauguguaugccucuuuccugcaccaagaacaauucucaucacuauaucaugguuggcaacgaaacagggcuggagcucacccugacaaauaccagcauuaucaaccauaaauucuguaaucuuuccgaugcucacaagaaaaaccuguacgaccaugcccucaugucuauuaucagcacguuucaccuguccauuccgaauuucaaccaguaugaggccaugagcugcgauuuuaauggaggcaagaucucugugcaguacaaccugucccacaccuaugcugucgacgccgcuaaucauuguggcacaauugccaacggggugcuccaaaccuucaugcggauggcguggggaggcagcuacaucgcccuggauucugggaagggauccugggacugcaucaugacaagcuaccaguaucuuguuauucagaacaccacgugggaagaucacugucaguuuucucgccccuccccuaucggcuaccuggggcuccugagccaaagaacacgggacauuuauaucucccgcagacuucugggaaccuucacauggacccucucugauagcgagggcaaugaaacccccggcggguacugccugacacgguggaugcugauugaggcugagcucaaauguuuuggaaacacggccguggcuaagugcaaugaaaaacaugacgaggaguucugcgauaugcugcgccuuuuugacuucuguaagcaggccaucagacggcugaaaaccgaagcgcagauguccauccagcucauuaacaaggccgucaaugcucugaucaacgaucaacuuauuaugaagaaucaucugcgcgacaucaugggcauuccuuauugcaacuacagcaaauauugguaccucaaucacacagugaccgggaagacaucucugcccagauguuggcugguguccaacggaagcuaccucaaugaaacccacuucucugacgauaucgagcagcaggccgacaacaugaucacggagcugcuucaaaaagaauauauugaucggcagggcaagacaccucuggggcucgucgaccuguuuguuuucagcaccuccuuuuaccugaucucuauuuuccuucaccucgugaaaaucccgacccaucgccacauuacaggaaagcccugcccuaaaccccauagacugaaucacaugggcaucuguagcugcggccuguauaagcacccuggggugcccgucaaguggaaacggugaggacuagucccuguucccagagcccacuuuuuuuucuuuuuuugaaauaaaauagccugucuuucagaucuaaaaaaaaaaaaaaaaaaaaaaaaaaaaaaaaaaaaaaaaaaaaaaaaaaaaaaaaaaaaaaaaaaaaaaaaaaaaaaaaaaaaaaaaaaaaaaaaaaaa

SEQ ID NO: 37424 - RNA, 1740 nt, Artificial Sequence
  mRNA product Design a-2 (A100) comprising derived and/or modified sequence from LASV(Lassa virus/H.sapiens-wt/NGA/2016/ISTH_0009;Clade II)__AVO03571__GPCmut10 (opt5)
aggagaguccgcucagccagguugcagaagcggcuuagcguguguccuaaucuucucucugcguguagguaggccugugccgcaaacaagcuuaccaugggccagaucauuaccuucuuucaagaggugccccacgucaucgaagagguuaugaacauugugcugaucgcccucagccugcuugcuauucugaaggggaucuacaauguggccacaugcggacuccugggccuugucuccuuccugcuccugugugggagaucuugcagcacgaccuauaaaggaguguacgaacugcagacacucgagcuggacauggcgucccuuaacauguguaugccucugucuugcaccaagaauaacagccaucacuauaucaugguuggcaaugaaacagggcucgagcugacccuuacaaacaccuccauuaucaaucauaaauuuuguaaccugucugaugcucacaagaaaaaucucuacgaccaugcccugaugagcauuaucuccacguuccaccugagcauuccgaacuuuaaucaguaugaggccaugucuugcgauuucaacggaggccggaucuccgugcaguacaaucucagccacucuuaugcugucgacgccgcuaaccauuguggcaccauugccaauggggugcugcaaacauuuaugcgcauggcguggggaggcuccuacaucgcccuugauagcgggaagggaucuugggacugcaucaugaccuccuaccaguaucugauuauccagaacacaaccugggaagaucacugucaguucagcagacccuccccuauuggcuaccucgggcugcuuucucaacggacgcgcgacaucuauauuagcagacggcugcucggaacauuuaccuggacacuguccgauagcgagggcaacgaaacccccggcggguacugccugacccgcuggaugcucaucgaggcugagcugaaguguuucggaaauacagccguugcuaaaugcaacgaaaagcaugacgaggaauuuugcgauaugcuuagacuguucgacuuuuguaaacaggccauccggcgccucaagacggaggcgcagaugucuauucagcugaucaauaaagccgugaacgcucuuauuaaugaucaacugaucaugaagaaccaccucagagacauuaugggcaucccuuauugcaauuacuccaaguauugguaccugaaccacaccgucacagggaaaaccagccugccccgguguuggcucgugucuaauggaagcuaccugaacgaaacacauuucuccgacgauaucgagcagcaggccgacaauaugauuaccgagcuucugcaaaaggaauauaucgaucgccagggcaaaacgccucucgggcugguggaccuguucgucuuuucuaccagcuucuaccuuauuuccaucuuucuccaccugguuaagauuccgacacauagacacaucaccggaaaacccugcccuaagccccaucggcugaaccacaugggcauuuguagcugcggccucuauaaucacccuggggugcccgugaaauggaagcgcugaggacuagucccuguucccagagcccacuuuuuuuucuuuuuuugaaauaaaauagccugucuuucagaucuaaaaaaaaaaaaaaaaaaaaaaaaaaaaaaaaaaaaaaaaaaaaaaaaaaaaaaaaaaaaaaaaaaaaaaaaaaaaaaaaaaaaaaaaaaaaaaaaaaaa

SEQ ID NO: 37425 - RNA, 1740 nt, Artificial Sequence
  mRNA product Design a-2 (A100) comprising derived and/or modified sequence from LASV(Lassa virus/H.sapiens-wt/NGA/2016/ISTH_0017;Clade II)__AVO03567__GPCmut10 (opt5)
aggagaguccgcucagccagguugcagaagcggcuuagcguguguccuaaucuucucucugcguguagguaggccugugccgcaaacaagcuuaccaugggccagaucauuaccuucuuucaagaggugccccacgucaucgaagagguuaugaacauugugcugaucgcccucagccugcuugcuauucugaaggggaucuacaauguggccacaugcggacucuucggccuggucuccuuucuucugcucugugggagaucuugcagcacgaccuauaaaggaguguacgaacugcagacacuggagcucgacauggcgucccugaacauguguaugccucuuucuugcaccaagaauaacagccaucacuauaucaugguuggcaaugaaacagggcuggagcucacccugacaaacaccuccauuaucaaucauaaauucuguaaccuuucugaugcucacaagaaaaaucuguacgaccaugcccucaugagcauuaucuccacguuucaccugagcauuccgaacuucaaucaguaugaggccaugucuugcgauuuuaacggaggcaagaucuccgugcaguacaaucugagccacaccuaugcuauugacgccgcuaaccauuguggcacaaucgccaaugggguccuccaaaccuucaugcggauggcguggggaggcucuuacaucgcccuggauuccgggaagggaagcugggacugcauuaugacaucuuaccaguaucuuaucauucagaacaccacgugggaagaucacugucaguuuucccgccccagcccuaucggcuaccuggggcuccugucccaaagaacacgggacauuuauaucucucgcagacuucugggaaccuucacauggacccucagcgauuccgagggcaacgaaacccccggcggguacugccugacacgguggaugcugaucgaggcugagcucaaauguuuuggaaauacggccguggcuaagugcaacgaaaaacaugacgaggaguucugcgauaugcugcgccuuuuugacuucuguaagcaggccauuagacggcugaaaaccgaagcgcagaugagcauccagcucauuaauaaggccguuaacgcucugaucaaugaucaacuuauuaugaagaaccaucugcgcgacaucaugggcaucccuuauugcaauuacucuaaauauugguaccucaaccacacagugaccgggaagacaucccugcccagauguuggcuggucagcaauggaucuuaccucaacgaaacccacuucagcgacgauauugagcagcaggccgacaauaugaucacggagcugcuucaaaaagaauauauggaucggcagggcaagacaccucuggggcucguggaccuguuuguguucuccaccucuuuuuaccugauuagcaucuuccuucaccucguccgcauuccgacccauagacacguuaucggaaaacccugcccuaagccccaucggcugaaccacaugggcauuuguuccugcggccuguauaaacacccuggggugcccgugaaguggaagcgcugaggacuagucccuguucccagagcccacuuuuuuuucuuuuuuugaaauaaaauagccugucuuucagaucuaaaaaaaaaaaaaaaaaaaaaaaaaaaaaaaaaaaaaaaaaaaaaaaaaaaaaaaaaaaaaaaaaaaaaaaaaaaaaaaaaaaaaaaaaaaaaaaaaaaa

SEQ ID NO: 37426 - RNA, 1740 nt, Artificial Sequence
  mRNA product Design a-2 (A100) comprising derived and/or modified sequence from LASV(Lassa virus/H.sapiens-wt/NGA/2018/ISTH_0959;Clade II)__AVV65099__GPCmut10 (opt5)
aggagaguccgcucagccagguugcagaagcggcuuagcguguguccuaaucuucucucugcguguagguaggccugugccgcaaacaagcuuaccaugggccagaucauuaccuucuuucaagaggugccccacgucaucgaagagguuaugaacauugugcugaucgcccucagccugcuugcuauucugaaggggaucuacaauguggucacaugcggacucuucggccugguguccuuucuucugcucugugggagaucuugcagcacgaccuauaaaggaguuuacgaacugcagacacuggagcucgacauggccucccugaacauguguaugccucuuucuugcaccaagaauaacagccaucacuauaucauggugggcaaugaaacagggcuggagcucacccugacaaacaccuccauuaucaaucauaaauucuguaaccuuucugaugcgcacaagaaaaaucuguacgaccaugcucucaugagcauuaucuccacguuucaccugagcauuccgaacuucaaucaguaugaggccaugucuugcgauuuuaacggaggcaagaucuccguccaguacaaucugagccacgccuaugcuauugacgccgcuaaccauuguggcaccaucgccaauggggugcuccaaacauucaugcggauggcguggggaggcucuuacaucgcccuggauuccgggaagggaagcugggacugcauuaugaccucuuaccaguaucuuaucauucagaacacaaccugggaagaucacugucaguuuucccgccccagcccuaucggcuaccuggggcuccugucccaaagaacgcgggacauuuauaucucucgcagacuucugggaacauucaccuggacacucagcgauuccgagggcaacgaaacccccggcggguacugccugacccgguggaugcugaucgaggcugagcucaaauguuuuggaaauacagccguugcuaagugcaacgaaaaacaugacgaggaguucugcgauaugcugcgccuuuuugacuucuguaagcaggccauuagacggcugaaaacggaagcgcagaugagcauccagcucauuaauaaggccgugaacgcucugaucaaugaucaacuuauuaugaagaaccaucugcgcgacaucaugggcaucccuuauugcaauuacucuaaauauugguaccucaaccacaccgucacagggaagaccucccugcccagauguuggcuggugagcaauggaucuuaccucaacgaaacacacuucagcgacgauauugagcagcaggccgacaauaugaucaccgagcugcuucaaaaagaauauauugaucggcagggcaagacgccucuggggcucguggaccuguuugucuucuccacaucuuuuuaccugaucagcauuuuccuucaccucguuaaaaucccgacccaucgccacgugauuggaaagcccugcccuaaaccccauagacugaaccacaugggcaucuguuccugcggccuguauaagcacccuggggugcccgucaaguggaaacggugaggacuagucccuguucccagagcccacuuuuuuuucuuuuuuugaaauaaaauagccugucuuucagaucuaaaaaaaaaaaaaaaaaaaaaaaaaaaaaaaaaaaaaaaaaaaaaaaaaaaaaaaaaaaaaaaaaaaaaaaaaaaaaaaaaaaaaaaaaaaaaaaaaaaa

SEQ ID NO: 37427 - RNA, 1740 nt, Artificial Sequence
  mRNA product Design a-2 (A100) comprising derived and/or modified sequence from LASV(LASV003-NIG-2008;Clade II)__AIT17580__GPCmut10 (opt5)
aggagaguccgcucagccagguugcagaagcggcuuagcguguguccuaaucuucucucugcguguagguaggccugugccgcaaacaagcuuaccaugggccagaucauuaccuucuuucaagaggugccccacgucaucgaagagguuaugaacauugugcugaucgcccucagccugcuugcuauucugaaggggaucuacaauguggccacaugcggacucuucggccuggucuccuuucuucugcucugugggagaucuugcagcacgaccuauaaaggaguguacgaacugcagacacuggagcucgacauggcgucccugaacauguguaugccucuuucuugcaccaagaauaacagccaucacuauaucaugguuggcaaugaaacagggcuggagcucacccugacaaacaccuccauuaucaaucauaaauucuguaaccuuucugaugcucacaagaaaaaucuguacgaccaugcccucaugagcauuaucuccacguuucaccugagcauuccgaacuucaaucaguaugaggccaugucuugcgauuuuaacggaggcaagaucuccgugcaguacaaucugagccacaccuaugcugucgacgccgcuaaccauuguggcacaauugccaauggggugcuccaaaccuucaugcggauggcguggggaggcucuuacaucgcccuggauuccgggaagggaagcugggacugcaucaugacaucuuaccaguaucuuauuauccagaacaccacgugggaagaucacugucaguuuucccgccccagcccuauuggcuaccuggggcuccugucccaaagaacacgggacaucuauauuucucgcagacuucugggaaccuucacauggacccucagcgauuccgagagcaacgaaacccccggcggcuacugccugacacgguggaugcugaucgaggcugagcucaaauguuuugggaauacggccguugcuaagugcaacgaaaaacaugacgaggaguucugcgauaugcugcgccuuuuugacuucuguaagcaggccaucagacggcugaaagcggaagcccagaugucuauucagcucaucaauaaggcugugaacgcccugauuaaugaucaacuuaucaugaagaaccaucugcgcgacauuaugggaaucccuuauugcaauuacuccaaauauugguaccucaaccacaccgucacaggcagaaccagccugccccgguguuggcuggugucuaaugggagcuaccucaacgaaacacacuucuccgacgauaucgagcagcaggcugacaauaugauuaccgagcugcuucaaaaggaauauauggaucgccagggaaaaacgccucugggccucguggaccuguuugucuucucuaccagcuuuuaccugaucuccauuuuccuucaccucguuaagaucccgacacauagacacgugauugggaaacccugcccuaagccccaucggcugaaccacaugggaaucuguagcugcggccuguauaaacacccuggcgugcccgucaaguggaagcgcugaggacuagucccuguucccagagcccacuuuuuuuucuuuuuuugaaauaaaauagccugucuuucagaucuaaaaaaaaaaaaaaaaaaaaaaaaaaaaaaaaaaaaaaaaaaaaaaaaaaaaaaaaaaaaaaaaaaaaaaaaaaaaaaaaaaaaaaaaaaaaaaaaaaaa

SEQ ID NO: 37428 - RNA, 1740 nt, Artificial Sequence
  mRNA product Design a-2 (A100) comprising derived and/or modified sequence from LASV(LASV035-NIG-2009;Clade II)__AIT17588__GPCmut10 (opt5)
aggagaguccgcucagccagguugcagaagcggcuuagcguguguccuaaucuucucucugcguguagguaggccugugccgcaaacaagcuuaccaugggccagaucauuaccuucuuucaagaggugccccacgucaucgaagagguuaugaacauugugcugaucgcccucagccugcuugcuauucugaaggggaucuacaauguggccacaugcggacucuucggccuggucuccuuucuucugcucugugggagaucuugcagcacgaccuauaaaggaguguacgaacugcagacacuggagcucgacauggcgucccugaacauguguaugccucuuucuugcaccaagaauaacagccaucacuauaucaugguuggcaaugaaacagggcuggagcucacccugacaaacaccuccauuaucaaucauaaauucuguaaccuuucugaugcucacaagaaaaaucuguacgaccaugcccucaugagcauuaucuccacguuucaccugagcauuccgaacuucaaucaguaugaggccaugucuugcgauuuuaacggaggcaagaucuccgugcaguacaaucugagccacgcuuaugccgucgacgcugccaaccauuguggcaccauugcgaauggggugcuccaaacauucaugcggauggccuggggaggcucuuacaucgcucuggauuccgggaagggaagcugggacugcaucaugaccucuuaccaguaucuuauuauccagaacacaaccugggaagaucacugucaguuuucccgccccagcccuauuggcuaccuggggcuccugucccaaagaacgcgggacaucuauauuucucgcagacuucugggaacauucaccuggacacucagcgauuccgagggcaacgaaacccccggcggguacugccugacccgguggaugcugaucgaggccgagcucaaauguuuuggaaauacagcuguugccaagugcaacgaaaaacaugacgaggaguucugcgauaugcugcgccuuuuugacuucuguaagcaggcgaucagacggcugaaagccgaagcucagaugagcauucagcucaucaauaaggccgugaacgcucugauuaaugaucaacuuaucaugaagaaccaucugcgcgacauuaugggcaucccuuauugcaauuacucuaaauauugguaccucaaccacacggucaccgggaagacaucccugcccagauguuggcuggugagcaauggaucuuaccucaacgaaacccacuucagcgacgauaucgagcagcaggccgacaauaugauuacagagcugcuucaaaaagaauauaucgaucggcagggcaagaccccucuggggcucguggaccuguuugucuucuccacgucuuuuuaccugauuagcaucuuccuucaccucguuaaaauuccgacacaucgccacgugaucggaaagcccugcccuaaaccccauagacugaaccacaugggcauuuguuccugcggccuguauaagcacccuggggugcccgucaaguggaaacggugaggacuagucccuguucccagagcccacuuuuuuuucuuuuuuugaaauaaaauagccugucuuucagaucuaaaaaaaaaaaaaaaaaaaaaaaaaaaaaaaaaaaaaaaaaaaaaaaaaaaaaaaaaaaaaaaaaaaaaaaaaaaaaaaaaaaaaaaaaaaaaaaaaaaa

SEQ ID NO: 37429 - RNA, 1740 nt, Artificial Sequence
  mRNA product Design a-2 (A100) comprising derived and/or modified sequence from LASV(LASV1000-NIG-2009;Clade II)__AIT17782__GPCmut10 (opt5)
aggagaguccgcucagccagguugcagaagcggcuuagcguguguccuaaucuucucucugcguguagguaggccugugccgcaaacaagcuuaccaugggccagaucauuaccuucuuucaagaggugccccacgucaucgaagagguuaugaacauugugcugaucgcccucagccugcuugcuauucugaaggggaucuacaauguggccacaugcggacucuucggccuggucuccuuucuucugcucugugggagaucuugcagcacgaccuauaaaggaguguacgaacugcagacacuggagcucgacauggcgucccugaacauguguaugccucuuucuugcaccaagaauaacagccaucacuauaucaugguuggcaaugaaacagggcuggagcucacccugacaaacaccuccauuaucaaucauaaauucuguaaccuuucugaugcucacaagaaaaaucuguacgaccaugcccucaugagcauuaucuccacguuucaccugagcauuccgaacuucaaucaguaugaggccaugucuugcgauuuuaacggaggcaagaucuccgugcaguacaaucugagccacaccuaugcugucgacgccgcuaaccauuguggcacaauugccaauggggugcuccaaaccuucaugcggauggcguggggaggcucuuacaucgcccuggauuccgggaagggaagcugggacugcaucaugacaucuuaccaguaucuuauuauccagaacaccacgugggaagaucacugucaguuuucccgccccagcccuauuggcuaccuggggcuccugucccaaagaacacgggacaucuauauuucucgcagacuucugggaaccuucacauggacccucagcgauuccgagggcaacgaaacccccggcggguacugccugacacgguggaugcugaucgaggcugagcucaaauguuuuggaaauacggccguugcuaagugcaacgaaaaacaugacgaggaguucugcgauaugcugcgccuuuuugacuucuguaagcaggccaucaaaagacugaagaccgaagcgcagaugagcauucagcucaucaauaaggccgugaacgcucugauuaaugaucaacuuaucaugaaaaaccaucugcgggacauuaugggcaucccuuauugcaauuacucuaaguauugguaccucaaccacacagucaccgggaaaacaucccugccccgcuguuggcuggugagcaauggaucuuaccucaacgaaacccacuucagcgacgauaucgagcagcaggccgacaauaugauuacggagcugcuucaaaaggaauauaucgauagacagggcaaaacaccucuggggcucguggaccuguuugucuucuccaccucuuuuuaccugauuagcaucuuccuucaccucguuaagauuccgacccaucggcacguggugggaaaacccugcccuaagccccaucgccugaaccacaugggcaucuguuccugcggccuguauaagcacccugggguccccgugaaauggaagagaugaggacuagucccuguucccagagcccacuuuuuuuucuuuuuuugaaauaaaauagccugucuuucagaucuaaaaaaaaaaaaaaaaaaaaaaaaaaaaaaaaaaaaaaaaaaaaaaaaaaaaaaaaaaaaaaaaaaaaaaaaaaaaaaaaaaaaaaaaaaaaaaaaaaaa

SEQ ID NO: 37430 - RNA, 1740 nt, Artificial Sequence
  mRNA product Design a-2 (A100) comprising derived and/or modified sequence from LASV(LASV221-NIG-2010;Clade II)__AIT17624__GPCmut10 (opt5)
aggagaguccgcucagccagguugcagaagcggcuuagcguguguccuaaucuucucucugcguguagguaggccugugccgcaaacaagcuuaccaugggccagaucauuaccuucuuucaagaggugccccacgucaucgaagagguuaugaacauugugcugaucgcccucagccugcuugcuauucugaaggggaucuacaauguggccacaugcggacucuucggccuggucuccuuucuucugcucugugggagaucuugcagcacgaccuauaaaggaguguacgaacugcagacacuggagcucgacauggcgucccugaacauguguaugccucuuucuugcaccaagaauaacagccaucacuauaucaugguuggcaaugaaacagggcuggagcucacccugacaaacaccuccauuaucaaucauaaauucuguaaccuuucugaugcucacaagaaaaaucuguacgaccaugcccucaugagcauuaucuccacguuucaccugagcauuccgaacuucaaucaguaugaggccaugucuugcgauuuuaacggaggcaagaucuccgugcaguacaaucugagccacaccuaugcuauugacgccgcuaaccauuguggcacaaucgccaaugggguccuccaaaccuucaugcggauggcguggggaggcucuuacaucgcccuggauuccgggaagggaagcugggacugcauuaugacaucuuaccaguaucuuaucauucagaacaccacgugggaagaucacugucaguuuucccgccccagcccuaucggcuaccuggggcuccugucccaaagaacacgggacauuuauaucucucgcagacuucugggaaccuucacauggacccucagcgauuccgagggcaacgaaacccccggcggguacugccugacacgguggaugcugaucgaggcugagcucaaauguuuuggaaauacggccguggcuaagugcaacgaaaaacaugacgaggaguucugcgauaugcugcgccuuuuugacuucuguaagcaggccauuagacggcugaaaaccgaagcgcagaugagcauccagcucauuaauaaggccguuaacgcucugaucaaugaucaacuuauuaugaagaaccaucugcgcgacaucaugggcaucccuuauugcaauuacucuaaauauugguaccucaaccacacagugaccgggaagacaucccugcccagauguuggcuggucagcaauggaucuuaccucaacgaaacccacuucagcgacgauauugagcagcaggccgacaauaugaucacggagaugcugcaaaaagaauauauggaucggcagggcaagacaccucuugggcugguggaccucuuuguguucuccaccucuuuuuaccugauuagcaucuuccugcaccuugucaaaauuccgacccaucgccacguuaucggaaagcccugcccuaaaccccauagacucaaccacaugggcauuuguuccugcggccuguauaagcacccuggggugcccgugaaguggaaacggugaggacuagucccuguucccagagcccacuuuuuuuucuuuuuuugaaauaaaauagccugucuuucagaucuaaaaaaaaaaaaaaaaaaaaaaaaaaaaaaaaaaaaaaaaaaaaaaaaaaaaaaaaaaaaaaaaaaaaaaaaaaaaaaaaaaaaaaaaaaaaaaaaaaaa

SEQ ID NO: 37431 - RNA, 1740 nt, Artificial Sequence
  mRNA product Design a-2 (A100) comprising derived and/or modified sequence from LASV(LASV237-NIG-2010;Clade II)__AIT17638__GPCmut10 (opt5)
aggagaguccgcucagccagguugcagaagcggcuuagcguguguccuaaucuucucucugcguguagguaggccugugccgcaaacaagcuuaccaugggccagaucauuaccuucuuucaagaggugccccacgucaucgaagagguuaugaacauugugcugaucgcccucagccugcuugcuauucugaaggggaucuacaauguggccacaugcggacucuucggccuggucuccuuucuucugcucugugggagaucuugcagcacgaccuauaaaggaguguacgaacugcagacacuggagcucgacauggcgucccugaacauguguaugccucuuucuugcaccaagaauaacagccaucacuauaucaugguuggcaaugaaacagggcuggagcucacccugacaaacaccuccauuaucaaucauaaauucuguaaccuuucugaugcucacaagaaagaccuguacgaucaugcccucaugagcauuaucuccacguuucaccugagcauuccgaauuucaaccaguaugaggccaugucuugcgacuuuaauggaggcaagaucuccgugcaguacaaccugagccacaccuaugcugucgaugccgcuaaucauuguggcacaauugccaacggggugcuccaaaccuucaugcggauggcguggggaggcucuuacaucgcccuggacuccgggaagggaagcugggauugcaucaugacaucuuaccaguaucuuauuauccagaauaccacgugggaagaccacugucaguuuucccgccccagcccuauuggcuaccuggggcuccugucccaaagaacacgggauaucuauauuucucgcagacuucugggaaccuucacauggacccucagcgacuccgagggcaacgaaacccccggcggguacugccugacacgguggaugcugaucgaggcugagcucaaauguuuuggaaacacggccguugcuaagugcaaugaaaaacaugaugaggaguucugcgacaugcugcgccuuuuugauuucuguaagcaggccaucagacggcugaaaaccgaagcgcagaugagcauucagcucaucaacaaggccgugaaugcucugauuaacgaccaacuuaucaugaagaaucaucugcgcgacauuaugggcaucccuuauugcaacuacucuaaauauugguaccucaaucacacagucaccgggaagacaucccugcccagauguuggcuggugagcaacggaucuuaccucaaugaaacccacuucagcgaugacaucgagcagcaggccgauaacaugauuacggagcugcuucaaaaagaauauauggaccggcagggcaagacaccucuggggcucguggaucuguuugucuucuccaccucuuuuuaccugaucagcauuuuccuucaccucaucaaaauuccgacccaucgccacaucacaggaaagcccugcccuaaaccccauagacugaaucacaugggcauuuguuccugcggccuguauaagcacccugggguucccgugaaguggaaacggugaggacuagucccuguucccagagcccacuuuuuuuucuuuuuuugaaauaaaauagccugucuuucagaucuaaaaaaaaaaaaaaaaaaaaaaaaaaaaaaaaaaaaaaaaaaaaaaaaaaaaaaaaaaaaaaaaaaaaaaaaaaaaaaaaaaaaaaaaaaaaaaaaaaaa

SEQ ID NO: 37432 - RNA, 1740 nt, Artificial Sequence
  mRNA product Design a-2 (A100) comprising derived and/or modified sequence from LASV(LASV253-NIG-2011;Clade II)__AIT17670__GPCmut10 (opt5)
aggagaguccgcucagccagguugcagaagcggcuuagcguguguccuaaucuucucucugcguguagguaggccugugccgcaaacaagcuuaccaugggccagaucauuaccuucuuucaagaggugccccacgucaucgaagagguuaugaacauugugcugaucgcccucagccugcuugcuauucugaaggggaucuacaauguggccacaugcggacucuucggccuggucuccuuucuucugcucugugggagaucuugcagcacgaccuauaaaggaguguacgaacugcagacacuggagcucgacauggcgucccugaacauguguaugccucuuucuugcaccaagaauaacagccaucacuauaucaugguuggcaaugaaacagggcuggagcucacccugacaaacaccuccauuaucaaucauaaauucuguaaccuuucugaugcucacaagaaaaaucuguacgaccaugcccucaugagcauuaucuccacguuucaccugagcauuccgaacuucaaucaguaugaggccaugucuugcgauuuuaacggaggcaagaucuccgugcaguacaaucugagccacaccuaugcugucgacgccgcuaaccauuguggcacaauugccaauggggugcuccaaaccuucaugcggauggcguggggaggcucuuacaucgcccuggauuccgggaagggaagcugggacugcaucaugacaucuuaccaguaucuuauuauccagaacaccacgugggaagaucacugucaguuuucccgccccagcccuauuggcuaccuggggcuccugucccaaagaacacgggacaucuauauuucucgcagacuucugggaaccuucacauggacccucagcgauuccgagggcaacgaaacccccggcggguacugccugacacgguggaugcugaucgaggcugagcucaaauguuuuggaaauacggccguugcuaagugcaacgaaaaacaugacgaggaguucugcgauaugcugcgccuuuuugacuucuguaagcaggccaucagacggcugaaagcggaagcccagaugagcauucagcucaucaauaaggcugugaacgcccugauuaaugaucaacuuaucaugaagaaccaucugcgcgacauuaugggcaucccuuauugcaauuacucuaaauauugguaccucaaccacaccgucacagggagaaccucccugccccgguguuggcuggugagcaauggaucuuaccucaacgaaacacacuucagcgacgauaucgagcagcaggcugacaauaugauuaccgagcugcuucaaaaggaauauaucgaucgccagggcaaaacgccucuggggcucguggaccuguuugucuucuccacaucuuuuuaccugauuagcaucuuccuucaccucguuaagauuccgacccauagacacaucauuggaaaacccugcccuaagccccaucggcugaaccacaugggcaucuguuccugcggccuguauaaacacccuggggugcccgugaaguggaagcgcugaggacuagucccuguucccagagcccacuuuuuuuucuuuuuuugaaauaaaauagccugucuuucagaucuaaaaaaaaaaaaaaaaaaaaaaaaaaaaaaaaaaaaaaaaaaaaaaaaaaaaaaaaaaaaaaaaaaaaaaaaaaaaaaaaaaaaaaaaaaaaaaaaaaaa

SEQ ID NO: 37433 - RNA, 1740 nt, Artificial Sequence
  mRNA product Design a-2 (A100) comprising derived and/or modified sequence from LASV(LASV254-NIG-2011;Clade II)__AIT17674__GPCmut10 (opt5)
aggagaguccgcucagccagguugcagaagcggcuuagcguguguccuaaucuucucucugcguguagguaggccugugccgcaaacaagcuuaccaugggccagaucauuaccuucuuucaagaggugccccacgucaucgaagagguuaugaacauugugcugaucgcccucagccugcuugcuauucugaaggggaucuacaauguggccacaugcggacucuucggccuggucuccuuucuucugcucugugggagaucuugcagcacgaccuauaaaggaguguacgaacugcagacacuggagcucgacaugaccaaccugaauauguguaugccucuuuccugcacaaagaacaauucucaucacuauaucaugguuggcaacgaaaccgggcuggagcucacacugaccaauacgagcauuaucaaccauaaauucuguaaucuuuccgaugcgcacaagaaaaaccuguacaaucaugcucucaugucuauuaucagcaccuuucaccuguccauuccgaacuucaaucaguaugaggccaugagcugcgacuuuaacggaggcaagaucucugugcaguacaaucugucccacagcuaugccgucgaugcugccaaccauuguggcacaauugcuaacggggugcuccaaaccuucaugcggauggccuggggaggcucuuacaucgcgcuggacuccgggaagggaaauugggauugcaucaugacaagcuaccaguaucuuauuauccagaacaccacgugggaagaccacugucaguuuucucgccccuccccuauuggcuaccuggggcuccugagccaaagaacacgggauaucuauauuucccgcagacuucugggaaccuucacauggacccucucugacagcgagggcaaugaaacccccggcggguacugccugacacgguggaugcugaucgaggccgagcucaaauguuuuggaaacacggcuguugccaagugcaaugaaaaacaugaugaggaguucugcgacaugcugcgccuuuuugauuucuguaagcaggcuaucagacggcugaaaaccgaagcccaggcgaacauucagcucaucaauaaggccgugaacgcucugauuaaugaccaacuuaucaugaagaaccaucugcgcgauauuaugggcaucccuuauugcaauuacuccaaauauugguaccucaaccacacagucaccgggaagacaagccugcccagauguuggcuggugucuaauggauccuaccucaacgaaacccacuucagcgacgacaucgagcagcaggccgauaauaugauuacggagcugcuucaaaaagaauauauggaccggcagggcaagacaccucuggggcucguggaucuguuugucuucucuaccagcuuuuaccugaucuccauuuuccuucaccucguuaaaaucccgacccaucgccacgugauuggaaagcccugcccuaaaccccauagacugaaccacaugggcaucuguucuugcggccuguauaagcacccuggggugcccgucaaguggaaacggugaggacuagucccuguucccagagcccacuuuuuuuucuuuuuuugaaauaaaauagccugucuuucagaucuaaaaaaaaaaaaaaaaaaaaaaaaaaaaaaaaaaaaaaaaaaaaaaaaaaaaaaaaaaaaaaaaaaaaaaaaaaaaaaaaaaaaaaaaaaaaaaaaaaaa

SEQ ID NO: 37434 - RNA, 1740 nt, Artificial Sequence
  mRNA product Design a-2 (A100) comprising derived and/or modified sequence from LASV(Nig08-A19;Clade III)__ADU56618__GPCmut10 (opt5)
aggagaguccgcucagccagguugcagaagcggcuuagcguguguccuaaucuucucucugcguguagguaggccugugccgcaaacaagcuuaccaugggccagaucgugaccuucuuucaagaggucccccacguuauugaagaggugaugaacaucgugcugauugcccucagcauccuggcuauucuuaaggggcuguacaauaucgccacaugcggacucaucggccuggucacguuccuucugcucuccgggagaucuuguagcaugaccuauaaaggaguguacgaacugcagacacuggagcucaacaugaauacccugaacaugugcaugccucuuuccuguacaaagaauaacucucaucacuauauuaugguuggcaaugaaaccgggcuggagcucacacugaccaacacgagccuucugcaucacaaauuuugcaaucucuccgacgcgcauaagaaaaaccuguacgaucacacccugaugucuaucauuagcacauuccaccucuccaucccgaauuuuaaccaguaugaggcuaugagcugugacuucaauggaggcaagauuaccgugcaguacaaccugucucauuccuaugccaucgaugccgcuaaucacugcggcacagucgccaacggggugcuucaaaccuuuaugcggauggcuuggggaggcagcuacauugcccuggacucugggcgcggaaagugggauuguaucaugacguccuaccaguaucucaucauucagaacacaaccugggaagaccauugccaguucagcagacccucuccuaucggcuaccuggggcuucugucccaacggacacgcgauauuuauaucagcagacggcuccugggaaccuuuaccuggacacuguccgacucugagggcaaugaaacgcccggcggguacugucucacccgcuggaugcugauugaggcggagcuuaaaugcuucggaaacacagccguugcuaaguguaaugaaaaacacgaugaggaauuuugcgacaugcugagacucuucgauuuuugcaagcaggccauccggcgccugaaagcugaggcccagaugagcauccagcuuauuaacaaggcggugaaugcccugaucaacgaccaacucauuaugaagaaucaccugagagauaucaugggcauuccuuauuguaacuacuccaaauauugguaccugaaucauaccagcacagggcggaccucucucccccgcugcuggcuggucuccaacggaagcuaccuuaaugaaacgcacuucucugacgacaucgagcagcaggcugauaacaugaucacagagaugcugcaaaaggaauaucucgacagacagggcaaaaccccucuggggcugguggaucuuuucguguuuagcaccuccuucuaccucauuucuaucuuucugcaucuggucaagauuccgacacaccggcauaucguuggaaaacccuguccuaagccccaccgccucaaucacaugggcauuugcagcuguggccuguauaaacagccuggggugcccgugagauggaagcggugaggacuagucccuguucccagagcccacuuuuuuuucuuuuuuugaaauaaaauagccugucuuucagaucuaaaaaaaaaaaaaaaaaaaaaaaaaaaaaaaaaaaaaaaaaaaaaaaaaaaaaaaaaaaaaaaaaaaaaaaaaaaaaaaaaaaaaaaaaaaaaaaaaaaa

SEQ ID NO: 37435 - RNA, 1743 nt, Artificial Sequence
  mRNA product Design a-2 (A100) comprising derived and/or modified sequence from LASV(G1180-SLE-2010;Clade IV)__AIT17168__GPCmut10 (opt5)
aggagaguccgcucagccagguugcagaagcggcuuagcguguguccuaaucuucucucugcguguagguaggccugugccgcaaacaagcuuaccaugggccagaucgugaccuucuuucaagaggucccccacguuauugaagaggugaugaacaucgugcugauugcccucagcauccuggcuguccuuaaggggcuguacaauuucgccacaugcggacucgugggccugcuuacguuucugcuccugugugggagauccugcaccgcgucucgguauaaaggaguuuacgaacugcagacacucgagcugaacauggaaacccuuaauauguguaugccucugagcugcacaaagaacaauucccaucacuauauuauggugggcaacgagaccgggcucgagcugacacuuaccaauacgucuaucaucaaccauaaauucuguaaucugagcgacgcucacaagaaaaaccucuacgaucaugcccugauguccauuaucucuaccuuucaccugagcauuccgaauuucaaccaguaugaagccauguccugcgacuuuaauggaggcaagaucagcguccaguacaaccucucucacuccuaugcuggcgaugccgcuaaucauugugggacaguggccaacggaguucugcaaaccuucaugcgcauggcguggggcgggagcuacauugcccuugacucuggacacggcuccugggauugcaucaugacaagcuaccaguaucugauuauccagaacaccacgugggaggaccauugucaguuuucuagacccuccccuaucggguaccucggacugcuuagccaacggacacgcgauauuuauaucuccagacggcugcucggcaccuucacauggacccugucugacagcgaaggcaaggauacccccgggggauacugccugacacgcuggaugcucauugaggcugagcugaaauguuuuggcaauacggccguggcuaagugcaacgaaaaacacgacgaggaguucugcgauaugcuuagacuguuugacuucuguaagcaggccauccagcggcucaaagcggaagcccagauguccauucaacugaucaauaaggcugucaacgcccuuaucaaugaucagcugauuaugaagaaccaccuccgcgacaucauggggauuccuuauugcaauuacagcaaauauugguaccugaaccauaccacaaccggaaagacaucucugcccaaauguuggcucguguccaauggcagcuaccugaacgaaacccacuucucugacgauaucgagcagcaagcugacaauaugauuacggagaugcuucagaaggaauauauggagagacaggggaaaacaccucugggacucguggaucuguuugucuucagcaccuccuuuuaccugaucucuaucuuccuucaucucguuaagauuccgacccaccggcauaucgugggcaaaagcugccccaagccucaccgccugaaccacaugggcauuuguuccugcgggcuguauaagcagcccggagugccugucaaauggaagagaugaggacuagucccuguucccagagcccacuuuuuuuucuuuuuuugaaauaaaauagccugucuuucagaucuaaaaaaaaaaaaaaaaaaaaaaaaaaaaaaaaaaaaaaaaaaaaaaaaaaaaaaaaaaaaaaaaaaaaaaaaaaaaaaaaaaaaaaaaaaaaaaaaaaaa

SEQ ID NO: 37436 - RNA, 1743 nt, Artificial Sequence
  mRNA product Design a-2 (A100) comprising derived and/or modified sequence from LASV(G1442-SLE-2011;Clade IV)__AIT17180__GPCmut10 (opt5)
aggagaguccgcucagccagguugcagaagcggcuuagcguguguccuaaucuucucucugcguguagguaggccugugccgcaaacaagcuuaccaugggccagaucgugaccuucuuucaagaggucccccacguuauugaagaggugaugaacaucgugcugauugcccucagcauccuggcuguccuuaaggggcuguacaauguggccacaugcggacucauuggccugguuacguuccuucugcucugugggagauccugcaccacaacccuguauaaaggaguguacgaacugcagacacucgagcugaacauggaaacccuuaauauguguaugccucugucuugcacaaagaacaauagccaucacuauauccgggucggcaacgagaccgggcucgagcugacgcuuaccaauacauccaucauuaaccauaaauuuuguaaucugucugacgcgcacaagaaaaaccucuacgaucaugcucugaugagcaucauuuccaccuuccaccugucuaucccgaauuuuaaccaguaugaagccaugagcugcgacuucaauggaggcaagauuuccgugcaguacaaccucagccacucuuaugccggcgaugcugccaaucauugugggacaguugcuaacggagugcugcaaaccuuuaugcgcauggccuggggcggguccuacaucgcgcuugacagcggaagaggcaacugggauugcauuaugacgucuuaccaguaucugaucauccagaauacaaccugggacgaucacugucaguucucccggcccagcccuauuggguaccucggacugcuuucucaacgcacaagagacgucuauaucucccggcgccugcucggcaccuuuaccuggacacugagcgauuccgagggcaaggacacgcccgggggauacugccugaccagauggaugcucauugaagccgagcugaaauguuucggcaacacagcuguggccaagugcaaugagaaacaugaugaagaguuuugcgacaugcuucggcuguucgauuuuuguaagcaggcuauccagcgccucaaagccgaagcgcagaugucuauucaacugaucaacaaggccgugaaugcucuuaucaacgaccagcugauuaugaagaaucaccucagagacaucauggggauuccuuauugcaacuacagcaaauauugguaccugaauaacaccgccacaggaaagaccucccugcccaaauguuggcucaucagcaauggcucuuaccugaacgagacgcacuucuccgaugacauugaacaggaggcugauaauaugaucacagagaugcuucaaaaggaauauauggagcggcaggggaaaaccccucugggacucgucgaccuguucguuuuuagcaccucuuucuaccugaucagcauuuuucuucaucucgugaagaucccgacacaccgccauauugugggcaaauccugccccaagccucacagacugaaccauaugggcaucuguucuugcgggcuguauaagcagcccggagucccugugcgguggaaacgcugaggacuagucccuguucccagagcccacuuuuuuuucuuuuuuugaaauaaaauagccugucuuucagaucuaaaaaaaaaaaaaaaaaaaaaaaaaaaaaaaaaaaaaaaaaaaaaaaaaaaaaaaaaaaaaaaaaaaaaaaaaaaaaaaaaaaaaaaaaaaaaaaaaaaa

SEQ ID NO: 37437 - RNA, 1743 nt, Artificial Sequence
  mRNA product Design a-2 (A100) comprising derived and/or modified sequence from LASV(G3010-SLE-2013;Clade IV)__AIT17344__GPCmut10 (opt5)
aggagaguccgcucagccagguugcagaagcggcuuagcguguguccuaaucuucucucugcguguagguaggccugugccgcaaacaagcuuaccaugggccagaucgugaccuucuuucaagaggucccccacguuauugaagaggugaugaacaucgugcugauugcccucagcauccuggcuguccuuaaggggcuguacaauuucgccacaugcggacucgugggccugguuacguuucuucugcucugugggagauccugcaccacaucucuguauaaaggaguguacgaacugcagacccucgagcugaacauggaaacacuuaauauguguaugccucugagcugcaccaagaacaauucccaucacuauauuauggucggcaacgagacagggcucgagcugacccuuacgaauaccucuaucaucaaccauaaauucuguaaucugagcgacgcgcacaagaaaaaccucuacaaucaugcucugauguccauuaucucuacauuucaccugagcauuccgaacuucaaucaguaugaagccauguccugcgauuuuaacggaggcaagaucagcgugcaguacaaucucucucacuccuaugccggcgacgcugccagccauugugggaccguugcuaacggagugcugcaaacauucaugcggauggccuggggcgggucuuacauugcgcuugauuccggauacggcaagugggacugcaucaugaccagcuaucaguaccugauuauccagaacacgacaugggaggaucacugucaguuuucucgccccuccccuaucggguaucucggacugcuuagccaaagaacccgggacauuuacaucucccgcagacugcucggcacauucaccuggacccugucugauagcgaaggcaaagacacacccgggggauauugccugacgcgguggaugcucauugaggccgagcugaaguguuuuggcaauaccgcugucgccaaaugcaacgaaaagcaugaugaggaguucugcgacaugcuucgccuguuugauuucuguaaacaggcuauccagagacucaagacagaagcccagauguccauucaacugaucaauaaggcggugaacgcccuuaucaaugaccagcugauuaugaaaaaccaccuccgggauaucauggggauuccuuacugcaauuauagcaaguacugguaccugaaccacaccacaaccggaaaaacgucucugcccaaguguuggcucguguccaauggcagcuaucugaacgaaacacauuucucugacgacaucgagcagcaagcugauaauaugauuaccgagaugcuucagaaagaauacauggagcgccaggggaagaccccucugggacucgucgaccuguuuguuuucagcacauccuuuuaucugaucucuaucuuccuucaccucgugaaaauuccgacccauagacacaucgugggcaagagcugccccaagccucaucggcugaaccacaugggcauuuguuccugcgggcuguacaaacagcccggagucccugugcgcuggaagagaugaggacuagucccuguucccagagcccacuuuuuuuucuuuuuuugaaauaaaauagccugucuuucagaucuaaaaaaaaaaaaaaaaaaaaaaaaaaaaaaaaaaaaaaaaaaaaaaaaaaaaaaaaaaaaaaaaaaaaaaaaaaaaaaaaaaaaaaaaaaaaaaaaaaaa

SEQ ID NO: 37438 - RNA, 1743 nt, Artificial Sequence
  mRNA product Design a-2 (A100) comprising derived and/or modified sequence from LASV(G502-SLE-2009;Clade IV)__AIT17126__GPCmut10 (opt5)
aggagaguccgcucagccagguugcagaagcggcuuagcguguguccuaaucuucucucugcguguagguaggccugugccgcaaacaagcuuaccaugggccagaucgugaccuucuuucaagaggucccccacguuauugaagaggugaugaacaucgugcugauugcccucagcauccuggcuguccuuaaggggcuguacaauuucgccacaugcggacucgugggccugcuuacguuucugcuccugugugggagauccugcaccacaggacuguauaaaggcguuuacgaacuccagacccuggagcuuaacauggaaacacugaauauguguaugccucucucuugcaccaagaacaauagccaucacuauauuaugguggggaacgagacaggacuggagcuuacccugacgaauaccuccaucaucaaccauaaauucuguaaucucucugacgcgcacaagaaaaaccuguacgaucaugcucugaugagcauuaucuccacauuucaccucucuauuccgaauuucaaccaguaugaagccaugagcugcgacuuuaauggcggcaagaucuccguccaguacaaccugagccacucuuaugccggggaugcugccgaccauuguggaaccguggcuaauggcguucuucaaacauucaugcggauggccuggggaggguccuacauugcgcuggauagcggccgcgggagaugggacugcaucaugaccucuuaccaguaucucauuauccagaacacgacaugggaggaucacugucaguuuucccggcccagcccuaucggauaccugggccuucugucucaacgcaccagagacauuuauaucucccggcgccuccugggcacauucaccuggacccugagcgauuccgaagggaaggacacacccggaggcuacugccucacgagauggaugcugauugaggccgagcuuaaauguuuugggaacaccgcuguggccaagugcaaugaaaaacaugaugaggaguucugcgacaugcugcggcucuuugauuucuguaagcaggcuauccagcgccugaaagccgaagcgcagaugucuauucaacuuaucaacaaggccgucaaugcucugaucaacgaccagcucgugaugaagaaucaccugagagacauuaugggaaucccuuauugcaacuacagccgguauugguaccugaaucacacaaccacaggccgcaccucccuccccaaauguuggcuggugagcaacgggucuuaccuuaaugaaacgcauuucuccgaugacauugagcagcaagccgauaacaugaucacagagaugcugcagaaggaauauauggagagacagggaaaaaccccucucggccuggucgaccuguuuguuuucagcaccucuuuuuaccuuauuagcaucuuccuccaccuggugaagaucccgacacaucggcacauugugggcaaauccugccccaagccucaucgccugaaucacauggggaucuguucuugcggacucuauaaacagcccggcgucccugugaaguggaagagaugaggacuagucccuguucccagagcccacuuuuuuuucuuuuuuugaaauaaaauagccugucuuucagaucuaaaaaaaaaaaaaaaaaaaaaaaaaaaaaaaaaaaaaaaaaaaaaaaaaaaaaaaaaaaaaaaaaaaaaaaaaaaaaaaaaaaaaaaaaaaaaaaaaaaa

SEQ ID NO: 37439 - RNA, 1743 nt, Artificial Sequence
  mRNA product Design a-2 (A100) comprising derived and/or modified sequence from LASV(G733-SLE-2010;Clade IV)__AIT17154__GPCmut10 (opt5)
aggagaguccgcucagccagguugcagaagcggcuuagcguguguccuaaucuucucucugcguguagguaggccugugccgcaaacaagcuuaccaugggccagaucgugaccuucuuucaagaggucccccacguuauugaagaggugaugaacaucgugcugauugcccucagcauccuggcuguccuuaaggggcuguacaauuucgccacaugcggaauugugggccucguuuccuuucugcuucugugugggagaucuugcacgaccagccucuauaaaggaguguacgaacugcagacacuggagcucaacauggaaacccugaauauguguaugccucuuuccugcacaaagaacaauucucaucacuauaucauggucggcaacgagaccgggcuggagcucacacugaccaauacgagcaucauuaaccauaaauucuguaaucuuuccgacgcgcacaagaaaaaccuguacgaucaugcucucaugucuaucauuagcaccuuucaccuguccaucccgaauuucaaccaguaugaagccaugagcugcgacuuuaauggaggcaagauuucugugcaguacaaccugucccacagcuaugccggcgaugcugccaaucauugugggacaaucgcuaacggaguucuccaaaccuucaugcggauggccuggggcgggucuuacauugcgcuggacuccggacgcgauagaugggacugcaucaugacaagcuaccaguaucuuaucauucagaacaccacgugggaggaucacugucaguuuucucggcccuccccuaucggcuaccuggggcuccugagccaacgcacaagagacauuuauaucucccggcgccuucugggaaccuucacauggacccucucugauagcgaaggcaaggacacccccggcggguacugccugacaagauggaugcugauugaggccgagcucaaauguuuuggaaauacggcuguggccaagugcaacgaaaaacaugaugaggaguucugcgacaugcugcggcuuuuugauuucuguaagcaggcuauccagcgccugaaagccgaagcgcagauguccauccaacucauuaauaaggccgucaacgcucugaucaaugaccagcuuauuaugaagaaccaccugagagacaucaugggcauuccuuauugcaauuacagcaaauauugguaccucaaccacaccacaaccgggaagacaucucugcccaaauguuggcugguguccaauggaagcuaccucaacgaaacccauuucucugaugacaucgagcagcaagccgauaauaugaucacggagaugcugcagaaggaauauauggagcggcagggcaaaacaccucuugggcugguggaccucuuugucuucagcaccuccuuuuaccugauuucuaucuuccugcaccuuguuaagauuccgacccaucgccacguggugggaaaaagcugccccaagccucauagacucaaccacaugggcaucuguuccugcggccuguaugggcagcccggagucccugugaaguggaaacggugaggacuagucccuguucccagagcccacuuuuuuuucuuuuuuugaaauaaaauagccugucuuucagaucuaaaaaaaaaaaaaaaaaaaaaaaaaaaaaaaaaaaaaaaaaaaaaaaaaaaaaaaaaaaaaaaaaaaaaaaaaaaaaaaaaaaaaaaaaaaaaaaaaaaa

SEQ ID NO: 37440 - RNA, 1743 nt, Artificial Sequence
  mRNA product Design a-2 (A100) comprising derived and/or modified sequence from MOPV/LASV reassortant(IGS-1;Clade IV)__AFY05576__GPCmut10 (opt5)
aggagaguccgcucagccagguugcagaagcggcuuagcguguguccuaaucuucucucugcguguagguaggccugugccgcaaacaagcuuaccaugggccagaucgugaccuucuuucaagaggucccccacguuauugaagaggugaugaacaucgugcugauugcccucagcguccuggcugugcuuaaggggcuguacaauuucgccacaugcggacucguuggccuggugacguuucuucugcucugugggagauccugcaccacaucucuguauaaaggagucuacgaacugcagacccucgagcugaacauggaaacacuuaauauguguaugccucugagcugcaccaagaacaauucccaucacuauaucauggugggcaacgagacagggcucgagcugacccuuacgaauaccucuauuaucaaccauaaauucuguaaucugagcgacgcgcacaagaaaaaccucuacgaucaugcucugauguccaucauuucuacauuucaccugagcaucccgaauuucaaccaguaugaagccauguccugcgacuuuaauggaggcaagauuagcguucaguacaaccucucucacuccuaugccggcgaugcugccaaucauugugggaccguggcuaacggaguccugcaaacauucaugcggauggccuggggcgggagcuacaucgcgcuugacucuggacgcggcaacugggauugcauuaugaccuccuaccaguaucugaucauucagaauacgacaugggaggaccacugucaguuuagcagacccucuccuaucggguaccucggacugcuuucccaacggacccgcgauaucuauauuagcagacggcugcucggcacauucaccuggacccuguccgacucugaaggcgaggauacacccgggggauacugccugacgcgcuggaugcucaucgaggccgaacugaaguguuuuggcaacaccgcuguggccaaaugcaaugagaagcaugacgaagaguucugcgauaugcuuagacuguuugacuucuguaaacaggcuauucagcggcucaaggccgaagcgcagaugagcauccaacugauuaacaaagccgugaaugcucuuaucaacgaucagcugaucaugaagaaucaccuccgcgacauuauggggaucccuuauugcaacuacuccaaguauugguaccugaaucacacaaccacaggaagaaccagccugcccaaauguuggcucgucucuaacggcuccuaccugaaugagacgcauuucagcgacgauauugagcagcaagccgacaacaugaucacagaaaugcuucagaaggaguauauggaacggcaggggaaaaccccucugggacucguugaucuguuuguguucucuaccagcuuuuaccugauuuccaucuuccuucaccucgugaagaucccgacacaucgccacauugucggcaaaucuugccccaagccucauagacugaaucacaugggcaucuguagcugcgggcuguauaaacagcccggagugccuguuaaguggaagcggugaggacuagucccuguucccagagcccacuuuuuuuucuuuuuuugaaauaaaauagccugucuuucagaucuaaaaaaaaaaaaaaaaaaaaaaaaaaaaaaaaaaaaaaaaaaaaaaaaaaaaaaaaaaaaaaaaaaaaaaaaaaaaaaaaaaaaaaaaaaaaaaaaaaaa

SEQ ID NO: 37441 - RNA, 1743 nt, Artificial Sequence
  mRNA product Design a-2 (A100) comprising derived and/or modified sequence from LASV(LM765-SLE-2012;Clade IV)__AIT17814__GPCmut10 (opt5)
aggagaguccgcucagccagguugcagaagcggcuuagcguguguccuaaucuucucucugcguguagguaggccugugccgcaaacaagcuuaccaugggccagaucgugaccuucuuucaagaggucccccacguuauugaagaggugaugaacaucgugcugauugcccucagcauccuggcuguccuuaaggggcuguacaauuucgccacaugcggacucgugggccugguuacguuucuucugcucugugggagauccugcaccacaucucuguauaaaggaguguacgaacugcagacccucgagcugaacauggaaacacuuaauauguguaugccucugagcugcaccaagaacaauucccaucacuauauuauggucggcaacgagacagggcucgagcugacccuuacgaauaccucuaucaucgaccauaaauucuguaaccugagcgaugcgcaccggaagaaucucuacgaccaugcucugauguccauuaucucuacauuucaccugagcauuccgaacuucaaucaguaugaagccauguccugcgauuuuaacggaggcaaaaucagcgugcaguacaaucucucucacuccuaugccaaggacgcugccgaucauuguggcaccguugcuaacggggugcugcaaacauucaugcgcauggccuggggaggcagcuacauugcgcuugacucugggagaggacggugggauugcaucaugaccuccuaccaguaucugauuauccagaauacgacaugggaggaccacugucaguuuagccgccccucuccuaucggcuaccucgggcugcuuucccaaagaacccgggauauuuauaucagccgcagacugcucggaacauucaccuggacccuguccgacucugaaggcaaggauacacccggcggguacugccugacgcgguggaugcucauugaggccgagcugaaauguuuuggaaacaccgcugucgccaagugcaacgaaaaacaugacgaggaguucugcgauaugcuucgccuguuugacuucuguaagcaggcuauccagagacucaaagccgaagcgcagaugagcauucaacugaucaauaaggccgugaacgcucuuaucaaugaccagcugauuaugaagaaccaccuccgggauaucaugggcauuccuuauugcaauuacuccaaauauugguaccugaaccacacaaccacagggaagaccagccugcccaaauguuggcucgugucuaauggauccuaccugaacgaaacgcauuucagcgacgauaucgagcagcaagccgacaauaugauuacagagaugcuucagaaggaauauauggagcgccagggcaaaaccccucuggggcucgucgaucuguuuguuuucucuaccagcuuuuaccugaucuccaucuuccuucaccucgugaagauuccgacacauagacacaucgugggaaaacccugcccuaagccccaucggcugaaccacaugggcauuuguucuugcggccuguauaagcagccugggguccccgugaaauggaagcgcugaggacuagucccuguucccagagcccacuuuuuuuucuuuuuuugaaauaaaauagccugucuuucagaucuaaaaaaaaaaaaaaaaaaaaaaaaaaaaaaaaaaaaaaaaaaaaaaaaaaaaaaaaaaaaaaaaaaaaaaaaaaaaaaaaaaaaaaaaaaaaaaaaaaaa

SEQ ID NO: 37442 - RNA, 1743 nt, Artificial Sequence
  mRNA product Design a-2 (A100) comprising derived and/or modified sequence from LASV(LM776-SLE-2012;Clade IV)__AIT17824__GPCmut10 (opt5)
aggagaguccgcucagccagguugcagaagcggcuuagcguguguccuaaucuucucucugcguguagguaggccugugccgcaaacaagcuuaccaugggccagaucgugaccuucuuucaagaggucccccacguuauugaagaggugaugaacaucgugcugauugcccucagcauccuggcuguccuuaaggggcuguacaauuucgccacaugcggacucgugggccugguuacguuucuucugcucugugggagauccugcaccacaucuguguauaaaggagucuacgaacugcagacccuggagcucaacauggaaacacugaauauguguaugccucuuagcugcaccaagaacaauucccaucacuauauuauggugggcaacgagacagggcuggagcucacccugacgaauaccucuaucaucaaccauaaauucuguaaucuuagcgacgcgcacaagaaaaaccuguacgaucaugcucucauguccauuaucucuacauuucaccugagcauuccgaauuucaaccaguaugaagccauguccugcgacuuuaauggaggcaagaucagcguucaguacaaccugucucacuccuaugccggcgaugcugccaaucauugugggaccguggcuaacggaguccuccaaacauucaugcggauggccuggggcgggagcuacauugcgcuggacucuggacacggcaagugggauugcaucaugaccuccuaccaguaucuuauuauccagaacacgacaugggaggaccauugucaguuuagccgccccucuccuaucggguaccugggacuccugucccaaagaacccgggauauuuauaucagccgcagacuucugggcacauucaccuggacccucuccgacucugaaggcaaagauacacccgggggauacugccugacgcgguggaugcugauugaggccgagcucaaguguuuuggcaauaccgcuguggccaaaugcaacgaaaagcacgacgaggaguucugcgauaugcugcgccuuuuugacuucuguaaacaggcuauccagagacugaaggccgaagcgcagaugagcauucaacucaucaauaaggccgugaacgcucugaucaaugaucagcuuauuaugaaaaaccaucugcgggacaucauggggauuccuuauugcaauuacuccaaguauugguaccucaaccacacaaccacaggaaaaaccagccugcccaaguguuggcuggucucuaauggcuccuaccucaacgaaacgcacuucagcgacgauaucgagcagcaagccgacaauaugauuacagagaugcugcagaaagaauauauggagcgccaggggaagaccccucuuggacugguugaucucuuuguguucucuaccagcuuuuaccugaucuccaucuuccugcaucuugugaaaauuccgacacacagacauaucgucggcaagucuugccccaagccucaccggcucaaccacaugggcauuuguagcugcgggcuguauaaacagcccggagugccuguucgcuggaagagaugaggacuagucccuguucccagagcccacuuuuuuuucuuuuuuugaaauaaaauagccugucuuucagaucuaaaaaaaaaaaaaaaaaaaaaaaaaaaaaaaaaaaaaaaaaaaaaaaaaaaaaaaaaaaaaaaaaaaaaaaaaaaaaaaaaaaaaaaaaaaaaaaaaaaa

SEQ ID NO: 37443 - RNA, 1743 nt, Artificial Sequence
  mRNA product Design a-2 (A100) comprising derived and/or modified sequence from LASV(Mad39;Clade IV)__ANH09722__GPCmut10 (opt5)
aggagaguccgcucagccagguugcagaagcggcuuagcguguguccuaaucuucucucugcguguagguaggccugugccgcaaacaagcuuaccaugggccagaucgugaccuucuuucaagaggucccccacguuauugaagaggugaugaacaucgugcugauugcccucagcauccuggcuguccuuaaggggcuguacaauguggccacaugcggacucauuggccugguuacguuccuucugcucugugggagauccugcaccacaacccuguauaaaggaguguacgaacugcaggcgcucgagcugaacauggaaacacuuaauauguguaugccucugucuugcaccaagaacaauagccaucacuauauccgggucggcaacgagacagggcucgagcugacccuuacgaauaccucccugaucaaccauaaauuuuguaaucucucugacgcucacaagaaaaaccuguacgaucaugcccugaugagcauuaucuccacauuccaccucucuauuccgaauuuuaaccaguaugaagccaugagcugcgacuucaaugauggaaagaucuccgugcaguacaaccugagccacaccuaugcuggcgacacagccaaucauuguggcaccguugcuaacggggugcuucaaacguuuaugcgcauggccuggggaggcucuuacauugcgcuggauuccgggagaggaggcugggacugcaucaugacaagcuaccaguaucucauuauccagaacaccacaugggaggaucacugucaguucucucggcccuccccuaucggguaccugggacuucugagccaacgcaccagagacauuuauaucucucggcgccuccugggcaccuuuacauggacgcuguccgauagcgaaggcaaggacacccccgggggauacugccucacaagauggaugcugauugaggccgagcuuaaauguuucggcaauaccgcugucgccaagugcaacgaaaaacaugaugaggaauuuugcgacaugcugcgccucuucgauuuuuguaagcaggcuauccagcggcugaaagccgaggcgcagauguccauucaacuuaucaauaaggccgugaacgcucugaucaaugaccagcucauuaugaagaaccaccugagagacaucauggggauuccuuauugcaauuacucuaaauauugguaccugaaccacacagugaccggaaagacgagccuccccaaauguuggcuggucuccaauggcagcuaccuuaacgaaacacauuucucugaugacaucgagcagcaagccgauaauaugauuaccgagaugcugcagaaggaauauauggagcggcaggggaaaaccccucucggacugguugaccuguucguguuuuccaccagcuucuaccuuaucucuaucuuucuccaccuggugaagauuccgacacaucgccacgucgugggcaaacccugcccuaagccccauagacugaaccacaugggcaucuguagcugcggguucuauaagcagccuggaguucccgugcgguggaaacgcugaggacuagucccuguucccagagcccacuuuuuuuucuuuuuuugaaauaaaauagccugucuuucagaucuaaaaaaaaaaaaaaaaaaaaaaaaaaaaaaaaaaaaaaaaaaaaaaaaaaaaaaaaaaaaaaaaaaaaaaaaaaaaaaaaaaaaaaaaaaaaaaaaaaaa

SEQ ID NO: 37444 - RNA, 1743 nt, Artificial Sequence
  mRNA product Design a-2 (A100) comprising derived and/or modified sequence from LASV(Z0947-SLE-2011;Clade IV)__AIT17840__GPCmut10 (opt5)
aggagaguccgcucagccagguugcagaagcggcuuagcguguguccuaaucuucucucugcguguagguaggccugugccgcaaacaagcuuaccaugggccagaucgugaccuucuuucaagaggucccccacguuauugaagaggugaugaacaucgugcugauugcccucagcauccuggcuguccuuaaggggcuguacaauuucgccacaugcggacucgugggccugguuacguuucuucugcucugugggagauccugcaccauuucucuguauaaaggaguguacgaacugcagacacucgagcugaacauggaaacccuuaauauguguaugccucugagcugcacaaagaacaauucccaucacuauaucauggucggcaacgagaccgggcucgagcugacacuuaccaauacgucuaucauuaaccauaaauucuguaaucugagcgacgcgcacaagaaaaaccucuacgaucaugcucugauguccaucauuucuaccuuucaccugagcaucccgaauuucaaccaguaugaagccauguccugcgacuuuaauggaggcaagauuagcgugcaguacaaccucucucacuccuaugccggcgaugcugccaaucauugugggacaguugcuaacggagugcugcaaaccuucaugcggauggccuggggcgggagcuacaucgcgcuugacucuggacgcgauagaugggacugcauuaugacauccuaccaguaucugaucauccagaacaccacgugggaggaucacugucaguuuagccggcccucuccuauuggcuaccucgggcugcuuucccaacgcacaagagacaucuauauuagccggcgccugcucggaaccuucacauggacccuguccgauucugaaggcaaggacacccccggcggguacugccugacaagauggaugcucaucgaggccgagcugaaauguuuuggaaauacggcugucgccaagugcaacgaaaaacaugaugaggaguucugcgacaugcuucggcuguuugauuucuguaagcaggcuauucagcgccucaaagccgaagcgcagaugagcauccaacugaucaauaaggccgugaacgcucuuauuaaugaccagcugaucaugaagaaccaccucagagacauuaugggcaucccuuauugcaauuacuccaaauauugguaccugaaccacaccacaaccgggaagacaagccugcccaaauguuggcucgugucuaauggauccuaccugaacgaaacccauuucagcgaugacauugagcagcaagccgauaauaugaucacggagaugcuucagaaggaauauauggagcggcagggcaaaacaccucuggggcucgucgaccuguuuguuuucucuaccagcuuuuaccugaucuccauuuuccuucaccucgugaagaucccgacccaucgccacauugugggaaaacccugcccuaagccccauagacugaaccacaugggcaucuguucuugcggccuguauaagcagccugggguccccgugaaauggaagcggugaggacuagucccuguucccagagcccacuuuuuuuucuuuuuuugaaauaaaauagccugucuuucagaucuaaaaaaaaaaaaaaaaaaaaaaaaaaaaaaaaaaaaaaaaaaaaaaaaaaaaaaaaaaaaaaaaaaaaaaaaaaaaaaaaaaaaaaaaaaaaaaaaaaaa

SEQ ID NO: 37445 - RNA, 1781 nt, Artificial Sequence
  mRNA product Design b-4 (hSL-A64-N5) comprising derived and/or modified sequence from LASV(Josiah;Clade IV)__NP_694870__GPCmut10 (opt1)
aggagagucccgcagucggcguccagcggcucugcuuguucgugugugugucguugcaggccuuauucaagcuuaccaugggccagaucgugaccuucuuccaggaggucccccacgugaucgaggaggugaugaacaucguccugaucgcccucagcgugcuggccgugcugaaggggcucuacaacuucgcgaccugcggccuggucgggcuggugacguuccuccugcugugcggccgcuccugcaccaccagccucuacaaggggguguacgagcugcagacccuggagcucaacauggagacgcugaacaugugcaugccgcuguccugcaccaagaacaacagccaccacuacaucauggucggcaacgagaccggccucgagcugacgcugaccaacaccuccaucaucaaccacaaguucugcaaccucagcgacgcccacaagaagaaccuguacgaccacgcccugauguccaucaucagcaccuuccaccucuccauccccaacuucaaccaguacgaggccaugagcugcgacuucaacgggggcaagaucuccgugcaguacaaccugagccacuccuacgccggggacgcggccaaccacugcggcacgguggccaacgggguccugcagaccuucaugcggauggccuggggcggcagcuacaucgcgcucgacuccgggcgcggcaacugggacugcaucaugaccagcuaccaguaccugaucauccagaacaccacgugggaggaccacugccaguucucccggcccagccccaucggguaccugggccuccugucccagcgcacccgggacaucuacaucagccgccggcugcucggcaccuucaccuggacgcugagcgacuccgaggggaaggacaccccgggcggguacugccugacccgcuggaugcucaucgaggccgagcugaagugcuucggcaacaccgccguggccaagugcaacgagaagcacgacgaggaguucugcgacaugcugcggcuguucgacuucugcaagcaggccauccagcgccugaaggcggaggcccagaugagcauccagcugaucaacaaggccgugaacgcccucaucaacgaccagcugaucaugaagaaccaccuccgggacaucauggggauccccuacugcaacuacuccaaguacugguaccucaaccacacgaccaccggccgcaccagccugcccaagugcuggcuggucuccaacggcagcuaccucaacgagacgcacuucuccgacgacaucgagcagcaggccgacaacaugaucaccgagaugcugcagaaggaguacauggagcggcaggggaagacgccccugggccucguggaccuguucguguucagcaccuccuucuaccugaucagcaucuuccugcaccucgucaagaucccgacccaccgccacaucguggggaaguccugccccaagccccaccggcugaaccacaugggcaucugcagcugcgggcuguacaagcagcccggcgugccggucaaguggaagcgcugaggacuaguaauaaggaaacuguaugaaugucugugggcaggaagugaagagauccuucuguaaagguuuuuggaauuaugucugcugaauaauaaacuuuuuugaaauaauaaaucugguagaaaaaugagaucucaaaggcucuuuucagagccaccaaaaaaaaaaaaaaaaaaaaaaaaaaaaaaaaaaaaaaaaaaaaaaaaaaaaaaaaaaaaaaaaagaauu

SEQ ID NO: 37446 - RNA, 1778 nt, Artificial Sequence
  mRNA product Design b-4 (hSL-A64-N5) comprising derived and/or modified sequence from LASV(LP;Clade I)__AAF86701__GPCmut10 (opt1)
aggagagucccgcagucggcguccagcggcucugcuuguucgugugugugucguugcaggccuuauucaagcuuaccaugggccagaucaucaccuucuuccaggaggugccccacgucaucgaggaggugaugaacaucgugcugaucgcccucagccugcuggccauccucaaggggcuguacaacaucgcgaccugcggcaucaucgggcuggucgccuuccucuuccugugcggcaaguccugcagccugacgcucaagggcggguacgagcugcagacccuggagcucaacauggagacccugaacaugugcaugccgcuguccugcacgaagaacagcucccaccacuacauccgcgugggcaacgagaccgggcucgagcugacccugaccaacacgagcaucaucaaccacaaguucugcaaccucuccgacgcccacaagaagaaccuguacgaccacgcccugaugagcaucaucuccaccuuccaccucagcauccccaacuucaaccaguacgaggccauguccugcgacuucaacggcgggaagaucagcgugcaguacaaccugucccacagcuacgcgggcgacgccgccgagcacugcgggaccgucgccaacggcgugcugcagaccuucaugcggauggcguggggcgggcgcuacaucgcccucgacuccggcaaggggaacugggacugcaucaugacgagcuaccaguaccugaucauccagaacaccaccugggaggaccacugccaguucucccggcccagccccaucggcuaccugggccuccugucccagcgcacccgggacaucuacaucagccgccggcugcucgggacguucaccuggacccugagcgacuccgagggcaacgagacccccgggggcuacugccugacgcgcuggaugcucaucgaggccgagcugaagugcuucgggaacaccgccguggccaagugcaacgagaagcacgacgaggaguucugcgacaugcugcggcuguucgacuucugcaagcaggcgauccgccggcugaaggccgaggcccagaugagcauccagcugaucaacaaggccgucaacgcccucaucaacgaccagcugaucaugaagaaccaccuccgcgacaucaugggcauccccuacugcaacuacuccaaguacugguaccucaaccacaccagcuccggccggaccagccugcccaagugcuggcugaucuccaacgggagcuaccucaacgagacgcaguucuccgacgacaucgagcagcaggcggacaacaugaucaccgagaugcugcagaaggaguacaucgagcgccagggcaagaccccgcuggggcucguggacaucuucaucuucagcaccuccuucuaccugaucagcaucuuccugcaccugaucaagaucccgacgcaccggcacaucgugggcaagcccugccccaagccccaccgccucaaccacaugggggucugcuccugcggccuguacaagcacccgggcgugcccaccaaguggaagcggugaggacuaguaauaaggaaacuguaugaaugucugugggcaggaagugaagagauccuucuguaaagguuuuuggaauuaugucugcugaauaauaaacuuuuuugaaauaauaaaucugguagaaaaaugagaucucaaaggcucuuuucagagccaccaaaaaaaaaaaaaaaaaaaaaaaaaaaaaaaaaaaaaaaaaaaaaaaaaaaaaaaaaaaaaaaaagaauu

SEQ ID NO: 37447 - RNA, 1778 nt, Artificial Sequence
  mRNA product Design b-4 (hSL-A64-N5) comprising derived and/or modified sequence from LASV(803213;Clade II)__AAF86703__GPCmut10 (opt1)
aggagagucccgcagucggcguccagcggcucugcuuguucgugugugugucguugcaggccuuauucaagcuuaccaugggccagaucaucaccuucuuccaggaggugccccacgucaucgaggaggugaugaacaucgugcugaucgcccucagccugcuggccauccucaaggggaucuacaacgucgcgaccugcggccuguucgggcugaucuccuuccuccugcugugcggccgcagcugcuccgugacguacaaggggguguacgagcuccagacccuggagcugaacauggccaaccucaacaugugcaugccgcugagcugcaccaagaacaacucccaccacuacaucauggucggcaacgagacgggccuggagcucacccugaccaacaccagcaucaucaaccacaaguucugcaaccuguccgacgcccacaagaagaaccucuacgaccacgcccugaugagcaucaucuccacguuccaccugagcauccccaacuucaaccaguacgaggccauguccugcgacuucaacgggggcaagaucagcgugcaguacaaccucucccacagcuucgcgguggacgccgccaaccacugcgggaccaucgccaacggcguccugcagaccuucaugcggauggcguggggcggguccuacaucgcccuggacagcggcaaggggaacugggacugcaucaugaccuccuaccaguaccucaucauccagaacacgaccugggaggaccacugccaguucagccgccccucccccaucggcuaccuggggcugcucagccagcggacccgcgacaucuacaucagccggcgccugcugggcaccuucacguggacccucuccgacagcgagggcaacgaggcccccgggggcuacugccugacccgguggaugcugaucgaggccgagcucaagugcuucgggaacaccgccguggcgaagugcaacgagaagcacgacgaggaguucugcgacaugcugcgccuguucgacuucugcaagcaggccaucaagcggcucaagacggaggcccagauguccauccagcugaucaacaaggccgugaacgcccugaucaacgaccagcucaucaugaagaaccaccuccgcgacaucaugggcauccccuacugcaacuacagccgguacugguaccugaaccacaccgucaccgggaagaccucccugccccgcugcuggcuggugagcaacggcuccuaccugaacgagacgcacuucagcgacgacaucgagcagcaggcggacaacaugaucaccgagaugcuccagaaggaguacauggaccggcagggcaagaccccgcuggggcugguggaccucuucgucuucuccaccagcuucuaccugaucuccaucuuccugcaccuggugaagaucccgacgcaccgccacaucgugggcaagcccugccccaagccccaccggcucaaccacauggggaucugcagcugcggccuguacaagcacccggggguccccgugaaguggaagcgcugaggacuaguaauaaggaaacuguaugaaugucugugggcaggaagugaagagauccuucuguaaagguuuuuggaauuaugucugcugaauaauaaacuuuuuugaaauaauaaaucugguagaaaaaugagaucucaaaggcucuuuucagagccaccaaaaaaaaaaaaaaaaaaaaaaaaaaaaaaaaaaaaaaaaaaaaaaaaaaaaaaaaaaaaaaaaagaauu

SEQ ID NO: 37448 - RNA, 1778 nt, Artificial Sequence
  mRNA product Design b-4 (hSL-A64-N5) comprising derived and/or modified sequence from LASV(GA391;Clade III)__CAA36645__GPCmut10 (opt1)
aggagagucccgcagucggcguccagcggcucugcuuguucgugugugugucguugcaggccuuauucaagcuuaccaugggccagaucgugaccuucuuccaggaggucccccacgugaucgaggaggugaugaacaucguccugaucgcccucagcauccuggccauccugaaggggcucuacaacguggcgaccugcggccugaucgggcuggugacguuccuccugcuguccggccgcagcugcucccucaucuacaaggggaccuacgagcugcagacccuggagcucaacauggagacccugaacaugugcaugccgcugagcugcaccaagaacaacucccaccacuacauccgggucggcaacgagaccggccucgagcugacccugacgaacaccagcauccucaaccacaaguucugcaaccuguccgacgcccacaagcgcaaccuguacgaccacagccucauguccaucaucagcaccuuccaccuguccauccccaacuucaaccaguacgaggccaugagcugcgacuucaacgggggcaagaucaccgugcaguacaaccugucccacagcuucgccguggacgccgcggggcacugcggcacgcucgccaacgggguccugcagaccuucaugcggauggccuggggcggcuccuacaucgcccuggacagcgggcgcggcaacugggacugcaucaugaccuccuaccaguaccucaucauccagaacaccacgugggacgaccacugccaguucagccggcccucccccaucggguaccugggccugcucagccagcgcacccgggacaucuacaucagccgccggcugcugggcaccuucaccuggacgcucuccgacagcgaggggaacgagaccccgggcggguacugccugacccgcuggaugcugaucgaggcggagcucaagugcuucggcaacaccgccguggccaagugcaacgagaagcacgacgaggaguucugcgacaugcugcggcuguucgacuucugcaagcaggccauccgccggcucaagacggaggcccagauguccauccagcugaucaacaaggcggugaacgcccugaucaacgaccagcucaucaugaagaaccaccuccgcgacaucauggggauccccuacugcaacuacagccgguacugguaccugaaccacaccuccaccggcaagaccagccugccccgcugcuggcugaucuccaacggcagcuaccugaacgagacgaaguucuccgacgacaucgagcagcaggccgacaacaugaucaccgagaugcuccagaaggaguacaucgaccggcaggggaagacgccccugggccuggucgaccuguucguguucagcaccuccuucuaccucaucagcaucuuccugcaccuggugaagaucccgacccaccgccacaucgucgggaagcccugccccaagccccaccggcucaaccacaugggcaucugcuccugcgggcuguacaagcagccgggcgugcccgugcgcuggaagcggugaggacuaguaauaaggaaacuguaugaaugucugugggcaggaagugaagagauccuucuguaaagguuuuuggaauuaugucugcugaauaauaaacuuuuuugaaauaauaaaucugguagaaaaaugagaucucaaaggcucuuuucagagccaccaaaaaaaaaaaaaaaaaaaaaaaaaaaaaaaaaaaaaaaaaaaaaaaaaaaaaaaaaaaaaaaaagaauu

SEQ ID NO: 37449 - RNA, 1781 nt, Artificial Sequence
  mRNA product Design b-4 (hSL-A64-N5) comprising derived and/or modified sequence from LASV(AV;Clade V)__CCA30314__GPCmut10 (opt1)
aggagagucccgcagucggcguccagcggcucugcuuguucgugugugugucguugcaggccuuauucaagcuuaccaugggccagaucgugaccuucuuccaggaggucccccacgugaucgaggaggugaugaacaucguccugaucgcccucagcauccuggccgugcugaaggggcucuacaacaucgcgaccugcggccugaucgggcugaucacguuccuccugcugugcggccgcuccugcagcuccaaccucuacaaggggguguacgagcugcagagccuggaccucaacauggagacccugaacaugugcaugccgcuguccugcaccaagaacaacagccaccacuacauccgggucggcaacgacacgggccucgagcugacccugaccaacaccuccauccucaaccacaaguucugcaaccugagcgacgcccacaagaaggaccuguacgaccacgcccucauguccaucaucagcacguuccaccuguccauccccaacuucaaccaguacgaggccaugagcugcgacuucaacgggggcaagaucuccgugcaguacaaccugagccacuccuacgccaucgacgcggccaaccacugcgggaccguggccaacggcauccuccagaccuucaugcgcauggccuggggcgggagcuacaucgcgcuggacuccggccgggggaacugggacugcaucaugaccagcuaccaguaccugaucauccagaacacgaccugggagaaccacugccaguucucccgccccagccccaucggcuaccucgggcugcugagccagcggacccgcgacaucuacaucucccggcgccuccugggcaccuucacguggacccugagcgacuccgagggcaacgccacccccgggggcuacugccucacccgguggaugcugaucgaggccgagcugaagugcuucgggaacacggccgucgccaagugcaacgagaagcacgacgaggaguucugcgacaugcuccgccuguucgacuucugcaagcaggcgaucagccggcugaaguccgaggcccagaugagcauccagcucaucaacaaggccgugaacgcccugaucaacgaccagcugaucaugaagaaccaccuccgcgacaucaugggcauccccuacugcaacuacuccaaguacugguaccugaaccacaccaucaccgggaagaccagccugcccaagugcuggcucguguccaacggcagcuaccugaacgagacgcacuucuccgacgacaucgagcagcaggccgacaacaugaucaccgagaugcugcagaaggaguacauggagcggcagggcaagaccccgcucgggcuggucgaccuguucguguucagcaccuccuucuaccugaucagcaucuuccuccgccuggugaagaucccgacgcaccggcacaucgucggcaagcccugccccaagccccaccgccugaaccacauggggaucugcuccugcggccucuacaagcagccgggggugcccgugcgguggaagcgcugaggacuaguaauaaggaaacuguaugaaugucugugggcaggaagugaagagauccuucuguaaagguuuuuggaauuaugucugcugaauaauaaacuuuuuugaaauaauaaaucugguagaaaaaugagaucucaaaggcucuuuucagagccaccaaaaaaaaaaaaaaaaaaaaaaaaaaaaaaaaaaaaaaaaaaaaaaaaaaaaaaaaaaaaaaaaagaauu

SEQ ID NO: 37450 - RNA, 1778 nt, Artificial Sequence
  mRNA product Design b-4 (hSL-A64-N5) comprising derived and/or modified sequence from LASV(Togo/2016/7082;Clade VI)__AMR44577__GPCmut10 (opt1)
aggagagucccgcagucggcguccagcggcucugcuuguucgugugugugucguugcaggccuuauucaagcuuaccaugggccagaucaucaccuucuuccaggaggugccccacgucaucgaggaggugaugaacaucgugcugaucgcccucagccugcuggccauccucaagggggucuacaacguggcgaccugcggcaucaucgggcuggugacguuccuguuccucugcggccgcuccugcagccugaucuacaagggguccuacgagcugcagacccucgagcugaacauggagacccugaacaugugcaugccgcucagcugcacgaagaacuccagccaccacuacauccgggucggcaacgagaccggccuggagcugacccucaccaacacguccaucaucaaccacaaguucugcaaccugagcgacgcccacaagcgcaaccuguacgaccacgcccucauguccauccugagcaccuuccaccuguccauccccaacuucaaccaguacgaggccaugagcugcgacuucaacgggggcaagaucuccgugcaguacaaccucagccacgccuacgcgguggacgccgccgagcacugcgggaccgucgccaacggcgugcugcagaccuucaugcggauggcguggggcggguccuacaucgcccuggacagcggccgcgggaacugggacugcaucaugacguccuaccaguaccucaucauccagaacaccaccugggaggaccacugccaguucagccggcccucccccaucggcuaccuggggcugcucagccagcgcacccgggacaucuacaucagccgccggcugcugggcacguucaccuggacccucuccgacagcgagggcaacgagacccccgggggcuacugccugacgcgcuggaugcugaucgaggccgagcucaagugcuucgggaacaccgccguggccaagugcaacgagaagcacgacgaggaguucugcgacaugcugcggcuguucgacuucugcaagcaggcgauccagcgccucaaguccgaggcccagaugagcauccagcugaucaacaaggccgucaacgcccugaucaacgaccagcucaucaugaagaaccaccuccgggacaugaugggcauccccuacugcaacuacuccaaguacugguaccugaaccacaccagcuccgggcgcaccagccugcccaagugcuggcugguguccaacggcagcuaccugaacgagacgcacuucuccgacgacaucgagcagcaggccgacaacaugaucaccgagaugcuccagaaggaguacaucgaccggcagggcaagaccccgcuggggcugguggaccucuucgucuucagcaccuccuucuaccugaucagcaucuuccugcaccugaucaagaucccgacgcaccgccacaucgugggcaagcccugccccaagccccaccggcucaaccacauggggaucugcuccugcggccuguacaagcagccgggggugcccacccgcuggaagcggugaggacuaguaauaaggaaacuguaugaaugucugugggcaggaagugaagagauccuucuguaaagguuuuuggaauuaugucugcugaauaauaaacuuuuuugaaauaauaaaucugguagaaaaaugagaucucaaaggcucuuuucagagccaccaaaaaaaaaaaaaaaaaaaaaaaaaaaaaaaaaaaaaaaaaaaaaaaaaaaaaaaaaaaaaaaaagaauu

SEQ ID NO: 37451 - RNA, 1778 nt, Artificial Sequence
  mRNA product Design b-4 (hSL-A64-N5) comprising derived and/or modified sequence from LASV(KAK-428;Clade n.d. (VII))__ANH09740__GPCmut10 (opt1)
aggagagucccgcagucggcguccagcggcucugcuuguucgugugugugucguugcaggccuuauucaagcuuaccaugggccagaucgugaccuucuuccaggaggucccccacgugaucgaggaggugaugaacaucguccugaucgcccucagccugcuggccauccucaaggggcuguacaacuucgcgaccugcggcgugaucgggcugaucacguuccuccugcugugcggccgcuccugcagcgccaccuacaaggggcaguacgagcuccagacccuggagcugaacauggagucccucaacaugugcaugccgcugagcugcacgaagaacaacucccaccacuacauccgggccggcaacaacaccggccuggagcucacccugaccaacacgagcaucaucucccacaaguucugcaaccugagcgacgcccacaagaagaaccucuacgaccacacccugauguccaucaucaccaccuuccaccugagcauccccaacuucaaccaguacgaggccauguccugcgacuucaacgggggcaagaucagcauccaguacaaccucucccacagcuacgcgggggacgccgcccagcacugcggcacgguggccaacgggguccugcagaccuucaugcgcauggcguggggcggcuccuaccuggcccucgacagcgggcggcgcggcugggacugcaucaucuccagcuaccaguaccugaucauccagaacaccaccugggacgaccacugccaguucucccggcccagccccaucggguaccugggcuucgugagccagaagacgcgcgacaucuacaucucccggcgccuccugggcaccuucaccuggacccugagcgacuccgaggggcacgacaugccgggcggguacugccucacgcgguggaugcugaucgaggccgaccugaagugcuucggcaacaccgccguggccaagugcaacgagaagcacgacgaggaguucugcgacauguggcgccucuucgacuucugcaagcaggcgauccagcggcugaaggccgaggcccagaugaacauccagcugaucaacaaggccgucaacgcccucaucaacgaccagcugaugaugaagaaccaccuccgcgacaucauggggauccccuacugcaacuacagcaaguucugguaccugaacaacaccaccacgggccggaccucccugccccgcugcuggcugaucagcaacggcuccuaccucaacgagacccacuucagcgacgacaucgagcagcaggcggacaacaugaucaccgagaugcugcagaaggaguacauggaccggcaggggaagacgccccugggccucguggaccuguucguguucuccaccagcuucuaccugaucaccaucuuccuccaccuggucaagaucccgacccaccgccacaucguggggaagcccugccccaagccccaccggcugaaccacaugggcaucugcuccugcgggcuguacaagcagccgggcgugcccguccgcuggaagcggugaggacuaguaauaaggaaacuguaugaaugucugugggcaggaagugaagagauccuucuguaaagguuuuuggaauuaugucugcugaauaauaaacuuuuuugaaauaauaaaucugguagaaaaaugagaucucaaaggcucuuuucagagccaccaaaaaaaaaaaaaaaaaaaaaaaaaaaaaaaaaaaaaaaaaaaaaaaaaaaaaaaaaaaaaaaaagaauu

SEQ ID NO: 37452 - RNA, 1778 nt, Artificial Sequence; identical to SEQ ID NO: 37446
  mRNA product Design b-4 (hSL-A64-N5) comprising derived and/or modified sequence from LASV(Pinneo-NIG-1969;Clade I)__AIT17836__GPCmut10 (opt1)

SEQ ID NO: 37453 - RNA, 1778 nt, Artificial Sequence
  mRNA product Design b-4 (hSL-A64-N5) comprising derived and/or modified sequence from LASV(ISTH0009-NIG-2011;Clade II)__AIT17404__GPCmut10 (opt1)
aggagagucccgcagucggcguccagcggcucugcuuguucgugugugugucguugcaggccuuauucaagcuuaccaugggccagaucaucaccuucuuccaggaggugccccacgucaucgaggaggugaugaacaucgugcugaucgcccucagccugcuggccauccucaaggggaucuacaacgucgcgaccugcggccuguucgggcugguguccuuccuccugcugugcggccgcagcugcuccacgaccuacaaggggguguacgagcuccagacccuggagcuggacauggccagccucaacaugugcaugccgcuguccugcacgaagaacaacagccaccacuacaucauggucggcaacgagaccggccuggagcucacccugaccaacacguccaucaucaaccacaaguucugcaaccugagcgacgcccacaagaagaaccucuacgaccacgcccugauguccaucaucagcaccuuccaccuguccauccccaacuucaaccaguacgaggccaugagcugcgacuucaacgggggcaagaucuccgugcaguacaaccucagccacgcguacgccguggacgccgccaaccacugcgggaccaucgcgaacggcguccugcagaccuucaugcggauggccuggggcggguccuacaucgcccuggacagcggcaagggguccugggacugcaucaugacgagcuaccaguaccucaucauccagaacaccaccugggaggaccacugccaguucucccgccccagccccaucggcuaccuggggcugcucagccagcggacccgcgacaucuacaucucccggcgccugcugggcacguucaccuggacccucagcgacuccgagggcaacgagacccccgggggcuacugccugacgcgguggaugcugaucgaggccgagcucaagugcuucgggaacaccgccguggcgaagugcaacgagaagcacgacgaggaguucugcgacaugcugcgccuguucgacuucugcaagcaggccauccggcgccucaagaccgaggcccagaugagcauccagcugaucaacaaggccgugaacgcccugaucaacgaccagcucaucaugaagaaccaccuccgggacaucaugggcaucccguacugcaacuacuccaaguacugguaccugaaccacaccgucacggggaagaccagccugccccgcugcuggcugguguccaacggcagcuaccugaacgagacccacuucuccgacgacaucgagcagcaggcggacaacaugaucaccgagcuccugcagaaggaguacauggaccggcagggcaagacgccccuggggcucguggaccuguucgucuucagcaccuccuucuaccugaucagcaucuuccugcaccucaucaagaucccgacccaccgccacaucaccggcaagcccugccccaagccccaccggcugaaccacauggggaucugcuccugcggccuguacaagcacccgggggugcccgugaaguggaagcgcugaggacuaguaauaaggaaacuguaugaaugucugugggcaggaagugaagagauccuucuguaaagguuuuuggaauuaugucugcugaauaauaaacuuuuuugaaauaauaaaucugguagaaaaaugagaucucaaaggcucuuuucagagccaccaaaaaaaaaaaaaaaaaaaaaaaaaaaaaaaaaaaaaaaaaaaaaaaaaaaaaaaaaaaaaaaaagaauu

SEQ ID NO: 37454 - RNA, 1778 nt, Artificial Sequence
  mRNA product Design b-4 (hSL-A64-N5) comprising derived and/or modified sequence from LASV(ISTH2010-NIG-2012;Clade II)__AIT17482__GPCmut10 (opt1)
aggagagucccgcagucggcguccagcggcucugcuuguucgugugugugucguugcaggccuuauucaagcuuaccaugggccagaucaucaccuucuuccaggaggugccccacgucaucgaggaggugaugaacaucgugcugaucgcccucagccugcuggccauccucaaggggaucuacaacgucgcgaccugcggccuguucgggcugguguccuuccuccugcugugcggccgcagcugcuccacgaccuacaaggggguguacgagcuccagacccuggagcuggacauggccagccucaacaugugcaugccgcuguccugcacgaagaacaacagccaccacuacaucauggucggcaacgagaccggccuggagcucacccugaccaacacguccaucaucaaccacaaguucugcaaccugagcgacgcccacaagaagaaccucuacgaccacgcccugauguccaucaucagcaccuuccaccuguccauccccaacuucaaccaguacgaggccaugagcugcgacuucaacgggggcaagaucuccgugcaguacaaccucagccacgcguacgccguggacgccgccaaccacugcgggaccaucgcgaacggcguccugcagaccuucaugcggauggccuggggcggguccuacaucgcccuggacagcggcaagggguccugggacugcaucaugacgagcuaccaguaccucaucauccagaacaucaccugggaggaccacugccaguucucccgccccagccccaucggcuaccuggggcugcucagccagcggacccgcgacaucuacaucucccggcgccugcugggcaccuucacguggacccucagcgacuccgagggcaacgagacccccgggggcuacugccugacccgguggaugcugaucgaggccgagcucaagugcuucgggaacacggccguggcgaagugcaacgagaagcacgacgaggaguucugcgacaugcugcgccuguucgacuucugcaagcaggccauccggcgccucaagaccgaggcccagaugagcauccagcugaucaacaaggccgugaacgcccugaucaacgaccagcucaucaugaagaaccaccuccgggacaucaugggcauccccuacugcaacuacuccaaguacugguaccugaaccacaccgucaccgggaagacgagccugccccgcugcuggcugguguccaacggcagcuaccugaacgagacccacuucuccgacgacaucgagcagcaggcggacaacaugaucaccgagcuccugcagaaggaguacaucgaccggcagggcaagaccccgcuggggcucguggaccuguucgucuucagcacguccuucuaccugaucagcaucuuccugcaccucgugaagaucccgacccaccgccacguggucggcaagcccugccccaagccccaccggcugaaccacauggggaucugcuccugcggccuguacaagcacccgggggugcccgugaaguggaagcgcugaggacuaguaauaaggaaacuguaugaaugucugugggcaggaagugaagagauccuucuguaaagguuuuuggaauuaugucugcugaauaauaaacuuuuuugaaauaauaaaucugguagaaaaaugagaucucaaaggcucuuuucagagccaccaaaaaaaaaaaaaaaaaaaaaaaaaaaaaaaaaaaaaaaaaaaaaaaaaaaaaaaaaaaaaaaaagaauu

SEQ ID NO: 37455 - RNA, 1778 nt, Artificial Sequence
  mRNA product Design b-4 (hSL-A64-N5) comprising derived and/or modified sequence from LASV(Lassa virus/H.sapiens-wt/NGA/2015/ISTH_0543;Clade II)__AVO03639__GPCmut10 (opt1)
aggagagucccgcagucggcguccagcggcucugcuuguucgugugugugucguugcaggccuuauucaagcuuaccaugggccagaucaucaccuucuuccaggaggugccccacgucaucgaggaggugaugaacaucgugcugaucgcccucagccugcuggccauccucaaggggaucuacaacgucgcgaccugcggccuguucgggcugguguccuuccuccugcugugcggccgcagcugcuccacgaccuacaaggggguguacgagcuccagacccuggagcuggacauggccaaccucaacaugugcaugccgcugagcugcacgaagaacaacucccaccacuacaucauggucggcaacgagaccggccuggagcucacccugaccaacacgagcaucaucaaccacaaguucugcaaccuguccgacgcccacaagaagaaccucuacgaccacgcccugaugagcaucaucuccaccuuccaccugagcauccccaacuucaaccaguacgaggccauguccugcgacuucaacgggggcaagaucagcgugcaguacaaccucucccacaccuacgcgguggacgccgccaaccacugcgggaccaucgccaacggcguccugcagacguucaugcggauggcguggggcgggagcuacaucgcccuggacuccggcaaggggagcugggacugcaucaugaccuccuaccaguaccucgugauccagaacaccaccugggaggaccacugccaguucagccgccccucccccaucggcuaccuggggcugcucagccagcggacgcgcgacaucuacaucagccggcgccugcugggcaccuucaccuggacccucuccgacagcgagggcaacgagacgcccgggggcuacugccugacccgguggaugcugaucgaggccgagcucaagugcuucgggaacaccgccguggccaagugcaacgagaagcacgacgaggaguucugcgacaugcugcgccuguucgacuucugcaagcaggcgauccggcgccucaagaccgaggcccagauguccauccagcugaucaacaaggccgucaacgcccugaucaacgaccagcucaucaugaagaaccaccuccgggacaucaugggcauccccuacugcaacuacagcaaguacugguaccugaaccacacggugaccgggaagaccucccugccccgcugcuggcuggugagcaacggcuccuaccugaacgagacccacuucagcgacgacaucgagcagcaggccgacaacaugaucacggagcuccugcagaaggaguacaucgaccggcagggcaagaccccgcuggggcucgucgaccuguucguguucuccaccagcuucuaccugaucuccaucuuccugcaccucgugaagaucccgacccaccgccacaucacgggcaagcccugccccaagccccaccggcugaaccacauggggaucugcagcugcggccuguacaagcacccggggguccccgugaaguggaagcgcugaggacuaguaauaaggaaacuguaugaaugucugugggcaggaagugaagagauccuucuguaaagguuuuuggaauuaugucugcugaauaauaaacuuuuuugaaauaauaaaucugguagaaaaaugagaucucaaaggcucuuuucagagccaccaaaaaaaaaaaaaaaaaaaaaaaaaaaaaaaaaaaaaaaaaaaaaaaaaaaaaaaaaaaaaaaaagaauu

SEQ ID NO: 37456 - RNA, 1778 nt, Artificial Sequence
  mRNA product Design b-4 (hSL-A64-N5) comprising derived and/or modified sequence from LASV(Lassa virus/H.sapiens-wt/NGA/2016/ISTH_0009;Clade II)__AVO03571__GPCmut10 (opt1)
aggagagucccgcagucggcguccagcggcucugcuuguucgugugugugucguugcaggccuuauucaagcuuaccaugggccagaucaucaccuucuuccaggaggugccccacgucaucgaggaggugaugaacaucgugcugaucgcccucagccugcuggccauccucaaggggaucuacaacgucgcgaccugcggccugcuggggcucguguccuuccugcugcucugcggccgcagcugcuccacgaccuacaaggggguguacgagcugcagacccuggagcucgacauggccagccugaacaugugcaugccgcuguccugcacgaagaacaacagccaccacuacaucauggucggcaacgagaccggccucgagcugacccugaccaacacguccaucaucaaccacaaguucugcaaccucagcgacgcccacaagaagaaccuguacgaccacgcccugauguccaucaucagcaccuuccaccucuccauccccaacuucaaccaguacgaggccaugagcugcgacuucaacgggggccggaucuccgugcaguacaaccugagccacuccuacgcgguggacgccgccaaccacugcgggaccaucgccaacggcguccugcagaccuucaugcgcauggcguggggcgggagcuacaucgcccucgacuccggcaaggggagcugggacugcaucaugacguccuaccaguaccugaucauccagaacaccaccugggaggaccacugccaguucagccggcccagccccaucggcuaccuggggcuccugucccagcgcacccgggacaucuacaucagccgccggcugcucggcacguucaccuggacccuguccgacagcgagggcaacgagacccccgggggcuacugccugacgcgcuggaugcucaucgaggccgagcugaagugcuucgggaacaccgccguggccaagugcaacgagaagcacgacgaggaguucugcgacaugcugcggcuguucgacuucugcaagcaggcgauccgccggcugaagaccgaggcccagauguccauccagcugaucaacaaggccgugaacgcccucaucaacgaccagcugaucaugaagaaccaccuccgcgacaucaugggcaucccguacugcaacuacagcaaguacugguaccucaaccacaccgucacggggaagaccucccugccccggugcuggcuggugagcaacggcuccuaccucaacgagacccacuucagcgacgacaucgagcagcaggccgacaacaugaucaccgagcugcugcagaaggaguacaucgaccgccagggcaagacgccccucgggcugguggaccuguucgucuucuccaccagcuucuaccugaucuccaucuuccuccaccuggugaagaucccgacccaccggcacaucaccggcaagcccugccccaagccccaccgccugaaccacauggggaucugcagcugcggccucuacaaccacccgggggugcccgucaaguggaagcggugaggacuaguaauaaggaaacuguaugaaugucugugggcaggaagugaagagauccuucuguaaagguuuuuggaauuaugucugcugaauaauaaacuuuuuugaaauaauaaaucugguagaaaaaugagaucucaaaggcucuuuucagagccaccaaaaaaaaaaaaaaaaaaaaaaaaaaaaaaaaaaaaaaaaaaaaaaaaaaaaaaaaaaaaaaaaagaauu

SEQ ID NO: 37457 - RNA, 1778 nt, Artificial Sequence
  mRNA product Design b-4 (hSL-A64-N5) comprising derived and/or modified sequence from LASV(Lassa virus/H.sapiens-wt/NGA/2016/ISTH_0017;Clade II)__AVO03567__GPCmut10 (opt1)
aggagagucccgcagucggcguccagcggcucugcuuguucgugugugugucguugcaggccuuauucaagcuuaccaugggccagaucaucaccuucuuccaggaggugccccacgucaucgaggaggugaugaacaucgugcugaucgcccucagccugcuggccauccucaaggggaucuacaacgucgcgaccugcggccuguucgggcugguguccuuccuccugcugugcggccgcagcugcuccacgaccuacaaggggguguacgagcuccagacccuggagcuggacauggccagccucaacaugugcaugccgcuguccugcacgaagaacaacagccaccacuacaucauggucggcaacgagaccggccuggagcucacccugaccaacacguccaucaucaaccacaaguucugcaaccugagcgacgcccacaagaagaaccucuacgaccacgcccugauguccaucaucagcaccuuccaccuguccauccccaacuucaaccaguacgaggccaugagcugcgacuucaacgggggcaagaucuccgugcaguacaaccucagccacaccuacgcgaucgacgccgccaaccacugcgggaccaucgccaacggcgugcugcagacguucaugcggauggcguggggcggguccuacaucgcccuggacagcggcaagggguccugggacugcaucaugaccagcuaccaguaccucaucauccagaacaccaccugggaggaccacugccaguucucccgccccagccccaucggcuaccuggggcugcucagccagcggacgcgcgacaucuacaucucccggcgccugcugggcaccuucaccuggacccucagcgacuccgagggcaacgagacgcccgggggcuacugccugacccgguggaugcugaucgaggccgagcucaagugcuucgggaacaccgccgucgccaagugcaacgagaagcacgacgaggaguucugcgacaugcugcgccuguucgacuucugcaagcaggcgauccggcgccucaagaccgaggcccagaugagcauccagcugaucaacaaggccgugaacgcccugaucaacgaccagcucaucaugaagaaccaccuccgggacaucaugggcauccccuacugcaacuacuccaaguacugguaccugaaccacacggugaccgggaagaccagccugccccgcugcuggcuggucuccaacggcagcuaccugaacgagacccacuucuccgacgacaucgagcagcaggccgacaacaugaucacggagcuccugcagaaggaguacauggaccggcagggcaagaccccgcuggggcucguggaccuguucguguucagcaccuccuucuaccugaucagcaucuuccugcaccucguccgcaucccgacccaccggcacgugaucggcaagcccugccccaagccccaccgccugaaccacauggggaucugcuccugcggccuguacaagcacccgggggugcccgucaaguggaagcggugaggacuaguaauaaggaaacuguaugaaugucugugggcaggaagugaagagauccuucuguaaagguuuuuggaauuaugucugcugaauaauaaacuuuuuugaaauaauaaaucugguagaaaaaugagaucucaaaggcucuuuucagagccaccaaaaaaaaaaaaaaaaaaaaaaaaaaaaaaaaaaaaaaaaaaaaaaaaaaaaaaaaaaaaaaaaagaauu

SEQ ID NO: 37458 - RNA, 1778 nt, Artificial Sequence
  mRNA product Design b-4 (hSL-A64-N5) comprising derived and/or modified sequence from LASV(Lassa virus/H.sapiens-wt/NGA/2018/ISTH_0959;Clade II)__AVV65099__GPCmut10 (opt1)
aggagagucccgcagucggcguccagcggcucugcuuguucgugugugugucguugcaggccuuauucaagcuuaccaugggccagaucaucaccuucuuccaggaggugccccacgucaucgaggaggugaugaacaucgugcugaucgcccucagccugcuggccauccucaaggggaucuacaacgucgugaccugcggccuguucgggcugguguccuuccuccugcugugcggccgcagcugcuccacgaccuacaagggggucuacgagcuccagacccuggagcuggacauggcgagccucaacaugugcaugccgcuguccugcacgaagaacaacagccaccacuacaucauggugggcaacgagaccggccuggagcucacccugaccaacacguccaucaucaaccacaaguucugcaaccugagcgacgcccacaagaagaaccucuacgaccacgcccugauguccaucaucagcaccuuccaccuguccauccccaacuucaaccaguacgaggccaugagcugcgacuucaacgggggcaagaucuccgugcaguacaaccucagccacgccuacgcgaucgacgccgccaaccacugcgggaccaucgccaacggcguccugcagaccuucaugcggauggcguggggcggguccuacaucgcccuggacagcggcaagggguccugggacugcaucaugacgagcuaccaguaccucaucauccagaacaccaccugggaggaccacugccaguucucccgccccagccccaucggcuaccuggggcugcucagccagcggacccgcgacaucuacaucucccggcgccugcugggcacguucaccuggacccucagcgacuccgagggcaacgagacccccgggggcuacugccugacgcgguggaugcugaucgaggccgagcucaagugcuucgggaacaccgccguggccaagugcaacgagaagcacgacgaggaguucugcgacaugcugcgccuguucgacuucugcaagcaggcgauccggcgccucaagaccgaggcccagaugagcauccagcugaucaacaaggccgugaacgcccugaucaacgaccagcucaucaugaagaaccaccuccgggacaucaugggcaucccguacugcaacuacuccaaguacugguaccugaaccacaccgucacggggaagaccagccugccccgcugcuggcugguguccaacggcagcuaccugaacgagacccacuucuccgacgacaucgagcagcaggccgacaacaugaucaccgagcuccugcagaaggaguacaucgaccggcagggcaagacgccccuggggcucguggaccuguucgucuucagcaccuccuucuaccugaucagcaucuuccugcaccucgugaagaucccgacccaccgccacgugaucggcaagcccugccccaagccccaccggcugaaccacauggggaucugcuccugcggccuguacaagcacccggggguccccgugaaguggaagcgcugaggacuaguaauaaggaaacuguaugaaugucugugggcaggaagugaagagauccuucuguaaagguuuuuggaauuaugucugcugaauaauaaacuuuuuugaaauaauaaaucugguagaaaaaugagaucucaaaggcucuuuucagagccaccaaaaaaaaaaaaaaaaaaaaaaaaaaaaaaaaaaaaaaaaaaaaaaaaaaaaaaaaaaaaaaaaagaauu

SEQ ID NO: 37459 - RNA, 1778 nt, Artificial Sequence
  mRNA product Design b-4 (hSL-A64-N5) comprising derived and/or modified sequence from LASV(LASV003-NIG-2008;Clade II)__AIT17580__GPCmut10 (opt1)
aggagagucccgcagucggcguccagcggcucugcuuguucgugugugugucguugcaggccuuauucaagcuuaccaugggccagaucaucaccuucuuccaggaggugccccacgucaucgaggaggugaugaacaucgugcugaucgcccucagccugcuggccauccucaaggggaucuacaacgucgcgaccugcggccuguucgggcugguguccuuccuccugcugugcggccgcagcugcuccacgaccuacaaggggguguacgagcuccagacccuggagcuggacauggccagccucaacaugugcaugccgcuguccugcacgaagaacaacagccaccacuacaucauggucggcaacgagaccggccuggagcucacccugaccaacacguccaucaucaaccacaaguucugcaaccugagcgacgcccacaagaagaaccucuacgaccacgcccugauguccaucaucagcaccuuccaccuguccauccccaacuucaaccaguacgaggccaugagcugcgacuucaacgggggcaagaucuccgugcaguacaaccucagccacaccuacgcgguggacgccgccaaccacugcgggaccaucgccaacggcguccugcagacguucaugcggauggcguggggcggguccuacaucgcccuggacagcggcaagggguccugggacugcaucaugaccagcuaccaguaccucaucauccagaacaccaccugggaggaccacugccaguucucccgccccagccccaucggcuaccuggggcugcucagccagcggacgcgcgacaucuacaucucccggcgccugcugggcaccuucaccuggacccucagcgacuccgagagcaacgagacgccgggcggguacugccugacccgguggaugcugaucgaggccgagcucaagugcuucggcaacaccgccguggccaagugcaacgagaagcacgacgaggaguucugcgacaugcugcgccuguucgacuucugcaagcaggcgauccggcgccucaaggccgaggcccagauguccauccagcugaucaacaaggccgugaacgcccugaucaacgaccagcucaucaugaagaaccaccuccgggacaucauggggauccccuacugcaacuacagcaaguacugguaccugaaccacaccgucacgggccgcaccucccugccccggugcuggcuggugagcaacggguccuaccugaacgagacccacuucagcgacgacaucgagcagcaggcggacaacaugaucaccgagcuccugcagaaggaguacauggaccgccagggcaagacgccccugggccucguggaccuguucgucuucuccaccagcuucuaccugaucuccaucuuccugcaccucgugaagaucccgacccaccggcacgugaucgggaagcccugccccaagccccaccgccugaaccacaugggcaucugcagcugcgggcuguacaagcacccgggcguccccgugaaguggaagcggugaggacuaguaauaaggaaacuguaugaaugucugugggcaggaagugaagagauccuucuguaaagguuuuuggaauuaugucugcugaauaauaaacuuuuuugaaauaauaaaucugguagaaaaaugagaucucaaaggcucuuuucagagccaccaaaaaaaaaaaaaaaaaaaaaaaaaaaaaaaaaaaaaaaaaaaaaaaaaaaaaaaaaaaaaaaaagaauu

SEQ ID NO: 37460 - RNA, 1778 nt, Artificial Sequence
  mRNA product Design b-4 (hSL-A64-N5) comprising derived and/or modified sequence from LASV(LASV035-NIG-2009;Clade II)__AIT17588__GPCmut10 (opt1)
aggagagucccgcagucggcguccagcggcucugcuuguucgugugugugucguugcaggccuuauucaagcuuaccaugggccagaucaucaccuucuuccaggaggugccccacgucaucgaggaggugaugaacaucgugcugaucgcccucagccugcuggccauccucaaggggaucuacaacgucgcgaccugcggccuguucgggcugguguccuuccuccugcugugcggccgcagcugcuccacgaccuacaaggggguguacgagcuccagacccuggagcuggacauggccagccucaacaugugcaugccgcuguccugcacgaagaacaacagccaccacuacaucauggucggcaacgagaccggccuggagcucacccugaccaacacguccaucaucaaccacaaguucugcaaccugagcgacgcccacaagaagaaccucuacgaccacgcccugauguccaucaucagcaccuuccaccuguccauccccaacuucaaccaguacgaggccaugagcugcgacuucaacgggggcaagaucuccgugcaguacaaccucagccacgcguacgccguggacgccgccaaccacugcgggaccaucgcgaacggcguccugcagaccuucaugcggauggccuggggcggguccuacaucgcccuggacagcggcaagggguccugggacugcaucaugacgagcuaccaguaccucaucauccagaacaccaccugggaggaccacugccaguucucccgccccagccccaucggcuaccuggggcugcucagccagcggacccgcgacaucuacaucucccggcgccugcugggcacguucaccuggacccucagcgacuccgagggcaacgagacccccgggggcuacugccugacgcgguggaugcugaucgaggccgagcucaagugcuucgggaacaccgccguggcgaagugcaacgagaagcacgacgaggaguucugcgacaugcugcgccuguucgacuucugcaagcaggccauccggcgccucaaggccgaggcccagaugagcauccagcugaucaacaaggccgugaacgcgcugaucaacgaccagcucaucaugaagaaccaccuccgggacaucaugggcauccccuacugcaacuacuccaaguacugguaccugaaccacaccgucaccgggaagacgagccugccccgcugcuggcugguguccaacggcagcuaccugaacgagacccacuucuccgacgacaucgagcagcaggccgacaacaugaucaccgagcuccugcagaaggaguacaucgaccggcagggcaagaccccgcuggggcucguggaccuguucgucuucagcacguccuucuaccugaucagcaucuuccugcaccucgugaagaucccgacccaccgccacgugaucggcaagcccugccccaagccccaccggcugaaccacauggggaucugcuccugcggccuguacaagcacccggggguccccgugaaguggaagcgcugaggacuaguaauaaggaaacuguaugaaugucugugggcaggaagugaagagauccuucuguaaagguuuuuggaauuaugucugcugaauaauaaacuuuuuugaaauaauaaaucugguagaaaaaugagaucucaaaggcucuuuucagagccaccaaaaaaaaaaaaaaaaaaaaaaaaaaaaaaaaaaaaaaaaaaaaaaaaaaaaaaaaaaaaaaaaagaauu

SEQ ID NO: 37461 - RNA, 1778 nt, Artificial Sequence
  mRNA product Design b-4 (hSL-A64-N5) comprising derived and/or modified sequence from LASV(LASV1000-NIG-2009;Clade II)__AIT17782__GPCmut10 (opt1)
aggagagucccgcagucggcguccagcggcucugcuuguucgugugugugucguugcaggccuuauucaagcuuaccaugggccagaucaucaccuucuuccaggaggugccccacgucaucgaggaggugaugaacaucgugcugaucgcccucagccugcuggccauccucaaggggaucuacaacgucgcgaccugcggccuguucgggcugguguccuuccuccugcugugcggccgcagcugcuccacgaccuacaaggggguguacgagcuccagacccuggagcuggacauggccagccucaacaugugcaugccgcuguccugcacgaagaacaacagccaccacuacaucauggucggcaacgagaccggccuggagcucacccugaccaacacguccaucaucaaccacaaguucugcaaccugagcgacgcccacaagaagaaccucuacgaccacgcccugauguccaucaucagcaccuuccaccuguccauccccaacuucaaccaguacgaggccaugagcugcgacuucaacgggggcaagaucuccgugcaguacaaccucagccacaccuacgcgguggacgccgccaaccacugcgggaccaucgccaacggcguccugcagacguucaugcggauggcguggggcggguccuacaucgcccuggacagcggcaagggguccugggacugcaucaugaccagcuaccaguaccucaucauccagaacaccaccugggaggaccacugccaguucucccgccccagccccaucggcuaccuggggcugcucagccagcggacgcgcgacaucuacaucucccggcgccugcugggcaccuucaccuggacccucagcgacuccgagggcaacgagacgcccgggggcuacugccugacccgguggaugcugaucgaggccgagcucaagugcuucgggaacaccgccguggccaagugcaacgagaagcacgacgaggaguucugcgacaugcugcgccuguucgacuucugcaagcaggcgaucaagcggcucaagaccgaggcccagaugagcauccagcugaucaacaaggccgugaacgcccugaucaacgaccagcucaucaugaagaaccaccuccgcgacaucaugggcauccccuacugcaacuacuccaaguacugguaccugaaccacacggucaccgggaagaccagccugccccggugcuggcugguguccaacggcagcuaccugaacgagacccacuucuccgacgacaucgagcagcaggccgacaacaugaucacggagcuccugcagaaggaguacaucgaccgccagggcaagaccccgcuggggcucguggaccuguucgucuucagcaccuccuucuaccugaucagcaucuuccugcaccucgugaagaucccgacccaccggcacguggucggcaagcccugccccaagccccaccgccugaaccacauggggaucugcuccugcggccuguacaagcacccgggggugcccgugaaguggaagcggugaggacuaguaauaaggaaacuguaugaaugucugugggcaggaagugaagagauccuucuguaaagguuuuuggaauuaugucugcugaauaauaaacuuuuuugaaauaauaaaucugguagaaaaaugagaucucaaaggcucuuuucagagccaccaaaaaaaaaaaaaaaaaaaaaaaaaaaaaaaaaaaaaaaaaaaaaaaaaaaaaaaaaaaaaaaaagaauu

SEQ ID NO: 37462 - RNA, 1778 nt, Artificial Sequence
  mRNA product Design b-4 (hSL-A64-N5) comprising derived and/or modified sequence from LASV(LASV221-NIG-2010;Clade II)__AIT17624__GPCmut10 (opt1)
aggagagucccgcagucggcguccagcggcucugcuuguucgugugugugucguugcaggccuuauucaagcuuaccaugggccagaucaucaccuucuuccaggaggugccccacgucaucgaggaggugaugaacaucgugcugaucgcccucagccugcuggccauccucaaggggaucuacaacgucgcgaccugcggccuguucgggcugguguccuuccuccugcugugcggccgcagcugcuccacgaccuacaaggggguguacgagcuccagacccuggagcuggacauggccagccucaacaugugcaugccgcuguccugcacgaagaacaacagccaccacuacaucauggucggcaacgagaccggccuggagcucacccugaccaacacguccaucaucaaccacaaguucugcaaccugagcgacgcccacaagaagaaccucuacgaccacgcccugauguccaucaucagcaccuuccaccuguccauccccaacuucaaccaguacgaggccaugagcugcgacuucaacgggggcaagaucuccgugcaguacaaccucagccacaccuacgcgaucgacgccgccaaccacugcgggaccaucgccaacggcgugcugcagacguucaugcggauggcguggggcggguccuacaucgcccuggacagcggcaagggguccugggacugcaucaugaccagcuaccaguaccucaucauccagaacaccaccugggaggaccacugccaguucucccgccccagccccaucggcuaccuggggcugcucagccagcggacgcgcgacaucuacaucucccggcgccugcugggcaccuucaccuggacccucagcgacuccgagggcaacgagacgcccgggggcuacugccugacccgguggaugcugaucgaggccgagcucaagugcuucgggaacaccgccgucgccaagugcaacgagaagcacgacgaggaguucugcgacaugcugcgccuguucgacuucugcaagcaggcgauccggcgccucaagaccgaggcccagaugagcauccagcugaucaacaaggccgugaacgcccugaucaacgaccagcucaucaugaagaaccaccuccgggacaucaugggcauccccuacugcaacuacuccaaguacugguaccugaaccacacggugaccgggaagaccagccugccccgcugcuggcuggucuccaacggcagcuaccugaacgagacccacuucuccgacgacaucgagcagcaggccgacaacaugaucacggagaugcuccagaaggaguacauggaccggcagggcaagaccccgcuggggcugguggaccucuucguguucagcaccuccuucuaccugaucagcaucuuccugcaccuggucaagaucccgacccaccgccacgugaucggcaagcccugccccaagccccaccggcucaaccacauggggaucugcuccugcggccuguacaagcacccgggggugcccgucaaguggaagcgcugaggacuaguaauaaggaaacuguaugaaugucugugggcaggaagugaagagauccuucuguaaagguuuuuggaauuaugucugcugaauaauaaacuuuuuugaaauaauaaaucugguagaaaaaugagaucucaaaggcucuuuucagagccaccaaaaaaaaaaaaaaaaaaaaaaaaaaaaaaaaaaaaaaaaaaaaaaaaaaaaaaaaaaaaaaaaagaauu

SEQ ID NO: 37463 - RNA, 1778 nt, Artificial Sequence
  mRNA product Design b-4 (hSL-A64-N5) comprising derived and/or modified sequence from LASV(LASV237-NIG-2010;Clade II)__AIT17638__GPCmut10 (opt1)
aggagagucccgcagucggcguccagcggcucugcuuguucgugugugugucguugcaggccuuauucaagcuuaccaugggccagaucaucaccuucuuccaggaggugccccacgucaucgaggaggugaugaacaucgugcugaucgcccucagccugcuggccauccucaaggggaucuacaacgucgcgaccugcggccuguucgggcugguguccuuccuccugcugugcggccgcagcugcuccacgaccuacaaggggguguacgagcuccagacccuggagcuggacauggccagccucaacaugugcaugccgcuguccugcacgaagaacaacagccaccacuacaucauggucggcaacgagaccggccuggagcucacccugaccaacacguccaucaucaaccacaaguucugcaaccugagcgacgcccacaagaaggaccucuacgaccacgcccugauguccaucaucagcaccuuccaccuguccauccccaacuucaaccaguacgaggccaugagcugcgacuucaacgggggcaagaucuccgugcaguacaaccucagccacaccuacgcgguggacgccgccaaccacugcgggaccaucgccaacggcguccugcagacguucaugcggauggcguggggcggguccuacaucgcccuggacagcggcaagggguccugggacugcaucaugaccagcuaccaguaccucaucauccagaacaccaccugggaggaccacugccaguucucccgccccagccccaucggcuaccuggggcugcucagccagcggacgcgcgacaucuacaucucccggcgccugcugggcaccuucaccuggacccucagcgacuccgagggcaacgagacgcccgggggcuacugccugacccgguggaugcugaucgaggccgagcucaagugcuucgggaacaccgccguggccaagugcaacgagaagcacgacgaggaguucugcgacaugcugcgccuguucgacuucugcaagcaggcgauccggcgccucaagaccgaggcccagaugagcauccagcugaucaacaaggccgugaacgcccugaucaacgaccagcucaucaugaagaaccaccuccgggacaucaugggcauccccuacugcaacuacuccaaguacugguaccugaaccacacggucaccgggaagaccagccugccccgcugcuggcugguguccaacggcagcuaccugaacgagacccacuucuccgacgacaucgagcagcaggccgacaacaugaucacggagcuccugcagaaggaguacauggaccggcagggcaagaccccgcuggggcucguggaccuguucgucuucagcaccuccuucuaccugaucagcaucuuccugcaccucaucaagaucccgacccaccgccacaucacgggcaagcccugccccaagccccaccggcugaaccacauggggaucugcuccugcggccuguacaagcacccgggggugcccgugaaguggaagcgcugaggacuaguaauaaggaaacuguaugaaugucugugggcaggaagugaagagauccuucuguaaagguuuuuggaauuaugucugcugaauaauaaacuuuuuugaaauaauaaaucugguagaaaaaugagaucucaaaggcucuuuucagagccaccaaaaaaaaaaaaaaaaaaaaaaaaaaaaaaaaaaaaaaaaaaaaaaaaaaaaaaaaaaaaaaaaagaauu

SEQ ID NO: 37464 - RNA, 1778 nt, Artificial Sequence
  mRNA product Design b-4 (hSL-A64-N5) comprising derived and/or modified sequence from LASV(LASV253-NIG-2011;Clade II)__AIT17670__GPCmut10 (opt1)
aggagagucccgcagucggcguccagcggcucugcuuguucgugugugugucguugcaggccuuauucaagcuuaccaugggccagaucaucaccuucuuccaggaggugccccacgucaucgaggaggugaugaacaucgugcugaucgcccucagccugcuggccauccucaaggggaucuacaacgucgcgaccugcggccuguucgggcugguguccuuccuccugcugugcggccgcagcugcuccacgaccuacaaggggguguacgagcuccagacccuggagcuggacauggccagccucaacaugugcaugccgcuguccugcacgaagaacaacagccaccacuacaucauggucggcaacgagaccggccuggagcucacccugaccaacacguccaucaucaaccacaaguucugcaaccugagcgacgcccacaagaagaaccucuacgaccacgcccugauguccaucaucagcaccuuccaccuguccauccccaacuucaaccaguacgaggccaugagcugcgacuucaacgggggcaagaucuccgugcaguacaaccucagccacaccuacgcgguggacgccgccaaccacugcgggaccaucgccaacggcguccugcagacguucaugcggauggcguggggcggguccuacaucgcccuggacagcggcaagggguccugggacugcaucaugaccagcuaccaguaccucaucauccagaacaccaccugggaggaccacugccaguucucccgccccagccccaucggcuaccuggggcugcucagccagcggacgcgcgacaucuacaucucccggcgccugcugggcaccuucaccuggacccucagcgacuccgagggcaacgagacgcccgggggcuacugccugacccgguggaugcugaucgaggccgagcucaagugcuucgggaacaccgccguggccaagugcaacgagaagcacgacgaggaguucugcgacaugcugcgccuguucgacuucugcaagcaggcgauccggcgccucaaggccgaggcccagaugagcauccagcugaucaacaaggccgugaacgcccugaucaacgaccagcucaucaugaagaaccaccuccgggacaucaugggcaucccguacugcaacuacuccaaguacugguaccugaaccacaccgucacggggcgcaccagccugccccggugcuggcugguguccaacggcagcuaccugaacgagacccacuucuccgacgacaucgagcagcaggcggacaacaugaucaccgagcuccugcagaaggaguacaucgaccgccagggcaagacgccccuggggcucguggaccuguucgucuucagcaccuccuucuaccugaucagcaucuuccugcaccucgugaagaucccgacccaccggcacaucaucggcaagcccugccccaagccccaccgccugaaccacauggggaucugcuccugcggccuguacaagcacccgggggugcccgucaaguggaagcggugaggacuaguaauaaggaaacuguaugaaugucugugggcaggaagugaagagauccuucuguaaagguuuuuggaauuaugucugcugaauaauaaacuuuuuugaaauaauaaaucugguagaaaaaugagaucucaaaggcucuuuucagagccaccaaaaaaaaaaaaaaaaaaaaaaaaaaaaaaaaaaaaaaaaaaaaaaaaaaaaaaaaaaaaaaaaagaauu

SEQ ID NO: 37465 - RNA, 1778 nt, Artificial Sequence
  mRNA product Design b-4 (hSL-A64-N5) comprising derived and/or modified sequence from LASV(LASV254-NIG-2011;Clade II)__AIT17674__GPCmut10 (opt1)
aggagagucccgcagucggcguccagcggcucugcuuguucgugugugugucguugcaggccuuauucaagcuuaccaugggccagaucaucaccuucuuccaggaggugccccacgucaucgaggaggugaugaacaucgugcugaucgcccucagccugcuggccauccucaaggggaucuacaacgucgcgaccugcggccuguucgggcugguguccuuccuccugcugugcggccgcagcugcuccacgaccuacaaggggguguacgagcuccagacccuggagcuggacaugaccaaccucaacaugugcaugccgcugagcugcaccaagaacaacucccaccacuacaucauggucggcaacgagaccggccuggagcucacccugacgaacaccagcaucaucaaccacaaguucugcaaccuguccgacgcccacaagaagaaccucuacaaccacgcccugaugagcaucaucuccaccuuccaccugagcauccccaacuucaaccaguacgaggccauguccugcgacuucaacgggggcaagaucagcgugcaguacaaccucucccacagcuacgccguggacgcggccaaccacugcgggaccaucgccaacggcguccugcagacguucaugcggauggccuggggcggguccuacaucgcgcuggacagcggcaaggggaacugggacugcaucaugaccuccuaccaguaccucaucauccagaacaccaccugggaggaccacugccaguucagccgccccucccccaucggcuaccuggggcugcucagccagcggacgcgcgacaucuacaucagccggcgccugcugggcaccuucaccuggacccucuccgacagcgagggcaacgagacgcccgggggcuacugccugacccgguggaugcugaucgaggccgagcucaagugcuucgggaacaccgccguggccaagugcaacgagaagcacgacgaggaguucugcgacaugcugcgccuguucgacuucugcaagcaggccauccggcgccucaagaccgaggcgcaggccaacauccagcugaucaacaaggccgugaacgcccugaucaacgaccagcucaucaugaagaaccaccuccgggacaucaugggcauccccuacugcaacuacuccaaguacugguaccugaaccacacggucaccgggaagaccagccugccccgcugcuggcugguguccaacggcagcuaccugaacgagacccacuucuccgacgacaucgagcagcaggccgacaacaugaucacggagcuccugcagaaggaguacauggaccggcagggcaagaccccgcuggggcucguggaccuguucgucuucagcaccuccuucuaccugaucagcaucuuccugcaccucgugaagaucccgacccaccgccacgugaucggcaagcccugccccaagccccaccggcugaaccacauggggaucugcuccugcggccuguacaagcacccggggguccccgugaaguggaagcgcugaggacuaguaauaaggaaacuguaugaaugucugugggcaggaagugaagagauccuucuguaaagguuuuuggaauuaugucugcugaauaauaaacuuuuuugaaauaauaaaucugguagaaaaaugagaucucaaaggcucuuuucagagccaccaaaaaaaaaaaaaaaaaaaaaaaaaaaaaaaaaaaaaaaaaaaaaaaaaaaaaaaaaaaaaaaaagaauu

SEQ ID NO: 37466 - RNA, 1778 nt, Artificial Sequence
  mRNA product Design b-4 (hSL-A64-N5) comprising derived and/or modified sequence from LASV(Nig08-A19;Clade III)__ADU56618__GPCmut10 (opt1)
aggagagucccgcagucggcguccagcggcucugcuuguucgugugugugucguugcaggccuuauucaagcuuaccaugggccagaucgugaccuucuuccaggaggucccccacgugaucgaggaggugaugaacaucguccugaucgcccucagcauccuggccauccugaaggggcucuacaacaucgcgaccugcggccugaucgggcuggugacguuccuccugcuguccggccgcagcugcuccaugaccuacaaggggguguacgagcuccagacccuggagcugaacaugaacacccucaacaugugcaugccgcugagcugcaccaagaacaacucccaccacuacaucauggucggcaacgagaccggccuggagcucacccugacgaacaccagccugcuccaccacaaguucugcaaccuguccgacgcccacaagaagaaccuguacgaccacacccucaugagcaucaucuccaccuuccaccugagcauccccaacuucaaccaguacgaggccauguccugcgacuucaacgggggcaagaucacggugcaguacaaccugagccacuccuacgccaucgacgccgcgaaccacugcgggaccguggccaacggcguccuccagaccuucaugcggauggccuggggcgggagcuacaucgcccuggacuccggccgcgggaagugggacugcaucaugaccagcuaccaguaccugaucauccagaacacgaccugggaggaccacugccaguucucccggcccagccccaucggcuaccucgggcugcugucccagcgcacccgggacaucuacaucagccgccggcuccugggcaccuucacguggacccugagcgacuccgagggcaacgagacccccgggggcuacugccucacccgcuggaugcugaucgaggcggagcugaagugcuucgggaacacggccguggccaagugcaacgagaagcacgacgaggaguucugcgacaugcuccggcuguucgacuucugcaagcaggccauccgccggcugaaggccgaggcgcagaugagcauccagcucaucaacaaggccgugaacgcccugaucaacgaccagcugaucaugaagaaccaccuccgcgacaucaugggcauccccuacugcaacuacuccaaguacugguaccugaaccacaccagcaccgggcggaccucccugccccgcugcuggcucgucagcaacggcuccuaccugaacgagacgcacuucagcgacgacaucgagcagcaggccgacaacaugaucaccgagaugcugcagaaggaguaccucgaccggcagggcaagaccccgcuggggcugguggaccuguucguguucuccaccagcuucuaccucaucuccaucuuccugcaccuggucaagaucccgacgcaccgccacaucgugggcaagcccugccccaagccccaccggcucaaccacauggggaucugcagcugcggccuguacaagcagccgggggugcccguccgcuggaagcggugaggacuaguaauaaggaaacuguaugaaugucugugggcaggaagugaagagauccuucuguaaagguuuuuggaauuaugucugcugaauaauaaacuuuuuugaaauaauaaaucugguagaaaaaugagaucucaaaggcucuuuucagagccaccaaaaaaaaaaaaaaaaaaaaaaaaaaaaaaaaaaaaaaaaaaaaaaaaaaaaaaaaaaaaaaaaagaauu

SEQ ID NO: 37467 - RNA, 1781 nt, Artificial Sequence
  mRNA product Design b-4 (hSL-A64-N5) comprising derived and/or modified sequence from LASV(G1180-SLE-2010;Clade IV)__AIT17168__GPCmut10 (opt1)
aggagagucccgcagucggcguccagcggcucugcuuguucgugugugugucguugcaggccuuauucaagcuuaccaugggccagaucgugaccuucuuccaggaggucccccacgugaucgaggaggugaugaacaucguccugaucgcccucagcauccuggccgugcugaaggggcucuacaacuucgcgaccugcggccugguggggcugcucaccuuccugcugcucugcggccgcuccugcaccgccagccgguacaagggggucuacgagcugcagacccuggagcucaacauggagacccugaacaugugcaugccgcuguccugcaccaagaacaacagccaccacuacaucauggugggcaacgagaccggccucgagcugacccugacgaacaccuccaucaucaaccacaaguucugcaaccucagcgacgcccacaagaagaaccuguacgaccacgcccugauguccaucaucagcaccuuccaccucuccauccccaacuucaaccaguacgaggccaugagcugcgacuucaacgggggcaagaucuccgugcaguacaaccugagccacuccuacgcgggggacgccgccaaccacugcggcaccgucgccaacggggugcugcagacguucaugcgcauggcguggggcggcagcuacaucgcccucgacuccgggcacggcagcugggacugcaucaugaccuccuaccaguaccugaucauccagaacaccaccugggaggaccacugccaguucagccggcccucccccaucggguaccugggccuccugagccagcgcacgcgggacaucuacaucagccgccggcugcucggcaccuucaccuggacccuguccgacagcgaggggaaggacacgccgggcggguacugccugacccgcuggaugcucaucgaggccgagcugaagugcuucggcaacaccgccguggccaagugcaacgagaagcacgacgaggaguucugcgacaugcugcggcuguucgacuucugcaagcaggcgauccagcgccugaaggccgaggcccagauguccauccagcugaucaacaaggccgucaacgcccucaucaacgaccagcugaucaugaagaaccaccuccgggacaucauggggauccccuacugcaacuacagcaaguacugguaccucaaccacaccacgaccggcaagaccucccugcccaagugcuggcuggugagcaacggcuccuaccucaacgagacccacuucagcgacgacaucgagcagcaggcggacaacaugaucacggagaugcugcagaaggaguacauggagcgccaggggaagacgccccugggccucguggaccuguucgucuucuccaccagcuucuaccugaucuccaucuuccugcaccucgugaagaucccgacccaccggcacaucgugggcaagagcugccccaagccccaccgccugaaccacauggggaucugcuccugcgggcuguacaagcagcccggcgucccggugaaguggaagcggugaggacuaguaauaaggaaacuguaugaaugucugugggcaggaagugaagagauccuucuguaaagguuuuuggaauuaugucugcugaauaauaaacuuuuuugaaauaauaaaucugguagaaaaaugagaucucaaaggcucuuuucagagccaccaaaaaaaaaaaaaaaaaaaaaaaaaaaaaaaaaaaaaaaaaaaaaaaaaaaaaaaaaaaaaaaaagaauu

SEQ ID NO: 37468 - RNA, 1781 nt, Artificial Sequence
  mRNA product Design b-4 (hSL-A64-N5) comprising derived and/or modified sequence from LASV(G1442-SLE-2011;Clade IV)__AIT17180__GPCmut10 (opt1)
aggagagucccgcagucggcguccagcggcucugcuuguucgugugugugucguugcaggccuuauucaagcuuaccaugggccagaucgugaccuucuuccaggaggucccccacgugaucgaggaggugaugaacaucguccugaucgcccucagcauccuggccgugcugaaggggcucuacaacguggcgaccugcggccugaucgggcuggucacguuccuccugcugugcggccgcuccugcaccaccacccucuacaaggggguguacgagcugcagacgcuggagcucaacauggagacccugaacaugugcaugccgcugagcugcaccaagaacaacucccaccacuacauccgggugggcaacgagacgggccucgagcugacccugaccaacaccagcaucaucaaccacaaguucugcaaccucuccgacgcccacaagaagaaccuguacgaccacgcccugaugagcaucaucuccacguuccaccucagcauccccaacuucaaccaguacgaggccauguccugcgacuucaacgggggcaagaucagcguccaguacaaccugucccacagcuacgccggggacgcggccaaccacugcggcaccguggccaacggggugcugcagaccuucaugcgcauggccuggggcggcuccuacaucgcgcucgacagcgggcggggcaacugggacugcaucaugaccuccuaccaguaccugaucauccagaacacgaccugggacgaccacugccaguucagccgccccucccccaucggguaccugggccuccugagccagcggacccgcgacgucuacaucucccggcgccugcucggcaccuucacguggacccugagcgacagcgaggggaaggacaccccgggcggguacugccugacccgguggaugcucaucgaggccgagcugaagugcuucggcaacacggccguggccaagugcaacgagaagcacgacgaggaguucugcgacaugcugcgccucuucgacuucugcaagcaggccauccagcggcugaaggcggaggcccagauguccauccagcugaucaacaaggccgugaacgcccucaucaacgaccagcugaucaugaagaaccaccuccgcgacaucauggggauccccuacugcaacuacagcaaguacugguaccugaacaacaccgccaccggcaagaccucccugcccaagugcuggcugaucagcaacggcuccuaccucaacgagacgcacuucagcgacgacaucgagcaggaggcggacaacaugaucaccgagaugcugcagaaggaguacauggagcggcaggggaagacgccccugggccucgucgaccuguucguguucuccaccagcuucuaccugaucuccaucuuccugcaccucgugaagaucccgacccaccgccacaucgucggcaagagcugccccaagccccaccggcugaaccacauggggaucugcuccugcgggcuguacaagcagcccggcgugccggugcgcuggaagcggugaggacuaguaauaaggaaacuguaugaaugucugugggcaggaagugaagagauccuucuguaaagguuuuuggaauuaugucugcugaauaauaaacuuuuuugaaauaauaaaucugguagaaaaaugagaucucaaaggcucuuuucagagccaccaaaaaaaaaaaaaaaaaaaaaaaaaaaaaaaaaaaaaaaaaaaaaaaaaaaaaaaaaaaaaaaaagaauu

SEQ ID NO: 37469 - RNA, 1781 nt, Artificial Sequence
  mRNA product Design b-4 (hSL-A64-N5) comprising derived and/or modified sequence from LASV(G3010-SLE-2013;Clade IV)__AIT17344__GPCmut10 (opt1)
aggagagucccgcagucggcguccagcggcucugcuuguucgugugugugucguugcaggccuuauucaagcuuaccaugggccagaucgugaccuucuuccaggaggucccccacgugaucgaggaggugaugaacaucguccugaucgcccucagcauccuggccgugcugaaggggcucuacaacuucgcgaccugcggccugguggggcuggucacguuccuccugcugugcggccgcuccugcaccaccagccucuacaaggggguguacgagcugcagacccuggagcucaacauggagacgcugaacaugugcaugccgcuguccugcaccaagaacaacagccaccacuacaucauggugggcaacgagaccggccucgagcugacgcugaccaacaccuccaucaucaaccacaaguucugcaaccucagcgacgcccacaagaagaaccuguacaaccacgcccugauguccaucaucagcaccuuccaccucuccauccccaacuucaaccaguacgaggccaugagcugcgacuucaacgggggcaagaucuccguccaguacaaccugagccacuccuacgccggggacgcggccagccacugcggcacgguggccaacggggugcugcagaccuucaugcggauggccuggggcggcuccuacaucgcgcucgacagcggguacggcaagugggacugcaucaugaccuccuaccaguaccugaucauccagaacaccacgugggaggaccacugccaguucagccgccccucccccaucggguaccugggccuccugagccagcggacccgcgacaucuacaucagccggcgccugcucggcaccuucaccuggacgcuguccgacagcgaggggaaggacaccccgggcggguacugccugacccgguggaugcucaucgaggccgagcugaagugcuucggcaacaccgccgucgccaagugcaacgagaagcacgacgaggaguucugcgacaugcugcgccucuucgacuucugcaagcaggccauccagcggcugaagacggaggcgcagauguccauccagcugaucaacaaggccgugaacgcccucaucaacgaccagcugaucaugaagaaccaccuccgcgacaucauggggauccccuacugcaacuacagcaaguacugguaccugaaccacaccaccaccggcaagacgucccugcccaagugcuggcuggugagcaacggcuccuaccucaacgagacccacuucagcgacgacaucgagcagcaggccgacaacaugaucaccgagaugcugcagaaggaguacauggagcggcaggggaagacgccccugggccucgucgaccuguucguguucuccaccagcuucuaccugaucuccaucuuccugcaccucgugaagaucccgacccaccgccacaucgucggcaagagcugccccaagccccaccggcugaaccacauggggaucugcuccugcgggcuguacaagcagcccggcgugccggugcgcuggaagcggugaggacuaguaauaaggaaacuguaugaaugucugugggcaggaagugaagagauccuucuguaaagguuuuuggaauuaugucugcugaauaauaaacuuuuuugaaauaauaaaucugguagaaaaaugagaucucaaaggcucuuuucagagccaccaaaaaaaaaaaaaaaaaaaaaaaaaaaaaaaaaaaaaaaaaaaaaaaaaaaaaaaaaaaaaaaaagaauu

SEQ ID NO: 37470 - RNA, 1781 nt, Artificial Sequence
  mRNA product Design b-4 (hSL-A64-N5) comprising derived and/or modified sequence from LASV(G502-SLE-2009;Clade IV)__AIT17126__GPCmut10 (opt1)
aggagagucccgcagucggcguccagcggcucugcuuguucgugugugugucguugcaggccuuauucaagcuuaccaugggccagaucgugaccuucuuccaggaggucccccacgugaucgaggaggugaugaacaucguccugaucgcccucagcauccuggccgugcugaaggggcucuacaacuucgcgaccugcggccugguggggcugcucacguuccugcugcucugcggccgcuccugcaccaccgggcuguacaagggcgucuacgagcugcagacccucgagcugaacauggagacgcugaacaugugcaugccgcucagcugcaccaagaacaacucccaccacuacaucauggugggcaacgagaccgggcuggagcugacgcucaccaacaccagcaucaucaaccacaaguucugcaaccuguccgacgcccacaagaagaaccuguacgaccacgcccucaugagcaucaucuccaccuuccaccugagcauccccaacuucaaccaguacgaggccauguccugcgacuucaacggcgggaagaucagcgugcaguacaaccugucccacagcuacgccggcgacgcggccgaccacugcgggacggucgccaacggcgugcuccagaccuucaugcggauggccuggggcggguccuacaucgcgcuggacagcggccgcgggcggugggacugcaucaugaccuccuaccaguaccugaucauccagaacaccacgugggaggaccacugccaguucagccgccccucccccaucggcuaccucggccugcugagccagcggacccgcgacaucuacaucucccggcgccuccuggggaccuucaccuggacgcugagcgacagcgagggcaaggacacccccgggggcuacugccucacccgguggaugcugaucgaggccgagcugaagugcuucgggaacaccgccguggccaagugcaacgagaagcacgacgaggaguucugcgacaugcuccgccuguucgacuucugcaagcaggccauccagcggcugaaggcggaggcccagauguccauccagcucaucaacaaggccgucaacgcccugaucaacgaccagcuggugaugaagaaccaccuccgcgacaucaugggcauccccuacugcaacuacagccgguacugguaccugaaccacacgaccaccggccgcaccucccugcccaagugcuggcucgugagcaacggguccuaccugaacgagacgcacuucagcgacgacaucgagcagcaggccgacaacaugaucaccgagaugcugcagaaggaguacauggagcggcagggcaagaccccgcucgggcuggucgaccuguucguguucuccaccagcuucuaccugaucuccaucuuccuccaccuggugaagaucccgacgcaccgccacaucgucggcaagagcugccccaagccccaccggcugaaccacauggggaucugcuccugcggccucuacaagcagcccggcgugccggugaaguggaagcgcugaggacuaguaauaaggaaacuguaugaaugucugugggcaggaagugaagagauccuucuguaaagguuuuuggaauuaugucugcugaauaauaaacuuuuuugaaauaauaaaucugguagaaaaaugagaucucaaaggcucuuuucagagccaccaaaaaaaaaaaaaaaaaaaaaaaaaaaaaaaaaaaaaaaaaaaaaaaaaaaaaaaaaaaaaaaaagaauu

SEQ ID NO: 37471 - RNA, 1781 nt, Artificial Sequence
  mRNA product Design b-4 (hSL-A64-N5) comprising derived and/or modified sequence from LASV(G733-SLE-2010;Clade IV)__AIT17154__GPCmut10 (opt1)
aggagagucccgcagucggcguccagcggcucugcuuguucgugugugugucguugcaggccuuauucaagcuuaccaugggccagaucgugaccuucuuccaggaggucccccacgugaucgaggaggugaugaacaucguccugaucgcccucagcauccuggccgugcugaaggggcucuacaacuucgcgaccugcggcaucguggggcuggucuccuuccugcuccugugcggccgcagcugcacgaccucccuguacaaggggguguacgagcuccagacccuggagcugaacauggagacccucaacaugugcaugccgcugagcugcaccaagaacaacucccaccacuacaucauggugggcaacgagaccggccuggagcucacccugacgaacaccagcaucaucaaccacaaguucugcaaccuguccgacgcccacaagaagaaccucuacgaccacgcccugaugagcaucaucuccaccuuccaccugagcauccccaacuucaaccaguacgaggccauguccugcgacuucaacgggggcaagaucagcguccaguacaaccucucccacagcuacgccggggacgcggccaaccacugcggcaccaucgccaacggggugcugcagacguucaugcggauggccuggggcggcuccuacaucgcgcuggacagcgggcgcgaccggugggacugcaucaugaccuccuaccaguaccucaucauccagaacaccaccugggaggaccacugccaguucagccgccccucccccaucggcuaccuggggcugcucagccagcggacgcgcgacaucuacaucagccggcgccugcugggcaccuucaccuggacccucuccgacagcgagggcaaggacacgcccgggggcuacugccugacccgguggaugcugaucgaggccgagcucaagugcuucgggaacaccgccguggccaagugcaacgagaagcacgacgaggaguucugcgacaugcugcgccuguucgacuucugcaagcaggccauccagcggcucaaggcggaggcccagauguccauccagcugaucaacaaggccgucaacgcccugaucaacgaccagcucaucaugaagaaccaccuccgcgacaucaugggcauccccuacugcaacuacagcaaguacugguaccugaaccacaccacgaccgggaagaccucccugcccaagugcuggcuggugagcaacggcuccuaccugaacgagacccacuucagcgacgacaucgagcagcaggccgacaacaugaucacggagaugcuccagaaggaguacauggagcggcagggcaagaccccgcuggggcugguggaccucuucgucuucuccaccagcuucuaccugaucuccaucuuccugcaccuggugaagaucccgacccaccgccacguggucggcaagagcugccccaagccccaccggcucaaccacauggggaucugcuccugcggccuguacgggcagcccggcgugccggugaaguggaagcgcugaggacuaguaauaaggaaacuguaugaaugucugugggcaggaagugaagagauccuucuguaaagguuuuuggaauuaugucugcugaauaauaaacuuuuuugaaauaauaaaucugguagaaaaaugagaucucaaaggcucuuuucagagccaccaaaaaaaaaaaaaaaaaaaaaaaaaaaaaaaaaaaaaaaaaaaaaaaaaaaaaaaaaaaaaaaaagaauu

SEQ ID NO: 37472 - RNA, 1781 nt, Artificial Sequence
  mRNA product Design b-4 (hSL-A64-N5) comprising derived and/or modified sequence from MOPV/LASV reassortant(IGS-1;Clade IV)__AFY05576__GPCmut10 (opt1)
aggagagucccgcagucggcguccagcggcucugcuuguucgugugugugucguugcaggccuuauucaagcuuaccaugggccagaucgugaccuucuuccaggaggucccccacgugaucgaggaggugaugaacaucguccugaucgcccucagcgugcuggccgugcugaaggggcucuacaacuucgcgaccugcggccuggucgggcuggugacguuccuccugcugugcggccgcuccugcaccaccagccucuacaaggggguguacgagcugcagacccuggagcucaacauggagacgcugaacaugugcaugccgcuguccugcaccaagaacaacagccaccacuacaucauggucggcaacgagaccggccucgagcugacgcugaccaacaccuccaucaucaaccacaaguucugcaaccucagcgacgcccacaagaagaaccuguacgaccacgcccugauguccaucaucagcaccuuccaccucuccauccccaacuucaaccaguacgaggccaugagcugcgacuucaacgggggcaagaucuccgugcaguacaaccugagccacuccuacgccggggacgcggccaaccacugcggcacgguggccaacgggguccugcagaccuucaugcggauggccuggggcggcagcuacaucgcgcucgacuccgggcgcggcaacugggacugcaucaugaccagcuaccaguaccugaucauccagaacaccacgugggaggaccacugccaguucucccggcccagccccaucggguaccugggccuccugucccagcgcacccgggacaucuacaucagccgccggcugcucggcaccuucaccuggacgcugagcgacuccgagggggaggacaccccgggcggguacugccugacccgcuggaugcucaucgaggccgagcugaagugcuucggcaacaccgccguggccaagugcaacgagaagcacgacgaggaguucugcgacaugcugcggcuguucgacuucugcaagcaggccauccagcgccugaaggcggaggcccagaugagcauccagcugaucaacaaggccgugaacgcccucaucaacgaccagcugaucaugaagaaccaccuccgggacaucauggggauccccuacugcaacuacuccaaguacugguaccucaaccacacgaccaccggccgcaccagccugcccaagugcuggcuggucuccaacggcagcuaccucaacgagacgcacuucuccgacgacaucgagcagcaggccgacaacaugaucaccgagaugcugcagaaggaguacauggagcggcaggggaagacgccccugggccucguggaccuguucguguucagcaccuccuucuaccugaucagcaucuuccugcaccucgucaagaucccgacccaccgccacaucguggggaaguccugccccaagccccaccggcugaaccacaugggcaucugcagcugcgggcuguacaagcagcccggcgugccggucaaguggaagcgcugaggacuaguaauaaggaaacuguaugaaugucugugggcaggaagugaagagauccuucuguaaagguuuuuggaauuaugucugcugaauaauaaacuuuuuugaaauaauaaaucugguagaaaaaugagaucucaaaggcucuuuucagagccaccaaaaaaaaaaaaaaaaaaaaaaaaaaaaaaaaaaaaaaaaaaaaaaaaaaaaaaaaaaaaaaaaagaauu

SEQ ID NO: 37473 - RNA, 1781 nt, Artificial Sequence
  mRNA product Design b-4 (hSL-A64-N5) comprising derived and/or modified sequence from LASV(LM765-SLE-2012;Clade IV)__AIT17814__GPCmut10 (opt1)
aggagagucccgcagucggcguccagcggcucugcuuguucgugugugugucguugcaggccuuauucaagcuuaccaugggccagaucgugaccuucuuccaggaggucccccacgugaucgaggaggugaugaacaucguccugaucgcccucagcauccuggccgugcugaaggggcucuacaacuucgcgaccugcggccugguggggcuggucacguuccuccugcugugcggccgcuccugcaccaccagccucuacaaggggguguacgagcugcagacccuggagcucaacauggagacgcugaacaugugcaugccgcuguccugcaccaagaacaacagccaccacuacaucauggugggcaacgagaccggccucgagcugacgcugaccaacaccuccaucaucgaccacaaguucugcaaccucagcgacgcccaccggaagaaccuguacgaccacgcccugauguccaucaucagcaccuuccaccucuccauccccaacuucaaccaguacgaggccaugagcugcgacuucaacgggggcaagaucuccguccaguacaaccugagccacuccuacgccaaggacgcggccgaccacugcgggacgguggccaacggcgugcugcagaccuucaugcgcauggccuggggcgggagcuacaucgcgcucgacuccggccgggggcgcugggacugcaucaugaccagcuaccaguaccugaucauccagaacaccacgugggaggaccacugccaguucucccggcccagccccaucggcuaccuggggcuccugucccagcgcacccgggacaucuacaucagccgccggcugcucggcaccuucaccuggacgcugagcgacuccgagggcaaggacacccccgggggcuacugccugacccgcuggaugcucaucgaggccgagcugaagugcuucgggaacaccgccgucgccaagugcaacgagaagcacgacgaggaguucugcgacaugcugcggcuguucgacuucugcaagcaggccauccagcgccugaaggcggaggcccagaugagcauccagcugaucaacaaggccgugaacgcccucaucaacgaccagcugaucaugaagaaccaccuccgggacaucaugggcauccccuacugcaacuacuccaaguacugguaccucaaccacacgaccaccgggaagaccagccugcccaagugcuggcugguguccaacggcagcuaccucaacgagacgcacuucuccgacgacaucgagcagcaggccgacaacaugaucaccgagaugcugcagaaggaguacauggagcgccagggcaagaccccgcuggggcucgucgaccuguucguguucagcaccuccuucuaccugaucagcaucuuccugcaccucgugaagaucccgacgcaccggcacaucgucggcaagcccugccccaagccccaccgccugaaccacauggggaucugcuccugcggccuguacaagcagccgggggugcccgugaaguggaagcggugaggacuaguaauaaggaaacuguaugaaugucugugggcaggaagugaagagauccuucuguaaagguuuuuggaauuaugucugcugaauaauaaacuuuuuugaaauaauaaaucugguagaaaaaugagaucucaaaggcucuuuucagagccaccaaaaaaaaaaaaaaaaaaaaaaaaaaaaaaaaaaaaaaaaaaaaaaaaaaaaaaaaaaaaaaaaagaauu

SEQ ID NO: 37474 - RNA, 1781 nt, Artificial Sequence
  mRNA product Design b-4 (hSL-A64-N5) comprising derived and/or modified sequence from LASV(LM776-SLE-2012;Clade IV)__AIT17824__GPCmut10 (opt1)
aggagagucccgcagucggcguccagcggcucugcuuguucgugugugugucguugcaggccuuauucaagcuuaccaugggccagaucgugaccuucuuccaggaggucccccacgugaucgaggaggugaugaacaucguccugaucgcccucagcauccuggccgugcugaaggggcucuacaacuucgcgaccugcggccugguggggcuggucacguuccuccugcugugcggccgcuccugcaccaccagcguguacaaggggguguacgagcuccagacccuggagcugaacauggagacgcucaacaugugcaugccgcuguccugcaccaagaacaacagccaccacuacaucauggucggcaacgagaccggccuggagcucacgcugaccaacaccuccaucaucaaccacaaguucugcaaccugagcgacgcccacaagaagaaccucuacgaccacgcccugauguccaucaucagcaccuuccaccuguccauccccaacuucaaccaguacgaggccaugagcugcgacuucaacgggggcaagaucuccgugcaguacaaccucagccacuccuacgccggggacgcggccaaccacugcggcacgguggccaacgggguccugcagaccuucaugcggauggccuggggcggcagcuacaucgcgcuggacuccgggcacggcaagugggacugcaucaugaccagcuaccaguaccucaucauccagaacaccacgugggaggaccacugccaguucucccgccccagccccaucggguaccugggccugcucucccagcggacccgcgacaucuacaucagccggcgccugcugggcaccuucaccuggacgcucagcgacuccgaggggaaggacaccccgggcggguacugccugacccgguggaugcugaucgaggccgagcucaagugcuucggcaacaccgccguggccaagugcaacgagaagcacgacgaggaguucugcgacaugcugcgccuguucgacuucugcaagcaggccauccagcggcucaaggcggaggcccagaugagcauccagcugaucaacaaggccgugaacgcccugaucaacgaccagcucaucaugaagaaccaccuccgcgacaucauggggauccccuacugcaacuacuccaaguacugguaccugaaccacacgaccaccggcaagaccagccugcccaagugcuggcuggucuccaacggcagcuaccugaacgagacgcacuucuccgacgacaucgagcagcaggccgacaacaugaucaccgagaugcuccagaaggaguacauggagcggcaggggaagacgccccugggccugguggaccucuucguguucagcaccuccuucuaccugaucagcaucuuccugcaccuggucaagaucccgacccaccgccacaucguggggaaguccugccccaagccccaccggcucaaccacaugggcaucugcagcugcgggcuguacaagcagcccggcgugccgguccgcuggaagcggugaggacuaguaauaaggaaacuguaugaaugucugugggcaggaagugaagagauccuucuguaaagguuuuuggaauuaugucugcugaauaauaaacuuuuuugaaauaauaaaucugguagaaaaaugagaucucaaaggcucuuuucagagccaccaaaaaaaaaaaaaaaaaaaaaaaaaaaaaaaaaaaaaaaaaaaaaaaaaaaaaaaaaaaaaaaaagaauu

SEQ ID NO: 37475 - RNA, 1781 nt, Artificial Sequence
  mRNA product Design b-4 (hSL-A64-N5) comprising derived and/or modified sequence from LASV(Mad39;Clade IV)__ANH09722__GPCmut10 (opt1)
aggagagucccgcagucggcguccagcggcucugcuuguucgugugugugucguugcaggccuuauucaagcuuaccaugggccagaucgugaccuucuuccaggaggucccccacgugaucgaggaggugaugaacaucguccugaucgcccucagcauccuggccgugcugaaggggcucuacaacguggcgaccugcggccugaucgggcuggucacguuccuccugcugugcggccgcuccugcaccaccacccucuacaaggggguguacgagcugcaggcccuggagcucaacauggagacgcugaacaugugcaugccgcugagcugcaccaagaacaacucccaccacuacauccgggugggcaacgagaccggccucgagcugacgcugaccaacaccagccucaucaaccacaaguucugcaaccuguccgacgcccacaagaagaaccuguacgaccacgcccucaugagcaucaucuccaccuuccaccugagcauccccaacuucaaccaguacgaggccauguccugcgacuucaacgacgggaagaucagcguccaguacaaccugucccacacguacgcgggcgacaccgccaaccacugcgggaccguggccaacggcgugcuccagaccuucaugcgcauggccuggggcgggagcuacaucgcgcuggacuccggccgcgggggcugggacugcaucaugacgagcuaccaguaccugaucauccagaacaccaccugggaggaccacugccaguucucccggcccagccccaucggguaccucggccugcugucccagcggacccgcgacaucuacaucagccggcgccuccugggcacguucaccuggacccuguccgacagcgaggggaaggacaccccgggcggguacugccucacgcgguggaugcugaucgaggccgagcugaagugcuucggcaacaccgccgucgccaagugcaacgagaagcacgacgaggaguucugcgacaugcuccgccuguucgacuucugcaagcaggccauccagcggcugaaggcggaggcccagaugagcauccagcucaucaacaaggccgugaacgcccugaucaacgaccagcugaucaugaagaaccaccuccgcgacaucauggggauccccuacugcaacuacuccaaguacugguaccugaaccacaccgugaccggcaagacgagccugcccaagugcuggcucgucuccaacggcagcuaccugaacgagacccacuucuccgacgacaucgagcagcaggccgacaacaugaucaccgagaugcugcagaaggaguacauggagcggcaggggaagacgccccucggccugguggaccuguucguguucagcaccuccuucuaccugaucagcaucuuccuccaccuggucaagaucccgacccaccgccacgugguggggaagcccugccccaagccccaccggcugaaccacaugggcaucugcuccugcggguucuacaagcagccgggcguccccgugcgcuggaagcggugaggacuaguaauaaggaaacuguaugaaugucugugggcaggaagugaagagauccuucuguaaagguuuuuggaauuaugucugcugaauaauaaacuuuuuugaaauaauaaaucugguagaaaaaugagaucucaaaggcucuuuucagagccaccaaaaaaaaaaaaaaaaaaaaaaaaaaaaaaaaaaaaaaaaaaaaaaaaaaaaaaaaaaaaaaaaagaauu

SEQ ID NO: 37476 - RNA, 1781 nt, Artificial Sequence
  mRNA product Design b-4 (hSL-A64-N5) comprising derived and/or modified sequence from LASV(Z0947-SLE-2011;Clade IV)__AIT17840__GPCmut10 (opt1)
aggagagucccgcagucggcguccagcggcucugcuuguucgugugugugucguugcaggccuuauucaagcuuaccaugggccagaucgugaccuucuuccaggaggucccccacgugaucgaggaggugaugaacaucguccugaucgcccucagcauccuggccgugcugaaggggcucuacaacuucgcgaccugcggccugguggggcuggucacguuccuccugcugugcggccgcuccugcaccaucagccucuacaaggggguguacgagcugcagacccuggagcucaacauggagacccugaacaugugcaugccgcuguccugcaccaagaacaacagccaccacuacaucauggugggcaacgagaccggccucgagcugacccugacgaacaccuccaucaucaaccacaaguucugcaaccucagcgacgcccacaagaagaaccuguacgaccacgcccugauguccaucaucagcaccuuccaccucuccauccccaacuucaaccaguacgaggccaugagcugcgacuucaacgggggcaagaucuccguccaguacaaccugagccacuccuacgccggggacgcggccaaccacugcggcaccguggccaacggggugcugcagacguucaugcggauggccuggggcggcagcuacaucgcgcucgacuccgggcgcgaccggugggacugcaucaugaccagcuaccaguaccugaucauccagaacaccaccugggaggaccacugccaguucucccgccccagccccaucggcuaccuggggcuccugucccagcggacgcgcgacaucuacaucagccggcgccugcucggcaccuucaccuggacccugagcgacuccgagggcaaggacacgcccgggggcuacugccugacccgguggaugcucaucgaggccgagcugaagugcuucgggaacaccgccgucgccaagugcaacgagaagcacgacgaggaguucugcgacaugcugcgccucuucgacuucugcaagcaggccauccagcggcugaaggcggaggcccagaugagcauccagcugaucaacaaggccgugaacgcccucaucaacgaccagcugaucaugaagaaccaccuccgcgacaucaugggcauccccuacugcaacuacuccaaguacugguaccugaaccacaccacgaccgggaagaccagccugcccaagugcuggcugguguccaacggcagcuaccucaacgagacccacuucuccgacgacaucgagcagcaggccgacaacaugaucacggagaugcugcagaaggaguacauggagcggcagggcaagaccccgcuggggcucgucgaccuguucguguucagcaccuccuucuaccugaucagcaucuuccugcaccucgugaagaucccgacccaccgccacaucgucggcaagcccugccccaagccccaccggcugaaccacauggggaucugcuccugcggccuguacaagcagccgggggugcccgugaaguggaagcgcugaggacuaguaauaaggaaacuguaugaaugucugugggcaggaagugaagagauccuucuguaaagguuuuuggaauuaugucugcugaauaauaaacuuuuuugaaauaauaaaucugguagaaaaaugagaucucaaaggcucuuuucagagccaccaaaaaaaaaaaaaaaaaaaaaaaaaaaaaaaaaaaaaaaaaaaaaaaaaaaaaaaaaaaaaaaaagaauu

SEQ ID NO: 37477 - RNA, 1781 nt, Artificial Sequence
  mRNA product Design b-4 (hSL-A64-N5) comprising derived and/or modified sequence from LASV(Josiah;Clade IV)__NP_694870__GPCmut10 (opt1)
aggagagucccgcagucggcguccagcggcucugcuuguucgugugugugucguugcaggccuuauucaagcuuaccaugggccagaucgugaccuucuuccaggaggucccccacgugaucgaggaggugaugaacaucguccugaucgcccucagcgugcuggccgugcugaaggggcucuacaacuucgcgaccugcggccuggucgggcuggugaccuuccuccugcugugcggccgcuccugcaccaccagccucuacaaggggguguacgagcugcagacccuggagcucaacauggagacgcugaacaugugcaugccgcuguccugcaccaagaacaacagccaccacuacaucauggucggcaacgagaccggccucgagcugacccugacgaacaccuccaucaucaaccacaaguucugcaaccucagcgacgcccacaagaagaaccuguacgaccacgcccugauguccaucaucagcaccuuccaccucuccauccccaacuucaaccaguacgaggccaugagcugcgacuucaacgggggcaagaucuccgugcaguacaaccugagccacuccuacgccggggacgcggccaaccacugcggcaccguggccaacgggguccugcagacguucaugcggauggccuggggcggcagcuacaucgcgcucgacuccgggcgcggcaacugggacugcaucaugaccagcuaccaguaccugaucauccagaacaccaccugggaggaccacugccaguucucccggcccagccccaucggguaccugggccuccugucccagcgcacgcgggacaucuacaucagccgccggcugcucggcaccuucaccuggacccugagcgacuccgaggggaaggacacgccgggcggguacugccugacccgcuggaugcucaucgaggccgagcugaagugcuucggcaacaccgccguggccaagugcaacgagaagcacgacgaggaguucugcgacaugcugcggcuguucgacuucugcaagcaggccauccagcgccugaaggcggaggcccagaugagcauccagcugaucaacaaggccgugaacgcccucaucaacgaccagcugaucaugaagaaccaccuccgggacaucauggggauccccuacugcaacuacuccaaguacugguaccucaaccacaccacgaccggccgcaccagccugcccaagugcuggcuggucuccaacggcagcuaccucaacgagacccacuucuccgacgacaucgagcagcaggccgacaacaugaucacggagaugcugcagaaggaguacauggagcggcaggggaagacgccccugggccugguggaccucuucguguucagcaccuccuucuaccugaucagcaucuuccugcaccucgucaagaucccgacccaccgccacaucguggggaaguccugccccaagccccaccggcugaaccacaugggcaucugcagcugcgggcuguacaagcagcccggcgugccggucaaguggaagcgcugaggacuaguaauaaggaaacuguaugaaugucugugggcaggaagugaagagauccuucuguaaagguuuuuggaauuaugucugcugaauaauaaacuuuuuugaaauaauaaaucugguagaaaaaugagaucucaaaggcucuuuucagagccaccaaaaaaaaaaaaaaaaaaaaaaaaaaaaaaaaaaaaaaaaaaaaaaaaaaaaaaaaaaaaaaaaagaauu

SEQ ID NO: 37478 - RNA, 1778 nt, Artificial Sequence
  mRNA product Design b-4 (hSL-A64-N5) comprising derived and/or modified sequence from LASV(LP;Clade I)__AAF86701__GPCmut10 (opt1)
aggagagucccgcagucggcguccagcggcucugcuuguucgugugugugucguugcaggccuuauucaagcuuaccaugggccagaucaucaccuucuuccaggaggugccccacgucaucgaggaggugaugaacaucgugcugaucgcccucagccugcuggccauccucaaggggcuguacaacaucgcgaccugcggcaucaucgggcuggucgccuuccucuuccugugcggcaaguccugcagccugacgcucaagggcggguacgagcugcagacccuggagcucaacauggagacccugaacaugugcaugccgcuguccugcaccaagaacagcucccaccacuacauccgcgugggcaacgagacggggcucgagcugacccugaccaacaccagcaucaucaaccacaaguucugcaaccucuccgacgcccacaagaagaaccuguacgaccacgcccugaugagcaucaucuccacguuccaccucagcauccccaacuucaaccaguacgaggccauguccugcgacuucaacggcgggaagaucagcgugcaguacaaccugucccacagcuacgcgggcgacgccgccgagcacugcgggaccgucgccaacggcgugcugcagaccuucaugcggauggcguggggcgggcgcuacaucgcccucgacuccggcaaggggaacugggacugcaucaugaccagcuaccaguaccugaucauccagaacacgaccugggaggaccacugccaguucucccggcccagccccaucggcuaccugggccuccugucccagcgcacccgggacaucuacaucagccgccggcugcucgggaccuucacguggacccugagcgacuccgagggcaacgagacccccgggggcuacugccugacccgcuggaugcucaucgaggccgagcugaagugcuucgggaacacggccguggccaagugcaacgagaagcacgacgaggaguucugcgacaugcugcggcuguucgacuucugcaagcaggcgauccgccggcugaaggccgaggcccagaugagcauccagcugaucaacaaggccgucaacgcccucaucaacgaccagcugaucaugaagaaccaccuccgcgacaucaugggcauccccuacugcaacuacuccaaguacugguaccucaaccacaccagcuccggccggaccagccugcccaagugcuggcugaucuccaacgggagcuaccucaacgagacccaguucuccgacgacaucgagcagcaggcggacaacaugaucacggagaugcugcagaaggaguacaucgagcgccagggcaagaccccgcuggggcugguggacaucuucaucuucagcaccuccuucuaccucaucagcaucuuccugcaccugaucaagaucccgacccaccggcacaucgugggcaagcccugccccaagccccaccgccucaaccacaugggggucugcuccugcggccuguacaagcacccgggcgugcccacgaaguggaagcggugaggacuaguaauaaggaaacuguaugaaugucugugggcaggaagugaagagauccuucuguaaagguuuuuggaauuaugucugcugaauaauaaacuuuuuugaaauaauaaaucugguagaaaaaugagaucucaaaggcucuuuucagagccaccaaaaaaaaaaaaaaaaaaaaaaaaaaaaaaaaaaaaaaaaaaaaaaaaaaaaaaaaaaaaaaaaagaauu

SEQ ID NO: 37479 - RNA, 1778 nt, Artificial Sequence
  mRNA product Design b-4 (hSL-A64-N5) comprising derived and/or modified sequence from LASV(803213;Clade II)__AAF86703__GPCmut10 (opt1)
aggagagucccgcagucggcguccagcggcucugcuuguucgugugugugucguugcaggccuuauucaagcuuaccaugggccagaucaucaccuucuuccaggaggugccccacgucaucgaggaggugaugaacaucgugcugaucgcccucagccugcuggccauccucaaggggaucuacaacgucgcgaccugcggccuguucgggcugaucuccuuccuccugcugugcggccgcagcugcuccgugacguacaaggggguguacgagcuccagacccuggagcugaacauggccaaccucaacaugugcaugccgcugagcugcaccaagaacaacucccaccacuacaucauggucggcaacgagaccggccuggagcucacgcugaccaacaccagcaucaucaaccacaaguucugcaaccuguccgacgcccacaagaagaaccucuacgaccacgcccugaugagcaucaucuccaccuuccaccugagcauccccaacuucaaccaguacgaggccauguccugcgacuucaacgggggcaagaucagcgugcaguacaaccucucccacagcuucgcgguggacgccgccaaccacugcgggacgaucgccaacggcguccugcagaccuucaugcggauggcguggggcggguccuacaucgcccuggacagcggcaaggggaacugggacugcaucaugaccuccuaccaguaccucaucauccagaacaccacgugggaggaccacugccaguucagccgccccucccccaucggcuaccuggggcugcucagccagcggacccgcgacaucuacaucagccggcgccugcugggcaccuucaccuggacgcucuccgacagcgagggcaacgaggcccccgggggcuacugccugacccgguggaugcugaucgaggccgagcucaagugcuucgggaacaccgccguggcgaagugcaacgagaagcacgacgaggaguucugcgacaugcugcgccuguucgacuucugcaagcaggccaucaagcggcucaagaccgaggcccagauguccauccagcugaucaacaaggccgugaacgcccugaucaacgaccagcucaucaugaagaaccaccuccgcgacaucaugggcauccccuacugcaacuacagccgguacugguaccugaaccacacggucaccgggaagaccucccugccccgcugcuggcuggugagcaacggcuccuaccugaacgagacccacuucagcgacgacaucgagcagcaggcggacaacaugaucacggagaugcuccagaaggaguacauggaccggcagggcaagaccccgcuggggcugguggaccuguucgucuucuccaccagcuucuaccucaucuccaucuuccugcaccuggugaagaucccgacccaccgccacaucgugggcaagcccugccccaagccccaccggcucaaccacauggggaucugcagcugcggccuguacaagcacccggggguccccgugaaguggaagcgcugaggacuaguaauaaggaaacuguaugaaugucugugggcaggaagugaagagauccuucuguaaagguuuuuggaauuaugucugcugaauaauaaacuuuuuugaaauaauaaaucugguagaaaaaugagaucucaaaggcucuuuucagagccaccaaaaaaaaaaaaaaaaaaaaaaaaaaaaaaaaaaaaaaaaaaaaaaaaaaaaaaaaaaaaaaaaagaauu

SEQ ID NO: 37480 - RNA, 1778 nt, Artificial Sequence
  mRNA product Design b-4 (hSL-A64-N5) comprising derived and/or modified sequence from LASV(GA391;Clade III)__CAA36645__GPCmut10 (opt1)
aggagagucccgcagucggcguccagcggcucugcuuguucgugugugugucguugcaggccuuauucaagcuuaccaugggccagaucgugaccuucuuccaggaggucccccacgugaucgaggaggugaugaacaucguccugaucgcccucagcauccuggccauccugaaggggcucuacaacguggcgaccugcggccugaucgggcuggugaccuuccuccugcuguccggccgcagcugcucccucaucuacaaggggaccuacgagcugcagacccuggagcucaacauggagacccugaacaugugcaugccgcugagcugcacgaagaacaacucccaccacuacauccgggucggcaacgagaccggccucgagcugacccugaccaacacgagcauccucaaccacaaguucugcaaccuguccgacgcccacaagcgcaaccuguacgaccacagccucauguccaucaucagcaccuuccaccuguccauccccaacuucaaccaguacgaggccaugagcugcgacuucaacgggggcaagaucaccgugcaguacaaccugucccacagcuucgccguggacgccgcggggcacugcggcacccucgccaacgggguccugcagacguucaugcggauggccuggggcggcuccuacaucgcccuggacagcgggcgcggcaacugggacugcaucaugaccuccuaccaguaccucaucauccagaacaccaccugggacgaccacugccaguucagccggcccucccccaucggguaccugggccugcucagccagcgcacgcgggacaucuacaucagccgccggcugcugggcaccuucaccuggacccucuccgacagcgaggggaacgagacgccgggcggguacugccugacccgcuggaugcugaucgaggcggagcucaagugcuucggcaacaccgccguggccaagugcaacgagaagcacgacgaggaguucugcgacaugcugcggcuguucgacuucugcaagcaggccauccgccggcucaagaccgaggcccagauguccauccagcugaucaacaaggcggugaacgcccugaucaacgaccagcucaucaugaagaaccaccuccgcgacaucauggggauccccuacugcaacuacagccgguacugguaccugaaccacacguccaccggcaagaccagccugccccgcugcuggcugaucuccaacggcagcuaccugaacgagaccaaguucuccgacgacaucgagcagcaggccgacaacaugaucacggagaugcugcagaaggaguacaucgaccggcaggggaagacgccccucggccuggucgaccuguucguguucagcaccuccuucuaccucaucagcaucuuccugcaccuggugaagaucccgacccaccgccacaucgucgggaagcccugccccaagccccaccggcucaaccacaugggcaucugcuccugcgggcuguacaagcagccgggcgugcccgugcgcuggaagcggugaggacuaguaauaaggaaacuguaugaaugucugugggcaggaagugaagagauccuucuguaaagguuuuuggaauuaugucugcugaauaauaaacuuuuuugaaauaauaaaucugguagaaaaaugagaucucaaaggcucuuuucagagccaccaaaaaaaaaaaaaaaaaaaaaaaaaaaaaaaaaaaaaaaaaaaaaaaaaaaaaaaaaaaaaaaaagaauu

SEQ ID NO: 37481 - RNA, 1781 nt, Artificial Sequence
  mRNA product Design b-4 (hSL-A64-N5) comprising derived and/or modified sequence from LASV(AV;Clade V)__CCA30314__GPCmut10 (opt1)
aggagagucccgcagucggcguccagcggcucugcuuguucgugugugugucguugcaggccuuauucaagcuuaccaugggccagaucgugaccuucuuccaggaggucccccacgugaucgaggaggugaugaacaucguccugaucgcccucagcauccuggccgugcugaaggggcucuacaacaucgcgaccugcggccugaucgggcugaucacguuccuccugcugugcggccgcuccugcagcuccaaccucuacaaggggguguacgagcugcagagccuggaccucaacauggagacccugaacaugugcaugccgcuguccugcaccaagaacaacagccaccacuacauccgggucggcaacgacaccggccucgagcugacgcugaccaacaccuccauccucaaccacaaguucugcaaccugagcgacgcccacaagaaggaccuguacgaccacgcccucauguccaucaucagcaccuuccaccuguccauccccaacuucaaccaguacgaggccaugagcugcgacuucaacgggggcaagaucuccgugcaguacaaccugagccacuccuacgccaucgacgcggccaaccacugcgggacgguggccaacggcauccuccagaccuucaugcgcauggccuggggcgggagcuacaucgcgcuggacuccggccgggggaacugggacugcaucaugaccagcuaccaguaccugaucauccagaacaccacgugggagaaccacugccaguucucccgccccagccccaucggcuaccucgggcugcugagccagcggacccgcgacaucuacaucucccggcgccuccugggcaccuucaccuggacgcugagcgacuccgagggcaacgccacccccgggggcuacugccucacccgguggaugcugaucgaggccgagcugaagugcuucgggaacaccgccgucgccaagugcaacgagaagcacgacgaggaguucugcgacaugcuccgccuguucgacuucugcaagcaggcgaucagccggcugaaguccgaggcccagaugagcauccagcucaucaacaaggccgugaacgcccugaucaacgaccagcugaucaugaagaaccaccuccgcgacaucaugggcauccccuacugcaacuacuccaaguacugguaccugaaccacacgaucaccgggaagaccagccugcccaagugcuggcucguguccaacggcagcuaccugaacgagacccacuucuccgacgacaucgagcagcaggccgacaacaugaucacggagaugcugcagaaggaguacauggagcggcagggcaagaccccgcuggggcucgucgaccuguucguguucagcaccuccuucuaccugaucagcaucuuccuccgccuggugaagaucccgacccaccggcacaucgucggcaagcccugccccaagccccaccgccugaaccacauggggaucugcuccugcggccucuacaagcagccgggggugcccgugcgguggaagcgcugaggacuaguaauaaggaaacuguaugaaugucugugggcaggaagugaagagauccuucuguaaagguuuuuggaauuaugucugcugaauaauaaacuuuuuugaaauaauaaaucugguagaaaaaugagaucucaaaggcucuuuucagagccaccaaaaaaaaaaaaaaaaaaaaaaaaaaaaaaaaaaaaaaaaaaaaaaaaaaaaaaaaaaaaaaaaagaauu

SEQ ID NO: 37482 - RNA, 1778 nt, Artificial Sequence
  mRNA product Design b-4 (hSL-A64-N5) comprising derived and/or modified sequence from LASV(Togo/2016/7082;Clade VI)__AMR44577__GPCmut10 (opt1)
aggagagucccgcagucggcguccagcggcucugcuuguucgugugugugucguugcaggccuuauucaagcuuaccaugggccagaucaucaccuucuuccaggaggugccccacgucaucgaggaggugaugaacaucgugcugaucgcccucagccugcuggccauccucaagggggucuacaacguggcgaccugcggcaucaucgggcuggugacguuccuguuccucugcggccgcuccugcagccugaucuacaagggguccuacgagcugcagacccucgagcugaacauggagacccugaacaugugcaugccgcucagcugcaccaagaacuccagccaccacuacauccgggucggcaacgagacgggccuggagcugacccucaccaacaccuccaucaucaaccacaaguucugcaaccugagcgacgcccacaagcgcaaccuguacgaccacgcccucauguccauccugagcacguuccaccuguccauccccaacuucaaccaguacgaggccaugagcugcgacuucaacgggggcaagaucuccgugcaguacaaccucagccacgccuacgcgguggacgccgccgagcacugcgggaccgucgccaacggcgugcugcagaccuucaugcggauggcguggggcggguccuacaucgcccuggacagcggccgcgggaacugggacugcaucaugaccuccuaccaguaccucaucauccagaacacgaccugggaggaccacugccaguucagccggcccucccccaucggcuaccuggggcugcucagccagcgcacccgggacaucuacaucagccgccggcugcugggcaccuucacguggacccucuccgacagcgagggcaacgagacccccgggggcuacugccugacccgcuggaugcugaucgaggccgagcucaagugcuucgggaacacggccguggccaagugcaacgagaagcacgacgaggaguucugcgacaugcugcggcuguucgacuucugcaagcaggcgauccagcgccucaaguccgaggcccagaugagcauccagcugaucaacaaggccgucaacgcccugaucaacgaccagcucaucaugaagaaccaccuccgggacaugaugggcauccccuacugcaacuacuccaaguacugguaccugaaccacaccagcuccgggcgcaccagccugcccaagugcuggcugguguccaacggcagcuaccugaacgagacccacuucuccgacgacaucgagcagcaggccgacaacaugaucacggagaugcuccagaaggaguacaucgaccggcagggcaagaccccgcuggggcugguggaccuguucgucuucagcaccuccuucuaccucaucagcaucuuccugcaccugaucaagaucccgacccaccgccacaucgugggcaagcccugccccaagccccaccggcucaaccacauggggaucugcuccugcggccuguacaagcagccgggggugcccacgcgcuggaagcggugaggacuaguaauaaggaaacuguaugaaugucugugggcaggaagugaagagauccuucuguaaagguuuuuggaauuaugucugcugaauaauaaacuuuuuugaaauaauaaaucugguagaaaaaugagaucucaaaggcucuuuucagagccaccaaaaaaaaaaaaaaaaaaaaaaaaaaaaaaaaaaaaaaaaaaaaaaaaaaaaaaaaaaaaaaaaagaauu

SEQ ID NO: 37483 - RNA, 1778 nt, Artificial Sequence
  mRNA product Design b-4 (hSL-A64-N5) comprising derived and/or modified sequence from LASV(KAK-428;Clade n.d. (VII))__ANH09740__GPCmut10 (opt1)
aggagagucccgcagucggcguccagcggcucugcuuguucgugugugugucguugcaggccuuauucaagcuuaccaugggccagaucgugaccuucuuccaggaggucccccacgugaucgaggaggugaugaacaucguccugaucgcccucagccugcuggccauccucaaggggcuguacaacuucgcgaccugcggcgugaucgggcugaucacguuccuccugcugugcggccgcuccugcagcgccaccuacaaggggcaguacgagcuccagacccuggagcugaacauggagucccucaacaugugcaugccgcugagcugcaccaagaacaacucccaccacuacauccgggccggcaacaacacgggccuggagcucacccugaccaacaccagcaucaucucccacaaguucugcaaccugagcgacgcccacaagaagaaccucuacgaccacacgcugauguccaucaucaccaccuuccaccugagcauccccaacuucaaccaguacgaggccauguccugcgacuucaacgggggcaagaucagcauccaguacaaccucucccacagcuacgcgggggacgccgcccagcacugcggcaccguggccaacgggguccugcagacguucaugcgcauggcguggggcggcuccuaccuggcccucgacagcgggcggcgcggcugggacugcaucaucuccagcuaccaguaccugaucauccagaacaccaccugggacgaccacugccaguucucccggcccagccccaucggguaccugggcuucgugagccagaagacccgcgacaucuacaucucccggcgccuccugggcacguucaccuggacccugagcgacuccgaggggcacgacaugccgggcggguacugccucacccgguggaugcugaucgaggccgaccugaagugcuucggcaacacggccguggccaagugcaacgagaagcacgacgaggaguucugcgacauguggcgccucuucgacuucugcaagcaggcgauccagcggcugaaggccgaggcccagaugaacauccagcugaucaacaaggccgucaacgcccucaucaacgaccagcugaugaugaagaaccaccuccgcgacaucauggggauccccuacugcaacuacagcaaguucugguaccugaacaacaccaccaccggccggacgucccugccccgcugcuggcugaucagcaacggcuccuaccucaacgagacccacuucagcgacgacaucgagcagcaggcggacaacaugaucaccgagaugcugcagaaggaguacauggaccggcaggggaagacgccccugggccucguggaccuguucguguucuccaccagcuucuaccugaucaccaucuuccugcaccucgucaagaucccgacccaccgccacaucguggggaagcccugccccaagccccaccggcugaaccacaugggcaucugcuccugcgggcuguacaagcagccgggcgugcccguccgcuggaagcggugaggacuaguaauaaggaaacuguaugaaugucugugggcaggaagugaagagauccuucuguaaagguuuuuggaauuaugucugcugaauaauaaacuuuuuugaaauaauaaaucugguagaaaaaugagaucucaaaggcucuuuucagagccaccaaaaaaaaaaaaaaaaaaaaaaaaaaaaaaaaaaaaaaaaaaaaaaaaaaaaaaaaaaaaaaaaagaauu

SEQ ID NO: 37484 - RNA, 1778 nt, Artificial Sequence; identical to SEQ ID NO: 37478
  mRNA product Design b-4 (hSL-A64-N5) comprising derived and/or modified sequence from LASV(Pinneo-NIG-1969;Clade I)__AIT17836__GPCmut10 (opt1)

SEQ ID NO: 37485 - RNA, 1778 nt, Artificial Sequence
  mRNA product Design b-4 (hSL-A64-N5) comprising derived and/or modified sequence from LASV(ISTH0009-NIG-2011;Clade II)__AIT17404__GPCmut10 (opt1)
aggagagucccgcagucggcguccagcggcucugcuuguucgugugugugucguugcaggccuuauucaagcuuaccaugggccagaucaucaccuucuuccaggaggugccccacgucaucgaggaggugaugaacaucgugcugaucgcccucagccugcuggccauccucaaggggaucuacaacgucgcgaccugcggccuguucgggcugguguccuuccuccugcugugcggccgcagcugcuccacgaccuacaaggggguguacgagcuccagacccuggagcuggacauggccagccucaacaugugcaugccgcuguccugcaccaagaacaacagccaccacuacaucauggucggcaacgagacgggccuggagcucacccugaccaacaccuccaucaucaaccacaaguucugcaaccugagcgacgcccacaagaagaaccucuacgaccacgcccugauguccaucaucagcacguuccaccuguccauccccaacuucaaccaguacgaggccaugagcugcgacuucaacgggggcaagaucuccgugcaguacaaccucagccacgcguacgccguggacgccgccaaccacugcgggaccaucgcgaacggcguccugcagaccuucaugcggauggccuggggcggguccuacaucgcccuggacagcggcaagggguccugggacugcaucaugaccagcuaccaguaccucaucauccagaacacgaccugggaggaccacugccaguucucccgccccagccccaucggcuaccuggggcugcucagccagcggacccgcgacaucuacaucucccggcgccugcugggcaccuucacguggacccucagcgacuccgagggcaacgagacccccgggggcuacugccugacccgguggaugcugaucgaggccgagcucaagugcuucgggaacacggccguggcgaagugcaacgagaagcacgacgaggaguucugcgacaugcugcgccuguucgacuucugcaagcaggccauccggcgccucaagaccgaggcccagaugagcauccagcugaucaacaaggccgugaacgcccugaucaacgaccagcucaucaugaagaaccaccuccgggacaucaugggcauccccuacugcaacuacuccaaguacugguaccugaaccacaccgucaccgggaagacgagccugccccgcugcuggcugguguccaacggcagcuaccugaacgagacccacuucuccgacgacaucgagcagcaggcggacaacaugaucaccgagcuccugcagaaggaguacauggaccggcagggcaagaccccgcuggggcugguggaccucuucgucuucagcacguccuucuaccugaucagcaucuuccugcaccucaucaagaucccgacccaccgccacaucaccggcaagcccugccccaagccccaccggcugaaccacauggggaucugcuccugcggccuguacaagcacccgggggugcccgugaaguggaagcgcugaggacuaguaauaaggaaacuguaugaaugucugugggcaggaagugaagagauccuucuguaaagguuuuuggaauuaugucugcugaauaauaaacuuuuuugaaauaauaaaucugguagaaaaaugagaucucaaaggcucuuuucagagccaccaaaaaaaaaaaaaaaaaaaaaaaaaaaaaaaaaaaaaaaaaaaaaaaaaaaaaaaaaaaaaaaaagaauu

SEQ ID NO: 37486 - RNA, 1778 nt, Artificial Sequence
  mRNA product Design b-4 (hSL-A64-N5) comprising derived and/or modified sequence from LASV(ISTH2010-NIG-2012;Clade II)__AIT17482__GPCmut10 (opt1)
aggagagucccgcagucggcguccagcggcucugcuuguucgugugugugucguugcaggccuuauucaagcuuaccaugggccagaucaucaccuucuuccaggaggugccccacgucaucgaggaggugaugaacaucgugcugaucgcccucagccugcuggccauccucaaggggaucuacaacgucgcgaccugcggccuguucgggcugguguccuuccuccugcugugcggccgcagcugcuccacgaccuacaaggggguguacgagcuccagacccuggagcuggacauggccagccucaacaugugcaugccgcuguccugcaccaagaacaacagccaccacuacaucauggucggcaacgagacgggccuggagcucacccugaccaacaccuccaucaucaaccacaaguucugcaaccugagcgacgcccacaagaagaaccucuacgaccacgcccugauguccaucaucagcacguuccaccuguccauccccaacuucaaccaguacgaggccaugagcugcgacuucaacgggggcaagaucuccgugcaguacaaccucagccacgcguacgccguggacgccgccaaccacugcgggaccaucgcgaacggcguccugcagaccuucaugcggauggccuggggcggguccuacaucgcccuggacagcggcaagggguccugggacugcaucaugaccagcuaccaguaccucaucauccagaacaucacgugggaggaccacugccaguucucccgccccagccccaucggcuaccuggggcugcucagccagcggacccgcgacaucuacaucucccggcgccugcugggcaccuucaccuggacgcucagcgacuccgagggcaacgagacccccgggggcuacugccugacccgguggaugcugaucgaggccgagcucaagugcuucgggaacaccgccguggcgaagugcaacgagaagcacgacgaggaguucugcgacaugcugcgccuguucgacuucugcaagcaggccauccggcgccucaagacggaggcccagaugagcauccagcugaucaacaaggccgugaacgcccugaucaacgaccagcucaucaugaagaaccaccuccgggacaucaugggcauccccuacugcaacuacuccaaguacugguaccugaaccacaccgucaccgggaagaccagccugccccgcugcuggcugguguccaacggcagcuaccugaacgagacgcacuucuccgacgacaucgagcagcaggcggacaacaugaucaccgagcuccugcagaaggaguacaucgaccggcagggcaagaccccgcuggggcugguggaccucuucgucuucagcaccuccuucuaccugaucagcaucuuccugcaccucgugaagaucccgacgcaccgccacguggucggcaagcccugccccaagccccaccggcugaaccacauggggaucugcuccugcggccuguacaagcacccgggggugcccgugaaguggaagcgcugaggacuaguaauaaggaaacuguaugaaugucugugggcaggaagugaagagauccuucuguaaagguuuuuggaauuaugucugcugaauaauaaacuuuuuugaaauaauaaaucugguagaaaaaugagaucucaaaggcucuuuucagagccaccaaaaaaaaaaaaaaaaaaaaaaaaaaaaaaaaaaaaaaaaaaaaaaaaaaaaaaaaaaaaaaaaagaauu

SEQ ID NO: 37487 - RNA, 1778 nt, Artificial Sequence
  mRNA product Design b-4 (hSL-A64-N5) comprising derived and/or modified sequence from LASV(Lassa virus/H.sapiens-wt/NGA/2015/ISTH_0543;Clade II)__AVO03639__GPCmut10 (opt1)
aggagagucccgcagucggcguccagcggcucugcuuguucgugugugugucguugcaggccuuauucaagcuuaccaugggccagaucaucaccuucuuccaggaggugccccacgucaucgaggaggugaugaacaucgugcugaucgcccucagccugcuggccauccucaaggggaucuacaacgucgcgaccugcggccuguucgggcugguguccuuccuccugcugugcggccgcagcugcuccacgaccuacaaggggguguacgagcuccagacccuggagcuggacauggccaaccucaacaugugcaugccgcugagcugcaccaagaacaacucccaccacuacaucauggucggcaacgagacgggccuggagcucacccugaccaacaccagcaucaucaaccacaaguucugcaaccuguccgacgcccacaagaagaaccucuacgaccacgcccugaugagcaucaucuccacguuccaccugagcauccccaacuucaaccaguacgaggccauguccugcgacuucaacgggggcaagaucagcgugcaguacaaccucucccacaccuacgcgguggacgccgccaaccacugcgggaccaucgccaacggcguccugcagaccuucaugcggauggcguggggcgggagcuacaucgcccuggacuccggcaaggggagcugggacugcaucaugacguccuaccaguaccucgugauccagaacaccaccugggaggaccacugccaguucagccgccccucccccaucggcuaccuggggcugcucagccagcggacccgcgacaucuacaucagccggcgccugcugggcacguucaccuggacccucuccgacagcgagggcaacgagacccccgggggcuacugccugacgcgguggaugcugaucgaggccgagcucaagugcuucgggaacaccgccguggccaagugcaacgagaagcacgacgaggaguucugcgacaugcugcgccuguucgacuucugcaagcaggcgauccggcgccucaagaccgaggcccagauguccauccagcugaucaacaaggccgucaacgcccugaucaacgaccagcucaucaugaagaaccaccuccgggacaucaugggcaucccguacugcaacuacagcaaguacugguaccugaaccacaccgugacggggaagaccucccugccccgcugcuggcuggugagcaacggcuccuaccugaacgagacccacuucagcgacgacaucgagcagcaggccgacaacaugaucaccgagcuccugcagaaggaguacaucgaccggcagggcaagacgccccuggggcuggucgaccucuucguguucuccaccagcuucuaccugaucuccaucuuccugcaccucgugaagaucccgacccaccgccacaucaccggcaagcccugccccaagccccaccggcugaaccacauggggaucugcagcugcggccuguacaagcacccggggguccccgugaaguggaagcgcugaggacuaguaauaaggaaacuguaugaaugucugugggcaggaagugaagagauccuucuguaaagguuuuuggaauuaugucugcugaauaauaaacuuuuuugaaauaauaaaucugguagaaaaaugagaucucaaaggcucuuuucagagccaccaaaaaaaaaaaaaaaaaaaaaaaaaaaaaaaaaaaaaaaaaaaaaaaaaaaaaaaaaaaaaaaaagaauu

SEQ ID NO: 37488 - RNA, 1778 nt, Artificial Sequence
  mRNA product Design b-4 (hSL-A64-N5) comprising derived and/or modified sequence from LASV(Lassa virus/H.sapiens-wt/NGA/2016/ISTH_0009;Clade II)__AVO03571__GPCmut10 (opt1)
aggagagucccgcagucggcguccagcggcucugcuuguucgugugugugucguugcaggccuuauucaagcuuaccaugggccagaucaucaccuucuuccaggaggugccccacgucaucgaggaggugaugaacaucgugcugaucgcccucagccugcuggccauccucaaggggaucuacaacgucgcgaccugcggccugcuggggcucguguccuuccugcugcucugcggccgcagcugcuccacgaccuacaaggggguguacgagcugcagacccuggagcucgacauggccagccugaacaugugcaugccgcuguccugcaccaagaacaacagccaccacuacaucauggucggcaacgagacgggccucgagcugacccugaccaacaccuccaucaucaaccacaaguucugcaaccucagcgacgcccacaagaagaaccuguacgaccacgcccugauguccaucaucagcacguuccaccucuccauccccaacuucaaccaguacgaggccaugagcugcgacuucaacgggggccggaucuccgugcaguacaaccugagccacuccuacgcgguggacgccgccaaccacugcgggaccaucgccaacggcguccugcagaccuucaugcgcauggcguggggcgggagcuacaucgcccucgacuccggcaaggggagcugggacugcaucaugaccuccuaccaguaccugaucauccagaacacgaccugggaggaccacugccaguucagccggcccagccccaucggcuaccuggggcuccugucccagcgcacccgggacaucuacaucagccgccggcugcucggcaccuucacguggacccuguccgacagcgagggcaacgagacccccgggggcuacugccugacccgcuggaugcucaucgaggccgagcugaagugcuucgggaacacggccguggccaagugcaacgagaagcacgacgaggaguucugcgacaugcugcggcuguucgacuucugcaagcaggcgauccgccggcugaagaccgaggcccagauguccauccagcugaucaacaaggccgugaacgcccucaucaacgaccagcugaucaugaagaaccaccuccgcgacaucaugggcauccccuacugcaacuacagcaaguacugguaccucaaccacaccgucaccgggaagacgucccugccccggugcuggcuggugagcaacggcuccuaccucaacgagacccacuucagcgacgacaucgagcagcaggccgacaacaugaucaccgagcugcugcagaaggaguacaucgaccgccagggcaagaccccgcuggggcucguggaccuguucgucuucuccacgagcuucuaccugaucuccaucuuccuccaccuggugaagaucccgacccaccggcacaucaccggcaagcccugccccaagccccaccgccugaaccacauggggaucugcagcugcggccucuacaaccacccgggggugcccgucaaguggaagcggugaggacuaguaauaaggaaacuguaugaaugucugugggcaggaagugaagagauccuucuguaaagguuuuuggaauuaugucugcugaauaauaaacuuuuuugaaauaauaaaucugguagaaaaaugagaucucaaaggcucuuuucagagccaccaaaaaaaaaaaaaaaaaaaaaaaaaaaaaaaaaaaaaaaaaaaaaaaaaaaaaaaaaaaaaaaaagaauu

SEQ ID NO: 37489 - RNA, 1778 nt, Artificial Sequence
  mRNA product Design b-4 (hSL-A64-N5) comprising derived and/or modified sequence from LASV(Lassa virus/H.sapiens-wt/NGA/2016/ISTH_0017;Clade II)__AVO03567__GPCmut10 (opt1)
aggagagucccgcagucggcguccagcggcucugcuuguucgugugugugucguugcaggccuuauucaagcuuaccaugggccagaucaucaccuucuuccaggaggugccccacgucaucgaggaggugaugaacaucgugcugaucgcccucagccugcuggccauccucaaggggaucuacaacgucgcgaccugcggccuguucgggcugguguccuuccuccugcugugcggccgcagcugcuccacgaccuacaaggggguguacgagcuccagacccuggagcuggacauggccagccucaacaugugcaugccgcuguccugcaccaagaacaacagccaccacuacaucauggucggcaacgagacgggccuggagcucacccugaccaacaccuccaucaucaaccacaaguucugcaaccugagcgacgcccacaagaagaaccucuacgaccacgcccugauguccaucaucagcacguuccaccuguccauccccaacuucaaccaguacgaggccaugagcugcgacuucaacgggggcaagaucuccgugcaguacaaccucagccacaccuacgcgaucgacgccgccaaccacugcgggaccaucgccaacggcgugcugcagaccuucaugcggauggcguggggcggguccuacaucgcccuggacagcggcaagggguccugggacugcaucaugacgagcuaccaguaccucaucauccagaacaccaccugggaggaccacugccaguucucccgccccagccccaucggcuaccuggggcugcucagccagcggacccgcgacaucuacaucucccggcgccugcugggcacguucaccuggacccucagcgacuccgagggcaacgagacccccgggggcuacugccugacgcgguggaugcugaucgaggccgagcucaagugcuucgggaacaccgccgucgccaagugcaacgagaagcacgacgaggaguucugcgacaugcugcgccuguucgacuucugcaagcaggcgauccggcgccucaagaccgaggcccagaugagcauccagcugaucaacaaggccgugaacgcccugaucaacgaccagcucaucaugaagaaccaccuccgggacaucaugggcaucccguacugcaacuacuccaaguacugguaccugaaccacaccgugacggggaagaccagccugccccgcugcuggcuggucuccaacggcagcuaccugaacgagacccacuucuccgacgacaucgagcagcaggccgacaacaugaucaccgagcuccugcagaaggaguacauggaccggcagggcaagacgccccuggggcugguggaccucuucguguucagcaccuccuucuaccugaucagcaucuuccugcaccucguccgcaucccgacccaccggcacgugaucggcaagcccugccccaagccccaccgccugaaccacauggggaucugcuccugcggccuguacaagcacccgggggugcccgucaaguggaagcggugaggacuaguaauaaggaaacuguaugaaugucugugggcaggaagugaagagauccuucuguaaagguuuuuggaauuaugucugcugaauaauaaacuuuuuugaaauaauaaaucugguagaaaaaugagaucucaaaggcucuuuucagagccaccaaaaaaaaaaaaaaaaaaaaaaaaaaaaaaaaaaaaaaaaaaaaaaaaaaaaaaaaaaaaaaaaagaauu

SEQ ID NO: 37490 - RNA, 1778 nt, Artificial Sequence
  mRNA product Design b-4 (hSL-A64-N5) comprising derived and/or modified sequence from LASV(Lassa virus/H.sapiens-wt/NGA/2018/ISTH_0959;Clade II)__AVV65099__GPCmut10 (opt1)
aggagagucccgcagucggcguccagcggcucugcuuguucgugugugugucguugcaggccuuauucaagcuuaccaugggccagaucaucaccuucuuccaggaggugccccacgucaucgaggaggugaugaacaucgugcugaucgcccucagccugcuggccauccucaaggggaucuacaacgucgugaccugcggccuguucgggcugguguccuuccuccugcugugcggccgcagcugcuccacgaccuacaagggggucuacgagcuccagacccuggagcuggacauggcgagccucaacaugugcaugccgcuguccugcaccaagaacaacagccaccacuacaucauggugggcaacgagacgggccuggagcucacccugaccaacaccuccaucaucaaccacaaguucugcaaccugagcgacgcccacaagaagaaccucuacgaccacgcccugauguccaucaucagcacguuccaccuguccauccccaacuucaaccaguacgaggccaugagcugcgacuucaacgggggcaagaucuccgugcaguacaaccucagccacgccuacgcgaucgacgccgccaaccacugcgggaccaucgccaacggcguccugcagaccuucaugcggauggcguggggcggguccuacaucgcccuggacagcggcaagggguccugggacugcaucaugaccagcuaccaguaccucaucauccagaacacgaccugggaggaccacugccaguucucccgccccagccccaucggcuaccuggggcugcucagccagcggacccgcgacaucuacaucucccggcgccugcugggcaccuucacguggacccucagcgacuccgagggcaacgagacccccgggggcuacugccugacccgguggaugcugaucgaggccgagcucaagugcuucgggaacacggccguggccaagugcaacgagaagcacgacgaggaguucugcgacaugcugcgccuguucgacuucugcaagcaggcgauccggcgccucaagaccgaggcccagaugagcauccagcugaucaacaaggccgugaacgcccugaucaacgaccagcucaucaugaagaaccaccuccgggacaucaugggcauccccuacugcaacuacuccaaguacugguaccugaaccacaccgucaccgggaagacgagccugccccgcugcuggcugguguccaacggcagcuaccugaacgagacccacuucuccgacgacaucgagcagcaggccgacaacaugaucaccgagcuccugcagaaggaguacaucgaccggcagggcaagaccccgcuggggcugguggaccucuucgucuucagcacguccuucuaccugaucagcaucuuccugcaccucgugaagaucccgacccaccgccacgugaucggcaagcccugccccaagccccaccggcugaaccacauggggaucugcuccugcggccuguacaagcacccggggguccccgugaaguggaagcgcugaggacuaguaauaaggaaacuguaugaaugucugugggcaggaagugaagagauccuucuguaaagguuuuuggaauuaugucugcugaauaauaaacuuuuuugaaauaauaaaucugguagaaaaaugagaucucaaaggcucuuuucagagccaccaaaaaaaaaaaaaaaaaaaaaaaaaaaaaaaaaaaaaaaaaaaaaaaaaaaaaaaaaaaaaaaaagaauu

SEQ ID NO: 37491 - RNA, 1778 nt, Artificial Sequence
  mRNA product Design b-4 (hSL-A64-N5) comprising derived and/or modified sequence from LASV(LASV003-NIG-2008;Clade II)__AIT17580__GPCmut10 (opt1)
aggagagucccgcagucggcguccagcggcucugcuuguucgugugugugucguugcaggccuuauucaagcuuaccaugggccagaucaucaccuucuuccaggaggugccccacgucaucgaggaggugaugaacaucgugcugaucgcccucagccugcuggccauccucaaggggaucuacaacgucgcgaccugcggccuguucgggcugguguccuuccuccugcugugcggccgcagcugcuccacgaccuacaaggggguguacgagcuccagacccuggagcuggacauggccagccucaacaugugcaugccgcuguccugcaccaagaacaacagccaccacuacaucauggucggcaacgagacgggccuggagcucacccugaccaacaccuccaucaucaaccacaaguucugcaaccugagcgacgcccacaagaagaaccucuacgaccacgcccugauguccaucaucagcacguuccaccuguccauccccaacuucaaccaguacgaggccaugagcugcgacuucaacgggggcaagaucuccgugcaguacaaccucagccacaccuacgcgguggacgccgccaaccacugcgggaccaucgccaacggcguccugcagaccuucaugcggauggcguggggcggguccuacaucgcccuggacagcggcaagggguccugggacugcaucaugacgagcuaccaguaccucaucauccagaacaccaccugggaggaccacugccaguucucccgccccagccccaucggcuaccuggggcugcucagccagcggacccgcgacaucuacaucucccggcgccugcugggcacguucaccuggacccucagcgacuccgagagcaacgagaccccgggcggguacugccugacgcgguggaugcugaucgaggccgagcucaagugcuucggcaacaccgccguggccaagugcaacgagaagcacgacgaggaguucugcgacaugcugcgccuguucgacuucugcaagcaggcgauccggcgccucaaggccgaggcccagauguccauccagcugaucaacaaggccgugaacgcccugaucaacgaccagcucaucaugaagaaccaccuccgggacaucauggggauccccuacugcaacuacagcaaguacugguaccugaaccacaccgucaccggccgcacgucccugccccggugcuggcuggugagcaacggguccuaccugaacgagacccacuucagcgacgacaucgagcagcaggcggacaacaugaucaccgagcuccugcagaaggaguacauggaccgccagggcaagacgccccugggccugguggaccucuucgucuucuccaccagcuucuaccugaucuccaucuuccugcaccucgugaagaucccgacccaccggcacgugaucgggaagcccugccccaagccccaccgccugaaccacaugggcaucugcagcugcgggcuguacaagcacccgggcguccccgugaaguggaagcggugaggacuaguaauaaggaaacuguaugaaugucugugggcaggaagugaagagauccuucuguaaagguuuuuggaauuaugucugcugaauaauaaacuuuuuugaaauaauaaaucugguagaaaaaugagaucucaaaggcucuuuucagagccaccaaaaaaaaaaaaaaaaaaaaaaaaaaaaaaaaaaaaaaaaaaaaaaaaaaaaaaaaaaaaaaaaagaauu

SEQ ID NO: 37492 - RNA, 1778 nt, Artificial Sequence
  mRNA product Design b-4 (hSL-A64-N5) comprising derived and/or modified sequence from LASV(LASV035-NIG-2009;Clade II)__AIT17588__GPCmut10 (opt1)
aggagagucccgcagucggcguccagcggcucugcuuguucgugugugugucguugcaggccuuauucaagcuuaccaugggccagaucaucaccuucuuccaggaggugccccacgucaucgaggaggugaugaacaucgugcugaucgcccucagccugcuggccauccucaaggggaucuacaacgucgcgaccugcggccuguucgggcugguguccuuccuccugcugugcggccgcagcugcuccacgaccuacaaggggguguacgagcuccagacccuggagcuggacauggccagccucaacaugugcaugccgcuguccugcaccaagaacaacagccaccacuacaucauggucggcaacgagacgggccuggagcucacccugaccaacaccuccaucaucaaccacaaguucugcaaccugagcgacgcccacaagaagaaccucuacgaccacgcccugauguccaucaucagcacguuccaccuguccauccccaacuucaaccaguacgaggccaugagcugcgacuucaacgggggcaagaucuccgugcaguacaaccucagccacgcguacgccguggacgccgccaaccacugcgggaccaucgcgaacggcguccugcagaccuucaugcggauggccuggggcggguccuacaucgcccuggacagcggcaagggguccugggacugcaucaugaccagcuaccaguaccucaucauccagaacacgaccugggaggaccacugccaguucucccgccccagccccaucggcuaccuggggcugcucagccagcggacccgcgacaucuacaucucccggcgccugcugggcaccuucacguggacccucagcgacuccgagggcaacgagacccccgggggcuacugccugacccgguggaugcugaucgaggccgagcucaagugcuucgggaacacggccguggcgaagugcaacgagaagcacgacgaggaguucugcgacaugcugcgccuguucgacuucugcaagcaggccauccggcgccucaaggccgaggcccagaugagcauccagcugaucaacaaggccgugaacgcgcugaucaacgaccagcucaucaugaagaaccaccuccgggacaucaugggcauccccuacugcaacuacuccaaguacugguaccugaaccacaccgucaccgggaagaccagccugccccgcugcuggcugguguccaacggcagcuaccugaacgagacgcacuucuccgacgacaucgagcagcaggccgacaacaugaucaccgagcuccugcagaaggaguacaucgaccggcagggcaagaccccgcuggggcugguggaccucuucgucuucagcaccuccuucuaccugaucagcaucuuccugcaccucgugaagaucccgacgcaccgccacgugaucggcaagcccugccccaagccccaccggcugaaccacauggggaucugcuccugcggccuguacaagcacccggggguccccgugaaguggaagcgcugaggacuaguaauaaggaaacuguaugaaugucugugggcaggaagugaagagauccuucuguaaagguuuuuggaauuaugucugcugaauaauaaacuuuuuugaaauaauaaaucugguagaaaaaugagaucucaaaggcucuuuucagagccaccaaaaaaaaaaaaaaaaaaaaaaaaaaaaaaaaaaaaaaaaaaaaaaaaaaaaaaaaaaaaaaaaagaauu

SEQ ID NO: 37493 - RNA, 1778 nt, Artificial Sequence
  mRNA product Design b-4 (hSL-A64-N5) comprising derived and/or modified sequence from LASV(LASV1000-NIG-2009;Clade II)__AIT17782__GPCmut10 (opt1)
aggagagucccgcagucggcguccagcggcucugcuuguucgugugugugucguugcaggccuuauucaagcuuaccaugggccagaucaucaccuucuuccaggaggugccccacgucaucgaggaggugaugaacaucgugcugaucgcccucagccugcuggccauccucaaggggaucuacaacgucgcgaccugcggccuguucgggcugguguccuuccuccugcugugcggccgcagcugcuccacgaccuacaaggggguguacgagcuccagacccuggagcuggacauggccagccucaacaugugcaugccgcuguccugcaccaagaacaacagccaccacuacaucauggucggcaacgagacgggccuggagcucacccugaccaacaccuccaucaucaaccacaaguucugcaaccugagcgacgcccacaagaagaaccucuacgaccacgcccugauguccaucaucagcacguuccaccuguccauccccaacuucaaccaguacgaggccaugagcugcgacuucaacgggggcaagaucuccgugcaguacaaccucagccacaccuacgcgguggacgccgccaaccacugcgggaccaucgccaacggcguccugcagaccuucaugcggauggcguggggcggguccuacaucgcccuggacagcggcaagggguccugggacugcaucaugacgagcuaccaguaccucaucauccagaacaccaccugggaggaccacugccaguucucccgccccagccccaucggcuaccuggggcugcucagccagcggacccgcgacaucuacaucucccggcgccugcugggcacguucaccuggacccucagcgacuccgagggcaacgagacccccgggggcuacugccugacgcgguggaugcugaucgaggccgagcucaagugcuucgggaacaccgccguggccaagugcaacgagaagcacgacgaggaguucugcgacaugcugcgccuguucgacuucugcaagcaggcgaucaagcggcucaagaccgaggcccagaugagcauccagcugaucaacaaggccgugaacgcccugaucaacgaccagcucaucaugaagaaccaccuccgcgacaucaugggcaucccguacugcaacuacuccaaguacugguaccugaaccacaccgucacggggaagaccagccugccccggugcuggcugguguccaacggcagcuaccugaacgagacccacuucuccgacgacaucgagcagcaggccgacaacaugaucaccgagcuccugcagaaggaguacaucgaccgccagggcaagacgccccuggggcugguggaccucuucgucuucagcaccuccuucuaccugaucagcaucuuccugcaccucgugaagaucccgacccaccggcacguggucggcaagcccugccccaagccccaccgccugaaccacauggggaucugcuccugcggccuguacaagcacccgggggugcccgugaaguggaagcggugaggacuaguaauaaggaaacuguaugaaugucugugggcaggaagugaagagauccuucuguaaagguuuuuggaauuaugucugcugaauaauaaacuuuuuugaaauaauaaaucugguagaaaaaugagaucucaaaggcucuuuucagagccaccaaaaaaaaaaaaaaaaaaaaaaaaaaaaaaaaaaaaaaaaaaaaaaaaaaaaaaaaaaaaaaaaagaauu

SEQ ID NO: 37494 - RNA, 1778 nt, Artificial Sequence
  mRNA product Design b-4 (hSL-A64-N5) comprising derived and/or modified sequence from LASV(LASV221-NIG-2010;Clade II)__AIT17624__GPCmut10 (opt1)
aggagagucccgcagucggcguccagcggcucugcuuguucgugugugugucguugcaggccuuauucaagcuuaccaugggccagaucaucaccuucuuccaggaggugccccacgucaucgaggaggugaugaacaucgugcugaucgcccucagccugcuggccauccucaaggggaucuacaacgucgcgaccugcggccuguucgggcugguguccuuccuccugcugugcggccgcagcugcuccacgaccuacaaggggguguacgagcuccagacccuggagcuggacauggccagccucaacaugugcaugccgcuguccugcaccaagaacaacagccaccacuacaucauggucggcaacgagacgggccuggagcucacccugaccaacaccuccaucaucaaccacaaguucugcaaccugagcgacgcccacaagaagaaccucuacgaccacgcccugauguccaucaucagcacguuccaccuguccauccccaacuucaaccaguacgaggccaugagcugcgacuucaacgggggcaagaucuccgugcaguacaaccucagccacaccuacgcgaucgacgccgccaaccacugcgggaccaucgccaacggcgugcugcagaccuucaugcggauggcguggggcggguccuacaucgcccuggacagcggcaagggguccugggacugcaucaugacgagcuaccaguaccucaucauccagaacaccaccugggaggaccacugccaguucucccgccccagccccaucggcuaccuggggcugcucagccagcggacccgcgacaucuacaucucccggcgccugcugggcacguucaccuggacccucagcgacuccgagggcaacgagacccccgggggcuacugccugacgcgguggaugcugaucgaggccgagcucaagugcuucgggaacaccgccgucgccaagugcaacgagaagcacgacgaggaguucugcgacaugcugcgccuguucgacuucugcaagcaggcgauccggcgccucaagaccgaggcccagaugagcauccagcugaucaacaaggccgugaacgcccugaucaacgaccagcucaucaugaagaaccaccuccgggacaucaugggcaucccguacugcaacuacuccaaguacugguaccugaaccacaccgugacggggaagaccagccugccccgcugcuggcuggucuccaacggcagcuaccugaacgagacccacuucuccgacgacaucgagcagcaggccgacaacaugaucaccgagaugcuccagaaggaguacauggaccggcagggcaagacgccccuggggcugguggaccuguucguguucagcaccuccuucuaccucaucagcaucuuccugcaccuggucaagaucccgacccaccgccacgugaucggcaagcccugccccaagccccaccggcucaaccacauggggaucugcuccugcggccuguacaagcacccgggggugcccgucaaguggaagcgcugaggacuaguaauaaggaaacuguaugaaugucugugggcaggaagugaagagauccuucuguaaagguuuuuggaauuaugucugcugaauaauaaacuuuuuugaaauaauaaaucugguagaaaaaugagaucucaaaggcucuuuucagagccaccaaaaaaaaaaaaaaaaaaaaaaaaaaaaaaaaaaaaaaaaaaaaaaaaaaaaaaaaaaaaaaaaagaauu

SEQ ID NO: 37495 - RNA, 1778 nt, Artificial Sequence
  mRNA product Design b-4 (hSL-A64-N5) comprising derived and/or modified sequence from LASV(LASV237-NIG-2010;Clade II)__AIT17638__GPCmut10 (opt1)
aggagagucccgcagucggcguccagcggcucugcuuguucgugugugugucguugcaggccuuauucaagcuuaccaugggccagaucaucaccuucuuccaggaggugccccacgucaucgaggaggugaugaacaucgugcugaucgcccucagccugcuggccauccucaaggggaucuacaacgucgcgaccugcggccuguucgggcugguguccuuccuccugcugugcggccgcagcugcuccacgaccuacaaggggguguacgagcuccagacccuggagcuggacauggccagccucaacaugugcaugccgcuguccugcaccaagaacaacagccaccacuacaucauggucggcaacgagacgggccuggagcucacccugaccaacaccuccaucaucaaccacaaguucugcaaccugagcgacgcccacaagaaggaccucuacgaccacgcccugauguccaucaucagcacguuccaccuguccauccccaacuucaaccaguacgaggccaugagcugcgacuucaacgggggcaagaucuccgugcaguacaaccucagccacaccuacgcgguggacgccgccaaccacugcgggaccaucgccaacggcguccugcagaccuucaugcggauggcguggggcggguccuacaucgcccuggacagcggcaagggguccugggacugcaucaugacgagcuaccaguaccucaucauccagaacaccaccugggaggaccacugccaguucucccgccccagccccaucggcuaccuggggcugcucagccagcggacccgcgacaucuacaucucccggcgccugcugggcacguucaccuggacccucagcgacuccgagggcaacgagacccccgggggcuacugccugacgcgguggaugcugaucgaggccgagcucaagugcuucgggaacaccgccguggccaagugcaacgagaagcacgacgaggaguucugcgacaugcugcgccuguucgacuucugcaagcaggcgauccggcgccucaagaccgaggcccagaugagcauccagcugaucaacaaggccgugaacgcccugaucaacgaccagcucaucaugaagaaccaccuccgggacaucaugggcaucccguacugcaacuacuccaaguacugguaccugaaccacaccgucacggggaagaccagccugccccgcugcuggcugguguccaacggcagcuaccugaacgagacccacuucuccgacgacaucgagcagcaggccgacaacaugaucaccgagcuccugcagaaggaguacauggaccggcagggcaagacgccccuggggcugguggaccucuucgucuucagcaccuccuucuaccugaucagcaucuuccugcaccucaucaagaucccgacccaccgccacaucaccggcaagcccugccccaagccccaccggcugaaccacauggggaucugcuccugcggccuguacaagcacccgggggugcccgugaaguggaagcgcugaggacuaguaauaaggaaacuguaugaaugucugugggcaggaagugaagagauccuucuguaaagguuuuuggaauuaugucugcugaauaauaaacuuuuuugaaauaauaaaucugguagaaaaaugagaucucaaaggcucuuuucagagccaccaaaaaaaaaaaaaaaaaaaaaaaaaaaaaaaaaaaaaaaaaaaaaaaaaaaaaaaaaaaaaaaaagaauu

SEQ ID NO: 37496 - RNA, 1778 nt, Artificial Sequence
  mRNA product Design b-4 (hSL-A64-N5) comprising derived and/or modified sequence from LASV(LASV253-NIG-2011;Clade II)__AIT17670__GPCmut10 (opt1)
aggagagucccgcagucggcguccagcggcucugcuuguucgugugugugucguugcaggccuuauucaagcuuaccaugggccagaucaucaccuucuuccaggaggugccccacgucaucgaggaggugaugaacaucgugcugaucgcccucagccugcuggccauccucaaggggaucuacaacgucgcgaccugcggccuguucgggcugguguccuuccuccugcugugcggccgcagcugcuccacgaccuacaaggggguguacgagcuccagacccuggagcuggacauggccagccucaacaugugcaugccgcuguccugcaccaagaacaacagccaccacuacaucauggucggcaacgagacgggccuggagcucacccugaccaacaccuccaucaucaaccacaaguucugcaaccugagcgacgcccacaagaagaaccucuacgaccacgcccugauguccaucaucagcacguuccaccuguccauccccaacuucaaccaguacgaggccaugagcugcgacuucaacgggggcaagaucuccgugcaguacaaccucagccacaccuacgcgguggacgccgccaaccacugcgggaccaucgccaacggcguccugcagaccuucaugcggauggcguggggcggguccuacaucgcccuggacagcggcaagggguccugggacugcaucaugacgagcuaccaguaccucaucauccagaacaccaccugggaggaccacugccaguucucccgccccagccccaucggcuaccuggggcugcucagccagcggacccgcgacaucuacaucucccggcgccugcugggcacguucaccuggacccucagcgacuccgagggcaacgagacccccgggggcuacugccugacgcgguggaugcugaucgaggccgagcucaagugcuucgggaacaccgccguggccaagugcaacgagaagcacgacgaggaguucugcgacaugcugcgccuguucgacuucugcaagcaggcgauccggcgccucaaggccgaggcccagaugagcauccagcugaucaacaaggccgugaacgcccugaucaacgaccagcucaucaugaagaaccaccuccgggacaucaugggcauccccuacugcaacuacuccaaguacugguaccugaaccacaccgucaccgggcgcacgagccugccccggugcuggcugguguccaacggcagcuaccugaacgagacccacuucuccgacgacaucgagcagcaggcggacaacaugaucaccgagcuccugcagaaggaguacaucgaccgccagggcaagaccccgcuggggcugguggaccucuucgucuucagcacguccuucuaccugaucagcaucuuccugcaccucgugaagaucccgacccaccggcacaucaucggcaagcccugccccaagccccaccgccugaaccacauggggaucugcuccugcggccuguacaagcacccgggggugcccgucaaguggaagcggugaggacuaguaauaaggaaacuguaugaaugucugugggcaggaagugaagagauccuucuguaaagguuuuuggaauuaugucugcugaauaauaaacuuuuuugaaauaauaaaucugguagaaaaaugagaucucaaaggcucuuuucagagccaccaaaaaaaaaaaaaaaaaaaaaaaaaaaaaaaaaaaaaaaaaaaaaaaaaaaaaaaaaaaaaaaaagaauu

SEQ ID NO: 37497 - RNA, 1778 nt, Artificial Sequence
  mRNA product Design b-4 (hSL-A64-N5) comprising derived and/or modified sequence from LASV(LASV254-NIG-2011;Clade II)__AIT17674__GPCmut10 (opt1)
aggagagucccgcagucggcguccagcggcucugcuuguucgugugugugucguugcaggccuuauucaagcuuaccaugggccagaucaucaccuucuuccaggaggugccccacgucaucgaggaggugaugaacaucgugcugaucgcccucagccugcuggccauccucaaggggaucuacaacgucgcgaccugcggccuguucgggcugguguccuuccuccugcugugcggccgcagcugcuccacgaccuacaaggggguguacgagcuccagacccuggagcuggacaugaccaaccucaacaugugcaugccgcugagcugcacgaagaacaacucccaccacuacaucauggucggcaacgagaccggccuggagcucacccugaccaacacgagcaucaucaaccacaaguucugcaaccuguccgacgcccacaagaagaaccucuacaaccacgcccugaugagcaucaucuccaccuuccaccugagcauccccaacuucaaccaguacgaggccauguccugcgacuucaacgggggcaagaucagcgugcaguacaaccucucccacagcuacgccguggacgcggccaaccacugcgggaccaucgccaacggcguccugcagaccuucaugcggauggccuggggcggguccuacaucgcgcuggacagcggcaaggggaacugggacugcaucaugacguccuaccaguaccucaucauccagaacaccaccugggaggaccacugccaguucagccgccccucccccaucggcuaccuggggcugcucagccagcggacccgcgacaucuacaucagccggcgccugcugggcacguucaccuggacccucuccgacagcgagggcaacgagacccccgggggcuacugccugacgcgguggaugcugaucgaggccgagcucaagugcuucgggaacaccgccguggccaagugcaacgagaagcacgacgaggaguucugcgacaugcugcgccuguucgacuucugcaagcaggccauccggcgccucaagaccgaggcgcaggccaacauccagcugaucaacaaggccgugaacgcccugaucaacgaccagcucaucaugaagaaccaccuccgggacaucaugggcaucccguacugcaacuacuccaaguacugguaccugaaccacaccgucacggggaagaccagccugccccgcugcuggcugguguccaacggcagcuaccugaacgagacccacuucuccgacgacaucgagcagcaggccgacaacaugaucaccgagcuccugcagaaggaguacauggaccggcagggcaagacgccccuggggcugguggaccucuucgucuucagcaccuccuucuaccugaucagcaucuuccugcaccucgugaagaucccgacccaccgccacgugaucggcaagcccugccccaagccccaccggcugaaccacauggggaucugcuccugcggccuguacaagcacccggggguccccgugaaguggaagcgcugaggacuaguaauaaggaaacuguaugaaugucugugggcaggaagugaagagauccuucuguaaagguuuuuggaauuaugucugcugaauaauaaacuuuuuugaaauaauaaaucugguagaaaaaugagaucucaaaggcucuuuucagagccaccaaaaaaaaaaaaaaaaaaaaaaaaaaaaaaaaaaaaaaaaaaaaaaaaaaaaaaaaaaaaaaaaagaauu

SEQ ID NO: 37498 - RNA, 1778 nt, Artificial Sequence
  mRNA product Design b-4 (hSL-A64-N5) comprising derived and/or modified sequence from LASV(Nig08-A19;Clade III)__ADU56618__GPCmut10 (opt1)
aggagagucccgcagucggcguccagcggcucugcuuguucgugugugugucguugcaggccuuauucaagcuuaccaugggccagaucgugaccuucuuccaggaggucccccacgugaucgaggaggugaugaacaucguccugaucgcccucagcauccuggccauccugaaggggcucuacaacaucgcgaccugcggccugaucgggcuggugacguuccuccugcuguccggccgcagcugcuccaugaccuacaaggggguguacgagcuccagacccuggagcugaacaugaacacccucaacaugugcaugccgcugagcugcacgaagaacaacucccaccacuacaucauggucggcaacgagaccggccuggagcucacccugaccaacacgagccugcuccaccacaaguucugcaaccuguccgacgcccacaagaagaaccuguacgaccacacccucaugagcaucaucuccaccuuccaccugagcauccccaacuucaaccaguacgaggccauguccugcgacuucaacgggggcaagaucaccgugcaguacaaccugagccacuccuacgccaucgacgccgcgaaccacugcgggacgguggccaacggcguccuccagaccuucaugcggauggccuggggcgggagcuacaucgcccuggacuccggccgcgggaagugggacugcaucaugaccagcuaccaguaccugaucauccagaacaccacgugggaggaccacugccaguucucccggcccagccccaucggcuaccucgggcugcugucccagcgcacccgggacaucuacaucagccgccggcuccugggcaccuucaccuggacgcugagcgacuccgagggcaacgagacccccgggggcuacugccucacccgcuggaugcugaucgaggcggagcugaagugcuucgggaacaccgccguggccaagugcaacgagaagcacgacgaggaguucugcgacaugcuccggcuguucgacuucugcaagcaggccauccgccggcugaaggccgaggcgcagaugagcauccagcucaucaacaaggccgugaacgcccugaucaacgaccagcugaucaugaagaaccaccuccgcgacaucaugggcauccccuacugcaacuacuccaaguacugguaccugaaccacacgagcaccgggcggaccucccugccccgcugcuggcucgucagcaacggcuccuaccugaacgagacccacuucagcgacgacaucgagcagcaggccgacaacaugaucacggagaugcugcagaaggaguaccuggaccggcagggcaagaccccgcucgggcugguggaccuguucguguucuccaccagcuucuaccucaucuccaucuuccugcaccuggucaagaucccgacccaccgccacaucgugggcaagcccugccccaagccccaccggcucaaccacauggggaucugcagcugcggccuguacaagcagccgggggugcccguccgcuggaagcggugaggacuaguaauaaggaaacuguaugaaugucugugggcaggaagugaagagauccuucuguaaagguuuuuggaauuaugucugcugaauaauaaacuuuuuugaaauaauaaaucugguagaaaaaugagaucucaaaggcucuuuucagagccaccaaaaaaaaaaaaaaaaaaaaaaaaaaaaaaaaaaaaaaaaaaaaaaaaaaaaaaaaaaaaaaaaagaauu

SEQ ID NO: 37499 - RNA, 1781 nt, Artificial Sequence
  mRNA product Design b-4 (hSL-A64-N5) comprising derived and/or modified sequence from LASV(G1180-SLE-2010;Clade IV)__AIT17168__GPCmut10 (opt1)
aggagagucccgcagucggcguccagcggcucugcuuguucgugugugugucguugcaggccuuauucaagcuuaccaugggccagaucgugaccuucuuccaggaggucccccacgugaucgaggaggugaugaacaucguccugaucgcccucagcauccuggccgugcugaaggggcucuacaacuucgcgaccugcggccugguggggcugcucacguuccugcugcucugcggccgcuccugcaccgccagccgguacaagggggucuacgagcugcagacccuggagcucaacauggagacccugaacaugugcaugccgcuguccugcacgaagaacaacagccaccacuacaucauggugggcaacgagaccggccucgagcugacccugaccaacacguccaucaucaaccacaaguucugcaaccucagcgacgcccacaagaagaaccuguacgaccacgcccugauguccaucaucagcaccuuccaccucuccauccccaacuucaaccaguacgaggccaugagcugcgacuucaacgggggcaagaucuccgugcaguacaaccugagccacuccuacgcgggggacgccgccaaccacugcggcaccgucgccaacggggugcugcagaccuucaugcgcauggcguggggcggcagcuacaucgcccucgacuccgggcacggcagcugggacugcaucaugacguccuaccaguaccugaucauccagaacaccaccugggaggaccacugccaguucagccggcccucccccaucggguaccugggccuccugagccagcgcacccgggacaucuacaucagccgccggcugcucggcacguucaccuggacccuguccgacagcgaggggaaggacaccccgggcggguacugccugacgcgcuggaugcucaucgaggccgagcugaagugcuucggcaacaccgccguggccaagugcaacgagaagcacgacgaggaguucugcgacaugcugcggcuguucgacuucugcaagcaggcgauccagcgccugaaggccgaggcccagauguccauccagcugaucaacaaggccgucaacgcccucaucaacgaccagcugaucaugaagaaccaccuccgggacaucauggggauccccuacugcaacuacagcaaguacugguaccucaaccacaccaccacgggcaagaccucccugcccaagugcuggcuggugagcaacggcuccuaccucaacgagacccacuucagcgacgacaucgagcagcaggcggacaacaugaucaccgagaugcugcagaaggaguacauggagcgccaggggaagacgccccugggccugguggaccucuucgucuucuccaccagcuucuaccugaucuccaucuuccugcaccucgugaagaucccgacccaccggcacaucgugggcaagagcugccccaagccccaccgccugaaccacauggggaucugcuccugcgggcuguacaagcagcccggcgucccggugaaguggaagcggugaggacuaguaauaaggaaacuguaugaaugucugugggcaggaagugaagagauccuucuguaaagguuuuuggaauuaugucugcugaauaauaaacuuuuuugaaauaauaaaucugguagaaaaaugagaucucaaaggcucuuuucagagccaccaaaaaaaaaaaaaaaaaaaaaaaaaaaaaaaaaaaaaaaaaaaaaaaaaaaaaaaaaaaaaaaaagaauu

SEQ ID NO: 37500 - RNA, 1781 nt, Artificial Sequence
  mRNA product Design b-4 (hSL-A64-N5) comprising derived and/or modified sequence from LASV(G1442-SLE-2011;Clade IV)__AIT17180__GPCmut10 (opt1)
aggagagucccgcagucggcguccagcggcucugcuuguucgugugugugucguugcaggccuuauucaagcuuaccaugggccagaucgugaccuucuuccaggaggucccccacgugaucgaggaggugaugaacaucguccugaucgcccucagcauccuggccgugcugaaggggcucuacaacguggcgaccugcggccugaucgggcuggucaccuuccuccugcugugcggccgcuccugcaccaccacccucuacaaggggguguacgagcugcagacgcuggagcucaacauggagacccugaacaugugcaugccgcugagcugcaccaagaacaacucccaccacuacauccgggugggcaacgagaccggccucgagcugacgcugaccaacaccagcaucaucaaccacaaguucugcaaccucuccgacgcccacaagaagaaccuguacgaccacgcccugaugagcaucaucuccaccuuccaccucagcauccccaacuucaaccaguacgaggccauguccugcgacuucaacgggggcaagaucagcguccaguacaaccugucccacagcuacgccggggacgcggccaaccacugcggcacgguggccaacggggugcugcagaccuucaugcgcauggccuggggcggcuccuacaucgcgcucgacagcgggcggggcaacugggacugcaucaugaccuccuaccaguaccugaucauccagaacaccacgugggacgaccacugccaguucagccgccccucccccaucggguaccugggccuccugagccagcggacccgcgacgucuacaucucccggcgccugcucggcaccuucaccuggacgcugagcgacagcgaggggaaggacaccccgggcggguacugccugacccgguggaugcucaucgaggccgagcugaagugcuucggcaacaccgccguggccaagugcaacgagaagcacgacgaggaguucugcgacaugcugcgccucuucgacuucugcaagcaggccauccagcggcugaaggcggaggcccagauguccauccagcugaucaacaaggccgugaacgcccucaucaacgaccagcugaucaugaagaaccaccuccgcgacaucauggggauccccuacugcaacuacagcaaguacugguaccugaacaacacggccaccggcaagaccucccugcccaagugcuggcugaucagcaacggcuccuaccucaacgagacccacuucagcgacgacaucgagcaggaggcggacaacaugaucacggagaugcugcagaaggaguacauggagcggcaggggaagacgccccugggccuggucgaccucuucguguucuccaccagcuucuaccugaucuccaucuuccugcaccucgugaagaucccgacccaccgccacaucgucggcaagagcugccccaagccccaccggcugaaccacauggggaucugcuccugcgggcuguacaagcagcccggcgugccggugcgcuggaagcggugaggacuaguaauaaggaaacuguaugaaugucugugggcaggaagugaagagauccuucuguaaagguuuuuggaauuaugucugcugaauaauaaacuuuuuugaaauaauaaaucugguagaaaaaugagaucucaaaggcucuuuucagagccaccaaaaaaaaaaaaaaaaaaaaaaaaaaaaaaaaaaaaaaaaaaaaaaaaaaaaaaaaaaaaaaaaagaauu

SEQ ID NO: 37501 - RNA, 1781 nt, Artificial Sequence
  mRNA product Design b-4 (hSL-A64-N5) comprising derived and/or modified sequence from LASV(G3010-SLE-2013;Clade IV)__AIT17344__GPCmut10 (opt1)
aggagagucccgcagucggcguccagcggcucugcuuguucgugugugugucguugcaggccuuauucaagcuuaccaugggccagaucgugaccuucuuccaggaggucccccacgugaucgaggaggugaugaacaucguccugaucgcccucagcauccuggccgugcugaaggggcucuacaacuucgcgaccugcggccugguggggcuggucacguuccuccugcugugcggccgcuccugcaccaccagccucuacaaggggguguacgagcugcagacccuggagcucaacauggagacgcugaacaugugcaugccgcuguccugcaccaagaacaacagccaccacuacaucauggugggcaacgagaccggccucgagcugacccugacgaacaccuccaucaucaaccacaaguucugcaaccucagcgacgcccacaagaagaaccuguacaaccacgcccugauguccaucaucagcaccuuccaccucuccauccccaacuucaaccaguacgaggccaugagcugcgacuucaacgggggcaagaucuccguccaguacaaccugagccacuccuacgccggggacgcggccagccacugcggcaccguggccaacggggugcugcagacguucaugcggauggccuggggcggcuccuacaucgcgcucgacagcggguacggcaagugggacugcaucaugaccuccuaccaguaccugaucauccagaacaccaccugggaggaccacugccaguucagccgccccucccccaucggguaccugggccuccugagccagcggacgcgcgacaucuacaucagccggcgccugcucggcaccuucaccuggacccuguccgacagcgaggggaaggacacgccgggcggguacugccugacccgguggaugcucaucgaggccgagcugaagugcuucggcaacaccgccgucgccaagugcaacgagaagcacgacgaggaguucugcgacaugcugcgccucuucgacuucugcaagcaggccauccagcggcugaagaccgaggcgcagauguccauccagcugaucaacaaggccgugaacgcccucaucaacgaccagcugaucaugaagaaccaccuccgcgacaucauggggauccccuacugcaacuacagcaaguacugguaccugaaccacacgaccaccggcaagaccucccugcccaagugcuggcuggugagcaacggcuccuaccucaacgagacgcacuucagcgacgacaucgagcagcaggccgacaacaugaucaccgagaugcugcagaaggaguacauggagcggcaggggaagacgccccugggccuggucgaccucuucguguucuccaccagcuucuaccugaucuccaucuuccugcaccucgugaagaucccgacccaccgccacaucgucggcaagagcugccccaagccccaccggcugaaccacauggggaucugcuccugcgggcuguacaagcagcccggcgugccggugcgcuggaagcggugaggacuaguaauaaggaaacuguaugaaugucugugggcaggaagugaagagauccuucuguaaagguuuuuggaauuaugucugcugaauaauaaacuuuuuugaaauaauaaaucugguagaaaaaugagaucucaaaggcucuuuucagagccaccaaaaaaaaaaaaaaaaaaaaaaaaaaaaaaaaaaaaaaaaaaaaaaaaaaaaaaaaaaaaaaaaagaauu

SEQ ID NO: 37502 - RNA, 1781 nt, Artificial Sequence
  mRNA product Design b-4 (hSL-A64-N5) comprising derived and/or modified sequence from LASV(G502-SLE-2009;Clade IV)__AIT17126__GPCmut10 (opt1)
aggagagucccgcagucggcguccagcggcucugcuuguucgugugugugucguugcaggccuuauucaagcuuaccaugggccagaucgugaccuucuuccaggaggucccccacgugaucgaggaggugaugaacaucguccugaucgcccucagcauccuggccgugcugaaggggcucuacaacuucgcgaccugcggccugguggggcugcucacguuccugcugcucugcggccgcuccugcaccaccgggcuguacaagggcgucuacgagcugcagacccucgagcugaacauggagacgcugaacaugugcaugccgcucagcugcaccaagaacaacucccaccacuacaucauggugggcaacgagaccgggcuggagcugacccucacgaacaccagcaucaucaaccacaaguucugcaaccuguccgacgcccacaagaagaaccuguacgaccacgcccucaugagcaucaucuccaccuuccaccugagcauccccaacuucaaccaguacgaggccauguccugcgacuucaacggcgggaagaucagcgugcaguacaaccugucccacagcuacgccggcgacgcggccgaccacugcgggaccgucgccaacggcgugcuccagacguucaugcggauggccuggggcggguccuacaucgcgcuggacagcggccgcgggcggugggacugcaucaugaccuccuaccaguaccugaucauccagaacaccaccugggaggaccacugccaguucagccgccccucccccaucggcuaccucggccugcugagccagcggacgcgcgacaucuacaucucccggcgccuccuggggaccuucaccuggacccugagcgacagcgagggcaaggacacgcccgggggcuacugccucacccgguggaugcugaucgaggccgagcugaagugcuucgggaacaccgccguggccaagugcaacgagaagcacgacgaggaguucugcgacaugcuccgccuguucgacuucugcaagcaggccauccagcggcugaaggcggaggcccagauguccauccagcucaucaacaaggccgucaacgcccugaucaacgaccagcuggugaugaagaaccaccuccgcgacaucaugggcauccccuacugcaacuacagccgguacugguaccugaaccacaccacgaccggccgcaccucccugcccaagugcuggcucgugagcaacggguccuaccugaacgagacccacuucagcgacgacaucgagcagcaggccgacaacaugaucacggagaugcugcagaaggaguacauggagcggcagggcaagaccccgcuggggcucgucgaccuguucguguucuccaccagcuucuaccugaucuccaucuuccuccaccuggugaagaucccgacccaccgccacaucgucggcaagagcugccccaagccccaccggcugaaccacauggggaucugcuccugcggccucuacaagcagcccggcgugccggugaaguggaagcgcugaggacuaguaauaaggaaacuguaugaaugucugugggcaggaagugaagagauccuucuguaaagguuuuuggaauuaugucugcugaauaauaaacuuuuuugaaauaauaaaucugguagaaaaaugagaucucaaaggcucuuuucagagccaccaaaaaaaaaaaaaaaaaaaaaaaaaaaaaaaaaaaaaaaaaaaaaaaaaaaaaaaaaaaaaaaaagaauu

SEQ ID NO: 37503 - RNA, 1781 nt, Artificial Sequence
  mRNA product Design b-4 (hSL-A64-N5) comprising derived and/or modified sequence from LASV(G733-SLE-2010;Clade IV)__AIT17154__GPCmut10 (opt1)
aggagagucccgcagucggcguccagcggcucugcuuguucgugugugugucguugcaggccuuauucaagcuuaccaugggccagaucgugaccuucuuccaggaggucccccacgugaucgaggaggugaugaacaucguccugaucgcccucagcauccuggccgugcugaaggggcucuacaacuucgcgaccugcggcaucguggggcuggucuccuuccugcuccugugcggccgcagcugcacgaccucccuguacaaggggguguacgagcuccagacccuggagcugaacauggagacccucaacaugugcaugccgcugagcugcacgaagaacaacucccaccacuacaucauggugggcaacgagaccggccuggagcucacccugaccaacacgagcaucaucaaccacaaguucugcaaccuguccgacgcccacaagaagaaccucuacgaccacgcccugaugagcaucaucuccaccuuccaccugagcauccccaacuucaaccaguacgaggccauguccugcgacuucaacgggggcaagaucagcguccaguacaaccucucccacagcuacgccggggacgcggccaaccacugcggcaccaucgccaacggggugcugcagaccuucaugcggauggccuggggcggcuccuacaucgcgcuggacagcgggcgcgaccggugggacugcaucaugacguccuaccaguaccucaucauccagaacaccaccugggaggaccacugccaguucagccgccccucccccaucggcuaccuggggcugcucagccagcggacccgcgacaucuacaucagccggcgccugcugggcacguucaccuggacccucuccgacagcgagggcaaggacacccccgggggcuacugccugacgcgguggaugcugaucgaggccgagcucaagugcuucgggaacaccgccguggccaagugcaacgagaagcacgacgaggaguucugcgacaugcugcgccuguucgacuucugcaagcaggccauccagcggcucaaggcggaggcccagauguccauccagcugaucaacaaggccgucaacgcccugaucaacgaccagcucaucaugaagaaccaccuccgcgacaucaugggcaucccguacugcaacuacagcaaguacugguaccugaaccacaccaccacggggaagaccucccugcccaagugcuggcuggugagcaacggcuccuaccugaacgagacccacuucagcgacgacaucgagcagcaggccgacaacaugaucaccgagaugcuccagaaggaguacauggagcggcagggcaagacgccccuggggcugguggaccuguucgucuucuccaccagcuucuaccucaucuccaucuuccugcaccuggugaagaucccgacccaccgccacguggucggcaagagcugccccaagccccaccggcucaaccacauggggaucugcuccugcggccuguacgggcagcccggcgugccggugaaguggaagcgcugaggacuaguaauaaggaaacuguaugaaugucugugggcaggaagugaagagauccuucuguaaagguuuuuggaauuaugucugcugaauaauaaacuuuuuugaaauaauaaaucugguagaaaaaugagaucucaaaggcucuuuucagagccaccaaaaaaaaaaaaaaaaaaaaaaaaaaaaaaaaaaaaaaaaaaaaaaaaaaaaaaaaaaaaaaaaagaauu

SEQ ID NO: 37504 - RNA, 1781 nt, Artificial Sequence
  mRNA product Design b-4 (hSL-A64-N5) comprising derived and/or modified sequence from MOPV/LASV reassortant(IGS-1;Clade IV)__AFY05576__GPCmut10 (opt1)
aggagagucccgcagucggcguccagcggcucugcuuguucgugugugugucguugcaggccuuauucaagcuuaccaugggccagaucgugaccuucuuccaggaggucccccacgugaucgaggaggugaugaacaucguccugaucgcccucagcgugcuggccgugcugaaggggcucuacaacuucgcgaccugcggccuggucgggcuggugaccuuccuccugcugugcggccgcuccugcaccaccagccucuacaaggggguguacgagcugcagacccuggagcucaacauggagacgcugaacaugugcaugccgcuguccugcaccaagaacaacagccaccacuacaucauggucggcaacgagaccggccucgagcugacccugacgaacaccuccaucaucaaccacaaguucugcaaccucagcgacgcccacaagaagaaccuguacgaccacgcccugauguccaucaucagcaccuuccaccucuccauccccaacuucaaccaguacgaggccaugagcugcgacuucaacgggggcaagaucuccgugcaguacaaccugagccacuccuacgccggggacgcggccaaccacugcggcaccguggccaacgggguccugcagacguucaugcggauggccuggggcggcagcuacaucgcgcucgacuccgggcgcggcaacugggacugcaucaugaccagcuaccaguaccugaucauccagaacaccaccugggaggaccacugccaguucucccggcccagccccaucggguaccugggccuccugucccagcgcacgcgggacaucuacaucagccgccggcugcucggcaccuucaccuggacccugagcgacuccgagggggaggacacgccgggcggguacugccugacccgcuggaugcucaucgaggccgagcugaagugcuucggcaacaccgccguggccaagugcaacgagaagcacgacgaggaguucugcgacaugcugcggcuguucgacuucugcaagcaggccauccagcgccugaaggcggaggcccagaugagcauccagcugaucaacaaggccgugaacgcccucaucaacgaccagcugaucaugaagaaccaccuccgggacaucauggggauccccuacugcaacuacuccaaguacugguaccucaaccacaccacgaccggccgcaccagccugcccaagugcuggcuggucuccaacggcagcuaccucaacgagacccacuucuccgacgacaucgagcagcaggccgacaacaugaucacggagaugcugcagaaggaguacauggagcggcaggggaagacgccccugggccugguggaccucuucguguucagcaccuccuucuaccugaucagcaucuuccugcaccucgucaagaucccgacccaccgccacaucguggggaaguccugccccaagccccaccggcugaaccacaugggcaucugcagcugcgggcuguacaagcagcccggcgugccggucaaguggaagcgcugaggacuaguaauaaggaaacuguaugaaugucugugggcaggaagugaagagauccuucuguaaagguuuuuggaauuaugucugcugaauaauaaacuuuuuugaaauaauaaaucugguagaaaaaugagaucucaaaggcucuuuucagagccaccaaaaaaaaaaaaaaaaaaaaaaaaaaaaaaaaaaaaaaaaaaaaaaaaaaaaaaaaaaaaaaaaagaauu

SEQ ID NO: 37505 - RNA, 1781 nt, Artificial Sequence
  mRNA product Design b-4 (hSL-A64-N5) comprising derived and/or modified sequence from LASV(LM765-SLE-2012;Clade IV)__AIT17814__GPCmut10 (opt1)
aggagagucccgcagucggcguccagcggcucugcuuguucgugugugugucguugcaggccuuauucaagcuuaccaugggccagaucgugaccuucuuccaggaggucccccacgugaucgaggaggugaugaacaucguccugaucgcccucagcauccuggccgugcugaaggggcucuacaacuucgcgaccugcggccugguggggcuggucacguuccuccugcugugcggccgcuccugcaccaccagccucuacaaggggguguacgagcugcagacccuggagcucaacauggagacgcugaacaugugcaugccgcuguccugcaccaagaacaacagccaccacuacaucauggugggcaacgagaccggccucgagcugacccugacgaacaccuccaucaucgaccacaaguucugcaaccucagcgacgcccaccggaagaaccuguacgaccacgcccugauguccaucaucagcaccuuccaccucuccauccccaacuucaaccaguacgaggccaugagcugcgacuucaacgggggcaagaucuccguccaguacaaccugagccacuccuacgccaaggacgcggccgaccacugcgggaccguggccaacggcgugcugcagacguucaugcgcauggccuggggcgggagcuacaucgcgcucgacuccggccgggggcgcugggacugcaucaugaccagcuaccaguaccugaucauccagaacaccaccugggaggaccacugccaguucucccggcccagccccaucggcuaccuggggcuccugucccagcgcacgcgggacaucuacaucagccgccggcugcucggcaccuucaccuggacccugagcgacuccgagggcaaggacacgcccgggggcuacugccugacccgcuggaugcucaucgaggccgagcugaagugcuucgggaacaccgccgucgccaagugcaacgagaagcacgacgaggaguucugcgacaugcugcggcuguucgacuucugcaagcaggccauccagcgccugaaggcggaggcccagaugagcauccagcugaucaacaaggccgugaacgcccucaucaacgaccagcugaucaugaagaaccaccuccgggacaucaugggcauccccuacugcaacuacuccaaguacugguaccucaaccacaccacgaccgggaagaccagccugcccaagugcuggcugguguccaacggcagcuaccucaacgagacccacuucuccgacgacaucgagcagcaggccgacaacaugaucacggagaugcugcagaaggaguacauggagcgccagggcaagaccccgcuggggcuggucgaccucuucguguucagcaccuccuucuaccugaucagcaucuuccugcaccucgugaagaucccgacccaccggcacaucgucggcaagcccugccccaagccccaccgccugaaccacauggggaucugcuccugcggccuguacaagcagccgggggugcccgugaaguggaagcggugaggacuaguaauaaggaaacuguaugaaugucugugggcaggaagugaagagauccuucuguaaagguuuuuggaauuaugucugcugaauaauaaacuuuuuugaaauaauaaaucugguagaaaaaugagaucucaaaggcucuuuucagagccaccaaaaaaaaaaaaaaaaaaaaaaaaaaaaaaaaaaaaaaaaaaaaaaaaaaaaaaaaaaaaaaaaagaauu

SEQ ID NO: 37506 - RNA, 1781 nt, Artificial Sequence
  mRNA product Design b-4 (hSL-A64-N5) comprising derived and/or modified sequence from LASV(LM776-SLE-2012;Clade IV)__AIT17824__GPCmut10 (opt1)
aggagagucccgcagucggcguccagcggcucugcuuguucgugugugugucguugcaggccuuauucaagcuuaccaugggccagaucgugaccuucuuccaggaggucccccacgugaucgaggaggugaugaacaucguccugaucgcccucagcauccuggccgugcugaaggggcucuacaacuucgcgaccugcggccugguggggcuggucaccuuccuccugcugugcggccgcuccugcaccaccagcguguacaaggggguguacgagcuccagacccuggagcugaacauggagacgcucaacaugugcaugccgcuguccugcaccaagaacaacagccaccacuacaucauggucggcaacgagaccggccuggagcucacccugacgaacaccuccaucaucaaccacaaguucugcaaccugagcgacgcccacaagaagaaccucuacgaccacgcccugauguccaucaucagcaccuuccaccuguccauccccaacuucaaccaguacgaggccaugagcugcgacuucaacgggggcaagaucuccgugcaguacaaccucagccacuccuacgccggggacgcggccaaccacugcggcaccguggccaacgggguccugcagacguucaugcggauggccuggggcggcagcuacaucgcgcuggacuccgggcacggcaagugggacugcaucaugaccagcuaccaguaccucaucauccagaacaccaccugggaggaccacugccaguucucccgccccagccccaucggguaccugggccugcucucccagcggacgcgcgacaucuacaucagccggcgccugcugggcaccuucaccuggacccucagcgacuccgaggggaaggacacgccgggcggguacugccugacccgguggaugcugaucgaggccgagcucaagugcuucggcaacaccgccguggccaagugcaacgagaagcacgacgaggaguucugcgacaugcugcgccuguucgacuucugcaagcaggccauccagcggcucaaggcggaggcccagaugagcauccagcugaucaacaaggccgugaacgcccugaucaacgaccagcucaucaugaagaaccaccuccgcgacaucauggggauccccuacugcaacuacuccaaguacugguaccugaaccacaccacgaccggcaagaccagccugcccaagugcuggcuggucuccaacggcagcuaccugaacgagacccacuucuccgacgacaucgagcagcaggccgacaacaugaucacggagaugcuccagaaggaguacauggagcggcaggggaagacgccccugggccugguggaccuguucguguucagcaccuccuucuaccucaucagcaucuuccugcaccuggucaagaucccgacccaccgccacaucguggggaaguccugccccaagccccaccggcucaaccacaugggcaucugcagcugcgggcuguacaagcagcccggcgugccgguccgcuggaagcggugaggacuaguaauaaggaaacuguaugaaugucugugggcaggaagugaagagauccuucuguaaagguuuuuggaauuaugucugcugaauaauaaacuuuuuugaaauaauaaaucugguagaaaaaugagaucucaaaggcucuuuucagagccaccaaaaaaaaaaaaaaaaaaaaaaaaaaaaaaaaaaaaaaaaaaaaaaaaaaaaaaaaaaaaaaaaagaauu

SEQ ID NO: 37507 - RNA, 1781 nt, Artificial Sequence
  mRNA product Design b-4 (hSL-A64-N5) comprising derived and/or modified sequence from LASV(Mad39;Clade IV)__ANH09722__GPCmut10 (opt1)
aggagagucccgcagucggcguccagcggcucugcuuguucgugugugugucguugcaggccuuauucaagcuuaccaugggccagaucgugaccuucuuccaggaggucccccacgugaucgaggaggugaugaacaucguccugaucgcccucagcauccuggccgugcugaaggggcucuacaacguggcgaccugcggccugaucgggcuggucacguuccuccugcugugcggccgcuccugcaccaccacccucuacaaggggguguacgagcugcaggcccuggagcucaacauggagacgcugaacaugugcaugccgcugagcugcaccaagaacaacucccaccacuacauccgggugggcaacgagaccggccucgagcugacccugacgaacaccagccucaucaaccacaaguucugcaaccuguccgacgcccacaagaagaaccuguacgaccacgcccucaugagcaucaucuccaccuuccaccugagcauccccaacuucaaccaguacgaggccauguccugcgacuucaacgacgggaagaucagcguccaguacaaccugucccacaccuacgcgggcgacacggccaaccacugcgggaccguggccaacggcgugcuccagaccuucaugcgcauggccuggggcgggagcuacaucgcgcuggacuccggccgcgggggcugggacugcaucaugaccagcuaccaguaccugaucauccagaacacgaccugggaggaccacugccaguucucccggcccagccccaucggguaccucggccugcugucccagcggacccgcgacaucuacaucagccggcgccuccugggcaccuucacguggacccuguccgacagcgaggggaaggacaccccgggcggguacugccucacccgguggaugcugaucgaggccgagcugaagugcuucggcaacacggccgucgccaagugcaacgagaagcacgacgaggaguucugcgacaugcuccgccuguucgacuucugcaagcaggccauccagcggcugaaggcggaggcccagaugagcauccagcucaucaacaaggccgugaacgcccugaucaacgaccagcugaucaugaagaaccaccuccgcgacaucauggggauccccuacugcaacuacuccaaguacugguaccugaaccacaccgugaccggcaagaccagccugcccaagugcuggcucgucuccaacggcagcuaccugaacgagacgcacuucuccgacgacaucgagcagcaggccgacaacaugaucaccgagaugcugcagaaggaguacauggagcggcaggggaagacgccccugggccucguggaccuguucguguucagcaccuccuucuaccugaucagcaucuuccuccaccuggucaagaucccgacccaccgccacgugguggggaagcccugccccaagccccaccggcugaaccacaugggcaucugcuccugcggguucuacaagcagccgggcguccccgugcgcuggaagcggugaggacuaguaauaaggaaacuguaugaaugucugugggcaggaagugaagagauccuucuguaaagguuuuuggaauuaugucugcugaauaauaaacuuuuuugaaauaauaaaucugguagaaaaaugagaucucaaaggcucuuuucagagccaccaaaaaaaaaaaaaaaaaaaaaaaaaaaaaaaaaaaaaaaaaaaaaaaaaaaaaaaaaaaaaaaaagaauu

SEQ ID NO: 37508 - RNA, 1781 nt, Artificial Sequence
  mRNA product Design b-4 (hSL-A64-N5) comprising derived and/or modified sequence from LASV(Z0947-SLE-2011;Clade IV)__AIT17840__GPCmut10 (opt1)
aggagagucccgcagucggcguccagcggcucugcuuguucgugugugugucguugcaggccuuauucaagcuuaccaugggccagaucgugaccuucuuccaggaggucccccacgugaucgaggaggugaugaacaucguccugaucgcccucagcauccuggccgugcugaaggggcucuacaacuucgcgaccugcggccugguggggcuggucacguuccuccugcugugcggccgcuccugcaccaucagccucuacaaggggguguacgagcugcagacccuggagcucaacauggagacccugaacaugugcaugccgcuguccugcacgaagaacaacagccaccacuacaucauggugggcaacgagaccggccucgagcugacccugaccaacacguccaucaucaaccacaaguucugcaaccucagcgacgcccacaagaagaaccuguacgaccacgcccugauguccaucaucagcaccuuccaccucuccauccccaacuucaaccaguacgaggccaugagcugcgacuucaacgggggcaagaucuccguccaguacaaccugagccacuccuacgccggggacgcggccaaccacugcggcaccguggccaacggggugcugcagaccuucaugcggauggccuggggcggcagcuacaucgcgcucgacuccgggcgcgaccggugggacugcaucaugacgagcuaccaguaccugaucauccagaacaccaccugggaggaccacugccaguucucccgccccagccccaucggcuaccuggggcuccugucccagcggacccgcgacaucuacaucagccggcgccugcucggcacguucaccuggacccugagcgacuccgagggcaaggacacccccgggggcuacugccugacgcgguggaugcucaucgaggccgagcugaagugcuucgggaacaccgccgucgccaagugcaacgagaagcacgacgaggaguucugcgacaugcugcgccucuucgacuucugcaagcaggccauccagcggcugaaggcggaggcccagaugagcauccagcugaucaacaaggccgugaacgcccucaucaacgaccagcugaucaugaagaaccaccuccgcgacaucaugggcaucccguacugcaacuacuccaaguacugguaccugaaccacaccaccacggggaagaccagccugcccaagugcuggcugguguccaacggcagcuaccucaacgagacccacuucuccgacgacaucgagcagcaggccgacaacaugaucaccgagaugcugcagaaggaguacauggagcggcagggcaagacgccccuggggcuggucgaccucuucguguucagcaccuccuucuaccugaucagcaucuuccugcaccucgugaagaucccgacccaccgccacaucgucggcaagcccugccccaagccccaccggcugaaccacauggggaucugcuccugcggccuguacaagcagccgggggugcccgugaaguggaagcgcugaggacuaguaauaaggaaacuguaugaaugucugugggcaggaagugaagagauccuucuguaaagguuuuuggaauuaugucugcugaauaauaaacuuuuuugaaauaauaaaucugguagaaaaaugagaucucaaaggcucuuuucagagccaccaaaaaaaaaaaaaaaaaaaaaaaaaaaaaaaaaaaaaaaaaaaaaaaaaaaaaaaaaaaaaaaaagaauu

SEQ ID NO: 37509 - RNA, 1781 nt, Artificial Sequence
  mRNA product Design b-4 (hSL-A64-N5) comprising derived and/or modified sequence from LASV(Josiah;Clade IV)__NP_694870__GPCmut10 (opt4)
aggagagucccgcagucggcguccagcggcucugcuuguucgugugugugucguugcaggccuuauucaagcuuaccaugggccagaucgugaccuucuuccaggaggugccccacgugaucgaggaggugaugaacaucgugcugaucgcccugagcgugcuggccgugcugaagggccuguacaacuucgccaccugcggccuggugggccuggugaccuuccugcugcugugcggcagaagcugcaccaccagccuguacaagggcguguacgagcugcagacccuggagcugaacauggagacccugaacaugugcaugccccugagcugcaccaagaacaacagccaccacuacaucauggugggcaacgagaccggccuggagcugacccugaccaacaccagcaucaucaaccacaaguucugcaaccugagcgacgcccacaagaagaaccuguacgaccacgcccugaugagcaucaucagcaccuuccaccugagcauccccaacuucaaccaguacgaggccaugagcugcgacuucaacggcggcaagaucagcgugcaguacaaccugagccacagcuacgccggcgacgccgccaaccacugcggcaccguggccaacggcgugcugcagaccuucaugagaauggccuggggcggcagcuacaucgcccuggacagcggcagaggcaacugggacugcaucaugaccagcuaccaguaccugaucauccagaacaccaccugggaggaccacugccaguucagcagacccagccccaucggcuaccugggccugcugagccagagaaccagagacaucuacaucagcagaagacugcugggcaccuucaccuggacccugagcgacagcgagggcaaggacacccccggcggcuacugccugaccagauggaugcugaucgaggccgagcugaagugcuucggcaacaccgccguggccaagugcaacgagaagcacgacgaggaguucugcgacaugcugagacuguucgacuucugcaagcaggccauccagagacugaaggccgaggcccagaugagcauccagcugaucaacaaggccgugaacgcccugaucaacgaccagcugaucaugaagaaccaccugagagacaucaugggcauccccuacugcaacuacagcaaguacugguaccugaaccacaccaccaccggcagaaccagccugcccaagugcuggcuggugagcaacggcagcuaccugaacgagacccacuucagcgacgacaucgagcagcaggccgacaacaugaucaccgagaugcugcagaaggaguacauggagagacagggcaagaccccccugggccugguggaccuguucguguucagcaccagcuucuaccugaucagcaucuuccugcaccuggugaagauccccacccacagacacaucgugggcaagagcugccccaagccccacagacugaaccacaugggcaucugcagcugcggccuguacaagcagcccggcgugcccgugaaguggaagagaugaggacuaguaauaaggaaacuguaugaaugucugugggcaggaagugaagagauccuucuguaaagguuuuuggaauuaugucugcugaauaauaaacuuuuuugaaauaauaaaucugguagaaaaaugagaucucaaaggcucuuuucagagccaccaaaaaaaaaaaaaaaaaaaaaaaaaaaaaaaaaaaaaaaaaaaaaaaaaaaaaaaaaaaaaaaaagaauu

SEQ ID NO: 37510 - RNA, 1778 nt, Artificial Sequence
  mRNA product Design b-4 (hSL-A64-N5) comprising derived and/or modified sequence from LASV(LP;Clade I)__AAF86701__GPCmut10 (opt4)
aggagagucccgcagucggcguccagcggcucugcuuguucgugugugugucguugcaggccuuauucaagcuuaccaugggccagaucaucaccuucuuccaggaggugccccacgugaucgaggaggugaugaacaucgugcugaucgcccugagccugcuggccauccugaagggccuguacaacaucgccaccugcggcaucaucggccugguggccuuccuguuccugugcggcaagagcugcagccugacccugaagggcggcuacgagcugcagacccuggagcugaacauggagacccugaacaugugcaugccccugagcugcaccaagaacagcagccaccacuacaucagagugggcaacgagaccggccuggagcugacccugaccaacaccagcaucaucaaccacaaguucugcaaccugagcgacgcccacaagaagaaccuguacgaccacgcccugaugagcaucaucagcaccuuccaccugagcauccccaacuucaaccaguacgaggccaugagcugcgacuucaacggcggcaagaucagcgugcaguacaaccugagccacagcuacgccggcgacgccgccgagcacugcggcaccguggccaacggcgugcugcagaccuucaugagaauggccuggggcggcagauacaucgcccuggacagcggcaagggcaacugggacugcaucaugaccagcuaccaguaccugaucauccagaacaccaccugggaggaccacugccaguucagcagacccagccccaucggcuaccugggccugcugagccagagaaccagagacaucuacaucagcagaagacugcugggcaccuucaccuggacccugagcgacagcgagggcaacgagacccccggcggcuacugccugaccagauggaugcugaucgaggccgagcugaagugcuucggcaacaccgccguggccaagugcaacgagaagcacgacgaggaguucugcgacaugcugagacuguucgacuucugcaagcaggccaucagaagacugaaggccgaggcccagaugagcauccagcugaucaacaaggccgugaacgcccugaucaacgaccagcugaucaugaagaaccaccugagagacaucaugggcauccccuacugcaacuacagcaaguacugguaccugaaccacaccagcagcggcagaaccagccugcccaagugcuggcugaucagcaacggcagcuaccugaacgagacccaguucagcgacgacaucgagcagcaggccgacaacaugaucaccgagaugcugcagaaggaguacaucgagagacagggcaagaccccccugggccugguggacaucuucaucuucagcaccagcuucuaccugaucagcaucuuccugcaccugaucaagauccccacccacagacacaucgugggcaagcccugccccaagccccacagacugaaccacaugggcgugugcagcugcggccuguacaagcaccccggcgugcccaccaaguggaagagaugaggacuaguaauaaggaaacuguaugaaugucugugggcaggaagugaagagauccuucuguaaagguuuuuggaauuaugucugcugaauaauaaacuuuuuugaaauaauaaaucugguagaaaaaugagaucucaaaggcucuuuucagagccaccaaaaaaaaaaaaaaaaaaaaaaaaaaaaaaaaaaaaaaaaaaaaaaaaaaaaaaaaaaaaaaaaagaauu

SEQ ID NO: 37511 - RNA, 1778 nt, Artificial Sequence
  mRNA product Design b-4 (hSL-A64-N5) comprising derived and/or modified sequence from LASV(803213;Clade II)__AAF86703__GPCmut10 (opt4)
aggagagucccgcagucggcguccagcggcucugcuuguucgugugugugucguugcaggccuuauucaagcuuaccaugggccagaucaucaccuucuuccaggaggugccccacgugaucgaggaggugaugaacaucgugcugaucgcccugagccugcuggccauccugaagggcaucuacaacguggccaccugcggccuguucggccugaucagcuuccugcugcugugcggcagaagcugcagcgugaccuacaagggcguguacgagcugcagacccuggagcugaacauggccaaccugaacaugugcaugccccugagcugcaccaagaacaacagccaccacuacaucauggugggcaacgagaccggccuggagcugacccugaccaacaccagcaucaucaaccacaaguucugcaaccugagcgacgcccacaagaagaaccuguacgaccacgcccugaugagcaucaucagcaccuuccaccugagcauccccaacuucaaccaguacgaggccaugagcugcgacuucaacggcggcaagaucagcgugcaguacaaccugagccacagcuucgccguggacgccgccaaccacugcggcaccaucgccaacggcgugcugcagaccuucaugagaauggccuggggcggcagcuacaucgcccuggacagcggcaagggcaacugggacugcaucaugaccagcuaccaguaccugaucauccagaacaccaccugggaggaccacugccaguucagcagacccagccccaucggcuaccugggccugcugagccagagaaccagagacaucuacaucagcagaagacugcugggcaccuucaccuggacccugagcgacagcgagggcaacgaggcccccggcggcuacugccugaccagauggaugcugaucgaggccgagcugaagugcuucggcaacaccgccguggccaagugcaacgagaagcacgacgaggaguucugcgacaugcugagacuguucgacuucugcaagcaggccaucaagagacugaagaccgaggcccagaugagcauccagcugaucaacaaggccgugaacgcccugaucaacgaccagcugaucaugaagaaccaccugagagacaucaugggcauccccuacugcaacuacagcagauacugguaccugaaccacaccgugaccggcaagaccagccugcccagaugcuggcuggugagcaacggcagcuaccugaacgagacccacuucagcgacgacaucgagcagcaggccgacaacaugaucaccgagaugcugcagaaggaguacauggacagacagggcaagaccccccugggccugguggaccuguucguguucagcaccagcuucuaccugaucagcaucuuccugcaccuggugaagauccccacccacagacacaucgugggcaagcccugccccaagccccacagacugaaccacaugggcaucugcagcugcggccuguacaagcaccccggcgugcccgugaaguggaagagaugaggacuaguaauaaggaaacuguaugaaugucugugggcaggaagugaagagauccuucuguaaagguuuuuggaauuaugucugcugaauaauaaacuuuuuugaaauaauaaaucugguagaaaaaugagaucucaaaggcucuuuucagagccaccaaaaaaaaaaaaaaaaaaaaaaaaaaaaaaaaaaaaaaaaaaaaaaaaaaaaaaaaaaaaaaaaagaauu

SEQ ID NO: 37512 - RNA, 1778 nt, Artificial Sequence
  mRNA product Design b-4 (hSL-A64-N5) comprising derived and/or modified sequence from LASV(GA391;Clade III)__CAA36645__GPCmut10 (opt4)
aggagagucccgcagucggcguccagcggcucugcuuguucgugugugugucguugcaggccuuauucaagcuuaccaugggccagaucgugaccuucuuccaggaggugccccacgugaucgaggaggugaugaacaucgugcugaucgcccugagcauccuggccauccugaagggccuguacaacguggccaccugcggccugaucggccuggugaccuuccugcugcugagcggcagaagcugcagccugaucuacaagggcaccuacgagcugcagacccuggagcugaacauggagacccugaacaugugcaugccccugagcugcaccaagaacaacagccaccacuacaucagagugggcaacgagaccggccuggagcugacccugaccaacaccagcauccugaaccacaaguucugcaaccugagcgacgcccacaagagaaaccuguacgaccacagccugaugagcaucaucagcaccuuccaccugagcauccccaacuucaaccaguacgaggccaugagcugcgacuucaacggcggcaagaucaccgugcaguacaaccugagccacagcuucgccguggacgccgccggccacugcggcacccuggccaacggcgugcugcagaccuucaugagaauggccuggggcggcagcuacaucgcccuggacagcggcagaggcaacugggacugcaucaugaccagcuaccaguaccugaucauccagaacaccaccugggacgaccacugccaguucagcagacccagccccaucggcuaccugggccugcugagccagagaaccagagacaucuacaucagcagaagacugcugggcaccuucaccuggacccugagcgacagcgagggcaacgagacccccggcggcuacugccugaccagauggaugcugaucgaggccgagcugaagugcuucggcaacaccgccguggccaagugcaacgagaagcacgacgaggaguucugcgacaugcugagacuguucgacuucugcaagcaggccaucagaagacugaagaccgaggcccagaugagcauccagcugaucaacaaggccgugaacgcccugaucaacgaccagcugaucaugaagaaccaccugagagacaucaugggcauccccuacugcaacuacagcagauacugguaccugaaccacaccagcaccggcaagaccagccugcccagaugcuggcugaucagcaacggcagcuaccugaacgagaccaaguucagcgacgacaucgagcagcaggccgacaacaugaucaccgagaugcugcagaaggaguacaucgacagacagggcaagaccccccugggccugguggaccuguucguguucagcaccagcuucuaccugaucagcaucuuccugcaccuggugaagauccccacccacagacacaucgugggcaagcccugccccaagccccacagacugaaccacaugggcaucugcagcugcggccuguacaagcagcccggcgugcccgugagauggaagagaugaggacuaguaauaaggaaacuguaugaaugucugugggcaggaagugaagagauccuucuguaaagguuuuuggaauuaugucugcugaauaauaaacuuuuuugaaauaauaaaucugguagaaaaaugagaucucaaaggcucuuuucagagccaccaaaaaaaaaaaaaaaaaaaaaaaaaaaaaaaaaaaaaaaaaaaaaaaaaaaaaaaaaaaaaaaaagaauu

SEQ ID NO: 37513 - RNA, 1781 nt, Artificial Sequence
  mRNA product Design b-4 (hSL-A64-N5) comprising derived and/or modified sequence from LASV(AV;Clade V)__CCA30314__GPCmut10 (opt4)
aggagagucccgcagucggcguccagcggcucugcuuguucgugugugugucguugcaggccuuauucaagcuuaccaugggccagaucgugaccuucuuccaggaggugccccacgugaucgaggaggugaugaacaucgugcugaucgcccugagcauccuggccgugcugaagggccuguacaacaucgccaccugcggccugaucggccugaucaccuuccugcugcugugcggcagaagcugcagcagcaaccuguacaagggcguguacgagcugcagagccuggaccugaacauggagacccugaacaugugcaugccccugagcugcaccaagaacaacagccaccacuacaucagagugggcaacgacaccggccuggagcugacccugaccaacaccagcauccugaaccacaaguucugcaaccugagcgacgcccacaagaaggaccuguacgaccacgcccugaugagcaucaucagcaccuuccaccugagcauccccaacuucaaccaguacgaggccaugagcugcgacuucaacggcggcaagaucagcgugcaguacaaccugagccacagcuacgccaucgacgccgccaaccacugcggcaccguggccaacggcauccugcagaccuucaugagaauggccuggggcggcagcuacaucgcccuggacagcggcagaggcaacugggacugcaucaugaccagcuaccaguaccugaucauccagaacaccaccugggagaaccacugccaguucagcagacccagccccaucggcuaccugggccugcugagccagagaaccagagacaucuacaucagcagaagacugcugggcaccuucaccuggacccugagcgacagcgagggcaacgccacccccggcggcuacugccugaccagauggaugcugaucgaggccgagcugaagugcuucggcaacaccgccguggccaagugcaacgagaagcacgacgaggaguucugcgacaugcugagacuguucgacuucugcaagcaggccaucagcagacugaagagcgaggcccagaugagcauccagcugaucaacaaggccgugaacgcccugaucaacgaccagcugaucaugaagaaccaccugagagacaucaugggcauccccuacugcaacuacagcaaguacugguaccugaaccacaccaucaccggcaagaccagccugcccaagugcuggcuggugagcaacggcagcuaccugaacgagacccacuucagcgacgacaucgagcagcaggccgacaacaugaucaccgagaugcugcagaaggaguacauggagagacagggcaagaccccccugggccugguggaccuguucguguucagcaccagcuucuaccugaucagcaucuuccugagacuggugaagauccccacccacagacacaucgugggcaagcccugccccaagccccacagacugaaccacaugggcaucugcagcugcggccuguacaagcagcccggcgugcccgugagauggaagagaugaggacuaguaauaaggaaacuguaugaaugucugugggcaggaagugaagagauccuucuguaaagguuuuuggaauuaugucugcugaauaauaaacuuuuuugaaauaauaaaucugguagaaaaaugagaucucaaaggcucuuuucagagccaccaaaaaaaaaaaaaaaaaaaaaaaaaaaaaaaaaaaaaaaaaaaaaaaaaaaaaaaaaaaaaaaaagaauu

SEQ ID NO: 37514 - RNA, 1778 nt, Artificial Sequence
  mRNA product Design b-4 (hSL-A64-N5) comprising derived and/or modified sequence from LASV(Togo/2016/7082;Clade VI)__AMR44577__GPCmut10 (opt4)
aggagagucccgcagucggcguccagcggcucugcuuguucgugugugugucguugcaggccuuauucaagcuuaccaugggccagaucaucaccuucuuccaggaggugccccacgugaucgaggaggugaugaacaucgugcugaucgcccugagccugcuggccauccugaagggcguguacaacguggccaccugcggcaucaucggccuggugaccuuccuguuccugugcggcagaagcugcagccugaucuacaagggcagcuacgagcugcagacccuggagcugaacauggagacccugaacaugugcaugccccugagcugcaccaagaacagcagccaccacuacaucagagugggcaacgagaccggccuggagcugacccugaccaacaccagcaucaucaaccacaaguucugcaaccugagcgacgcccacaagagaaaccuguacgaccacgcccugaugagcauccugagcaccuuccaccugagcauccccaacuucaaccaguacgaggccaugagcugcgacuucaacggcggcaagaucagcgugcaguacaaccugagccacgccuacgccguggacgccgccgagcacugcggcaccguggccaacggcgugcugcagaccuucaugagaauggccuggggcggcagcuacaucgcccuggacagcggcagaggcaacugggacugcaucaugaccagcuaccaguaccugaucauccagaacaccaccugggaggaccacugccaguucagcagacccagccccaucggcuaccugggccugcugagccagagaaccagagacaucuacaucagcagaagacugcugggcaccuucaccuggacccugagcgacagcgagggcaacgagacccccggcggcuacugccugaccagauggaugcugaucgaggccgagcugaagugcuucggcaacaccgccguggccaagugcaacgagaagcacgacgaggaguucugcgacaugcugagacuguucgacuucugcaagcaggccauccagagacugaagagcgaggcccagaugagcauccagcugaucaacaaggccgugaacgcccugaucaacgaccagcugaucaugaagaaccaccugagagacaugaugggcauccccuacugcaacuacagcaaguacugguaccugaaccacaccagcagcggcagaaccagccugcccaagugcuggcuggugagcaacggcagcuaccugaacgagacccacuucagcgacgacaucgagcagcaggccgacaacaugaucaccgagaugcugcagaaggaguacaucgacagacagggcaagaccccccugggccugguggaccuguucguguucagcaccagcuucuaccugaucagcaucuuccugcaccugaucaagauccccacccacagacacaucgugggcaagcccugccccaagccccacagacugaaccacaugggcaucugcagcugcggccuguacaagcagcccggcgugcccaccagauggaagagaugaggacuaguaauaaggaaacuguaugaaugucugugggcaggaagugaagagauccuucuguaaagguuuuuggaauuaugucugcugaauaauaaacuuuuuugaaauaauaaaucugguagaaaaaugagaucucaaaggcucuuuucagagccaccaaaaaaaaaaaaaaaaaaaaaaaaaaaaaaaaaaaaaaaaaaaaaaaaaaaaaaaaaaaaaaaaagaauu

SEQ ID NO: 37515 - RNA, 1778 nt, Artificial Sequence
  mRNA product Design b-4 (hSL-A64-N5) comprising derived and/or modified sequence from LASV(KAK-428;Clade n.d. (VII))__ANH09740__GPCmut10 (opt4)
aggagagucccgcagucggcguccagcggcucugcuuguucgugugugugucguugcaggccuuauucaagcuuaccaugggccagaucgugaccuucuuccaggaggugccccacgugaucgaggaggugaugaacaucgugcugaucgcccugagccugcuggccauccugaagggccuguacaacuucgccaccugcggcgugaucggccugaucaccuuccugcugcugugcggcagaagcugcagcgccaccuacaagggccaguacgagcugcagacccuggagcugaacauggagagccugaacaugugcaugccccugagcugcaccaagaacaacagccaccacuacaucagagccggcaacaacaccggccuggagcugacccugaccaacaccagcaucaucagccacaaguucugcaaccugagcgacgcccacaagaagaaccuguacgaccacacccugaugagcaucaucaccaccuuccaccugagcauccccaacuucaaccaguacgaggccaugagcugcgacuucaacggcggcaagaucagcauccaguacaaccugagccacagcuacgccggcgacgccgcccagcacugcggcaccguggccaacggcgugcugcagaccuucaugagaauggccuggggcggcagcuaccuggcccuggacagcggcagaagaggcugggacugcaucaucagcagcuaccaguaccugaucauccagaacaccaccugggacgaccacugccaguucagcagacccagccccaucggcuaccugggcuucgugagccagaagaccagagacaucuacaucagcagaagacugcugggcaccuucaccuggacccugagcgacagcgagggccacgacaugcccggcggcuacugccugaccagauggaugcugaucgaggccgaccugaagugcuucggcaacaccgccguggccaagugcaacgagaagcacgacgaggaguucugcgacauguggagacuguucgacuucugcaagcaggccauccagagacugaaggccgaggcccagaugaacauccagcugaucaacaaggccgugaacgcccugaucaacgaccagcugaugaugaagaaccaccugagagacaucaugggcauccccuacugcaacuacagcaaguucugguaccugaacaacaccaccaccggcagaaccagccugcccagaugcuggcugaucagcaacggcagcuaccugaacgagacccacuucagcgacgacaucgagcagcaggccgacaacaugaucaccgagaugcugcagaaggaguacauggacagacagggcaagaccccccugggccugguggaccuguucguguucagcaccagcuucuaccugaucaccaucuuccugcaccuggugaagauccccacccacagacacaucgugggcaagcccugccccaagccccacagacugaaccacaugggcaucugcagcugcggccuguacaagcagcccggcgugcccgugagauggaagagaugaggacuaguaauaaggaaacuguaugaaugucugugggcaggaagugaagagauccuucuguaaagguuuuuggaauuaugucugcugaauaauaaacuuuuuugaaauaauaaaucugguagaaaaaugagaucucaaaggcucuuuucagagccaccaaaaaaaaaaaaaaaaaaaaaaaaaaaaaaaaaaaaaaaaaaaaaaaaaaaaaaaaaaaaaaaaagaauu

SEQ ID NO: 37516 - RNA, 1778 nt, Artificial Sequence; identical to SEQ ID NO: 37510
  mRNA product Design b-4 (hSL-A64-N5) comprising derived and/or modified sequence from LASV(Pinneo-NIG-1969;Clade I)__AIT17836__GPCmut10 (opt4)

SEQ ID NO: 37517 - RNA, 1778 nt, Artificial Sequence
  mRNA product Design b-4 (hSL-A64-N5) comprising derived and/or modified sequence from LASV(ISTH0009-NIG-2011;Clade II)__AIT17404__GPCmut10 (opt4)
aggagagucccgcagucggcguccagcggcucugcuuguucgugugugugucguugcaggccuuauucaagcuuaccaugggccagaucaucaccuucuuccaggaggugccccacgugaucgaggaggugaugaacaucgugcugaucgcccugagccugcuggccauccugaagggcaucuacaacguggccaccugcggccuguucggccuggugagcuuccugcugcugugcggcagaagcugcagcaccaccuacaagggcguguacgagcugcagacccuggagcuggacauggccagccugaacaugugcaugccccugagcugcaccaagaacaacagccaccacuacaucauggugggcaacgagaccggccuggagcugacccugaccaacaccagcaucaucaaccacaaguucugcaaccugagcgacgcccacaagaagaaccuguacgaccacgcccugaugagcaucaucagcaccuuccaccugagcauccccaacuucaaccaguacgaggccaugagcugcgacuucaacggcggcaagaucagcgugcaguacaaccugagccacgccuacgccguggacgccgccaaccacugcggcaccaucgccaacggcgugcugcagaccuucaugagaauggccuggggcggcagcuacaucgcccuggacagcggcaagggcagcugggacugcaucaugaccagcuaccaguaccugaucauccagaacaccaccugggaggaccacugccaguucagcagacccagccccaucggcuaccugggccugcugagccagagaaccagagacaucuacaucagcagaagacugcugggcaccuucaccuggacccugagcgacagcgagggcaacgagacccccggcggcuacugccugaccagauggaugcugaucgaggccgagcugaagugcuucggcaacaccgccguggccaagugcaacgagaagcacgacgaggaguucugcgacaugcugagacuguucgacuucugcaagcaggccaucagaagacugaagaccgaggcccagaugagcauccagcugaucaacaaggccgugaacgcccugaucaacgaccagcugaucaugaagaaccaccugagagacaucaugggcauccccuacugcaacuacagcaaguacugguaccugaaccacaccgugaccggcaagaccagccugcccagaugcuggcuggugagcaacggcagcuaccugaacgagacccacuucagcgacgacaucgagcagcaggccgacaacaugaucaccgagcugcugcagaaggaguacauggacagacagggcaagaccccccugggccugguggaccuguucguguucagcaccagcuucuaccugaucagcaucuuccugcaccugaucaagauccccacccacagacacaucaccggcaagcccugccccaagccccacagacugaaccacaugggcaucugcagcugcggccuguacaagcaccccggcgugcccgugaaguggaagagaugaggacuaguaauaaggaaacuguaugaaugucugugggcaggaagugaagagauccuucuguaaagguuuuuggaauuaugucugcugaauaauaaacuuuuuugaaauaauaaaucugguagaaaaaugagaucucaaaggcucuuuucagagccaccaaaaaaaaaaaaaaaaaaaaaaaaaaaaaaaaaaaaaaaaaaaaaaaaaaaaaaaaaaaaaaaaagaauu

SEQ ID NO: 37518 - RNA, 1778 nt, Artificial Sequence
  mRNA product Design b-4 (hSL-A64-N5) comprising derived and/or modified sequence from LASV(ISTH2010-NIG-2012;Clade II)__AIT17482__GPCmut10 (opt4)
aggagagucccgcagucggcguccagcggcucugcuuguucgugugugugucguugcaggccuuauucaagcuuaccaugggccagaucaucaccuucuuccaggaggugccccacgugaucgaggaggugaugaacaucgugcugaucgcccugagccugcuggccauccugaagggcaucuacaacguggccaccugcggccuguucggccuggugagcuuccugcugcugugcggcagaagcugcagcaccaccuacaagggcguguacgagcugcagacccuggagcuggacauggccagccugaacaugugcaugccccugagcugcaccaagaacaacagccaccacuacaucauggugggcaacgagaccggccuggagcugacccugaccaacaccagcaucaucaaccacaaguucugcaaccugagcgacgcccacaagaagaaccuguacgaccacgcccugaugagcaucaucagcaccuuccaccugagcauccccaacuucaaccaguacgaggccaugagcugcgacuucaacggcggcaagaucagcgugcaguacaaccugagccacgccuacgccguggacgccgccaaccacugcggcaccaucgccaacggcgugcugcagaccuucaugagaauggccuggggcggcagcuacaucgcccuggacagcggcaagggcagcugggacugcaucaugaccagcuaccaguaccugaucauccagaacaucaccugggaggaccacugccaguucagcagacccagccccaucggcuaccugggccugcugagccagagaaccagagacaucuacaucagcagaagacugcugggcaccuucaccuggacccugagcgacagcgagggcaacgagacccccggcggcuacugccugaccagauggaugcugaucgaggccgagcugaagugcuucggcaacaccgccguggccaagugcaacgagaagcacgacgaggaguucugcgacaugcugagacuguucgacuucugcaagcaggccaucagaagacugaagaccgaggcccagaugagcauccagcugaucaacaaggccgugaacgcccugaucaacgaccagcugaucaugaagaaccaccugagagacaucaugggcauccccuacugcaacuacagcaaguacugguaccugaaccacaccgugaccggcaagaccagccugcccagaugcuggcuggugagcaacggcagcuaccugaacgagacccacuucagcgacgacaucgagcagcaggccgacaacaugaucaccgagcugcugcagaaggaguacaucgacagacagggcaagaccccccugggccugguggaccuguucguguucagcaccagcuucuaccugaucagcaucuuccugcaccuggugaagauccccacccacagacacguggugggcaagcccugccccaagccccacagacugaaccacaugggcaucugcagcugcggccuguacaagcaccccggcgugcccgugaaguggaagagaugaggacuaguaauaaggaaacuguaugaaugucugugggcaggaagugaagagauccuucuguaaagguuuuuggaauuaugucugcugaauaauaaacuuuuuugaaauaauaaaucugguagaaaaaugagaucucaaaggcucuuuucagagccaccaaaaaaaaaaaaaaaaaaaaaaaaaaaaaaaaaaaaaaaaaaaaaaaaaaaaaaaaaaaaaaaaagaauu

SEQ ID NO: 37519 - RNA, 1778 nt, Artificial Sequence
  mRNA product Design b-4 (hSL-A64-N5) comprising derived and/or modified sequence from LASV(Lassa virus/H.sapiens-wt/NGA/2015/ISTH_0543;Clade II)__AVO03639__GPCmut10 (opt4)
aggagagucccgcagucggcguccagcggcucugcuuguucgugugugugucguugcaggccuuauucaagcuuaccaugggccagaucaucaccuucuuccaggaggugccccacgugaucgaggaggugaugaacaucgugcugaucgcccugagccugcuggccauccugaagggcaucuacaacguggccaccugcggccuguucggccuggugagcuuccugcugcugugcggcagaagcugcagcaccaccuacaagggcguguacgagcugcagacccuggagcuggacauggccaaccugaacaugugcaugccccugagcugcaccaagaacaacagccaccacuacaucauggugggcaacgagaccggccuggagcugacccugaccaacaccagcaucaucaaccacaaguucugcaaccugagcgacgcccacaagaagaaccuguacgaccacgcccugaugagcaucaucagcaccuuccaccugagcauccccaacuucaaccaguacgaggccaugagcugcgacuucaacggcggcaagaucagcgugcaguacaaccugagccacaccuacgccguggacgccgccaaccacugcggcaccaucgccaacggcgugcugcagaccuucaugagaauggccuggggcggcagcuacaucgcccuggacagcggcaagggcagcugggacugcaucaugaccagcuaccaguaccuggugauccagaacaccaccugggaggaccacugccaguucagcagacccagccccaucggcuaccugggccugcugagccagagaaccagagacaucuacaucagcagaagacugcugggcaccuucaccuggacccugagcgacagcgagggcaacgagacccccggcggcuacugccugaccagauggaugcugaucgaggccgagcugaagugcuucggcaacaccgccguggccaagugcaacgagaagcacgacgaggaguucugcgacaugcugagacuguucgacuucugcaagcaggccaucagaagacugaagaccgaggcccagaugagcauccagcugaucaacaaggccgugaacgcccugaucaacgaccagcugaucaugaagaaccaccugagagacaucaugggcauccccuacugcaacuacagcaaguacugguaccugaaccacaccgugaccggcaagaccagccugcccagaugcuggcuggugagcaacggcagcuaccugaacgagacccacuucagcgacgacaucgagcagcaggccgacaacaugaucaccgagcugcugcagaaggaguacaucgacagacagggcaagaccccccugggccugguggaccuguucguguucagcaccagcuucuaccugaucagcaucuuccugcaccuggugaagauccccacccacagacacaucaccggcaagcccugccccaagccccacagacugaaccacaugggcaucugcagcugcggccuguacaagcaccccggcgugcccgugaaguggaagagaugaggacuaguaauaaggaaacuguaugaaugucugugggcaggaagugaagagauccuucuguaaagguuuuuggaauuaugucugcugaauaauaaacuuuuuugaaauaauaaaucugguagaaaaaugagaucucaaaggcucuuuucagagccaccaaaaaaaaaaaaaaaaaaaaaaaaaaaaaaaaaaaaaaaaaaaaaaaaaaaaaaaaaaaaaaaaagaauu

SEQ ID NO: 37520 - RNA, 1778 nt, Artificial Sequence
  mRNA product Design b-4 (hSL-A64-N5) comprising derived and/or modified sequence from LASV(Lassa virus/H.sapiens-wt/NGA/2016/ISTH_0009;Clade II)__AVO03571__GPCmut10 (opt4)
aggagagucccgcagucggcguccagcggcucugcuuguucgugugugugucguugcaggccuuauucaagcuuaccaugggccagaucaucaccuucuuccaggaggugccccacgugaucgaggaggugaugaacaucgugcugaucgcccugagccugcuggccauccugaagggcaucuacaacguggccaccugcggccugcugggccuggugagcuuccugcugcugugcggcagaagcugcagcaccaccuacaagggcguguacgagcugcagacccuggagcuggacauggccagccugaacaugugcaugccccugagcugcaccaagaacaacagccaccacuacaucauggugggcaacgagaccggccuggagcugacccugaccaacaccagcaucaucaaccacaaguucugcaaccugagcgacgcccacaagaagaaccuguacgaccacgcccugaugagcaucaucagcaccuuccaccugagcauccccaacuucaaccaguacgaggccaugagcugcgacuucaacggcggcagaaucagcgugcaguacaaccugagccacagcuacgccguggacgccgccaaccacugcggcaccaucgccaacggcgugcugcagaccuucaugagaauggccuggggcggcagcuacaucgcccuggacagcggcaagggcagcugggacugcaucaugaccagcuaccaguaccugaucauccagaacaccaccugggaggaccacugccaguucagcagacccagccccaucggcuaccugggccugcugagccagagaaccagagacaucuacaucagcagaagacugcugggcaccuucaccuggacccugagcgacagcgagggcaacgagacccccggcggcuacugccugaccagauggaugcugaucgaggccgagcugaagugcuucggcaacaccgccguggccaagugcaacgagaagcacgacgaggaguucugcgacaugcugagacuguucgacuucugcaagcaggccaucagaagacugaagaccgaggcccagaugagcauccagcugaucaacaaggccgugaacgcccugaucaacgaccagcugaucaugaagaaccaccugagagacaucaugggcauccccuacugcaacuacagcaaguacugguaccugaaccacaccgugaccggcaagaccagccugcccagaugcuggcuggugagcaacggcagcuaccugaacgagacccacuucagcgacgacaucgagcagcaggccgacaacaugaucaccgagcugcugcagaaggaguacaucgacagacagggcaagaccccccugggccugguggaccuguucguguucagcaccagcuucuaccugaucagcaucuuccugcaccuggugaagauccccacccacagacacaucaccggcaagcccugccccaagccccacagacugaaccacaugggcaucugcagcugcggccuguacaaccaccccggcgugcccgugaaguggaagagaugaggacuaguaauaaggaaacuguaugaaugucugugggcaggaagugaagagauccuucuguaaagguuuuuggaauuaugucugcugaauaauaaacuuuuuugaaauaauaaaucugguagaaaaaugagaucucaaaggcucuuuucagagccaccaaaaaaaaaaaaaaaaaaaaaaaaaaaaaaaaaaaaaaaaaaaaaaaaaaaaaaaaaaaaaaaaagaauu

SEQ ID NO: 37521 - RNA, 1778 nt, Artificial Sequence
  mRNA product Design b-4 (hSL-A64-N5) comprising derived and/or modified sequence from LASV(Lassa virus/H.sapiens-wt/NGA/2016/ISTH_0017;Clade II)__AVO03567__GPCmut10 (opt4)
aggagagucccgcagucggcguccagcggcucugcuuguucgugugugugucguugcaggccuuauucaagcuuaccaugggccagaucaucaccuucuuccaggaggugccccacgugaucgaggaggugaugaacaucgugcugaucgcccugagccugcuggccauccugaagggcaucuacaacguggccaccugcggccuguucggccuggugagcuuccugcugcugugcggcagaagcugcagcaccaccuacaagggcguguacgagcugcagacccuggagcuggacauggccagccugaacaugugcaugccccugagcugcaccaagaacaacagccaccacuacaucauggugggcaacgagaccggccuggagcugacccugaccaacaccagcaucaucaaccacaaguucugcaaccugagcgacgcccacaagaagaaccuguacgaccacgcccugaugagcaucaucagcaccuuccaccugagcauccccaacuucaaccaguacgaggccaugagcugcgacuucaacggcggcaagaucagcgugcaguacaaccugagccacaccuacgccaucgacgccgccaaccacugcggcaccaucgccaacggcgugcugcagaccuucaugagaauggccuggggcggcagcuacaucgcccuggacagcggcaagggcagcugggacugcaucaugaccagcuaccaguaccugaucauccagaacaccaccugggaggaccacugccaguucagcagacccagccccaucggcuaccugggccugcugagccagagaaccagagacaucuacaucagcagaagacugcugggcaccuucaccuggacccugagcgacagcgagggcaacgagacccccggcggcuacugccugaccagauggaugcugaucgaggccgagcugaagugcuucggcaacaccgccguggccaagugcaacgagaagcacgacgaggaguucugcgacaugcugagacuguucgacuucugcaagcaggccaucagaagacugaagaccgaggcccagaugagcauccagcugaucaacaaggccgugaacgcccugaucaacgaccagcugaucaugaagaaccaccugagagacaucaugggcauccccuacugcaacuacagcaaguacugguaccugaaccacaccgugaccggcaagaccagccugcccagaugcuggcuggugagcaacggcagcuaccugaacgagacccacuucagcgacgacaucgagcagcaggccgacaacaugaucaccgagcugcugcagaaggaguacauggacagacagggcaagaccccccugggccugguggaccuguucguguucagcaccagcuucuaccugaucagcaucuuccugcaccuggugagaauccccacccacagacacgugaucggcaagcccugccccaagccccacagacugaaccacaugggcaucugcagcugcggccuguacaagcaccccggcgugcccgugaaguggaagagaugaggacuaguaauaaggaaacuguaugaaugucugugggcaggaagugaagagauccuucuguaaagguuuuuggaauuaugucugcugaauaauaaacuuuuuugaaauaauaaaucugguagaaaaaugagaucucaaaggcucuuuucagagccaccaaaaaaaaaaaaaaaaaaaaaaaaaaaaaaaaaaaaaaaaaaaaaaaaaaaaaaaaaaaaaaaaagaauu

SEQ ID NO: 37522 - RNA, 1778 nt, Artificial Sequence
  mRNA product Design b-4 (hSL-A64-N5) comprising derived and/or modified sequence from LASV(Lassa virus/H.sapiens-wt/NGA/2018/ISTH_0959;Clade II)__AVV65099__GPCmut10 (opt4)
aggagagucccgcagucggcguccagcggcucugcuuguucgugugugugucguugcaggccuuauucaagcuuaccaugggccagaucaucaccuucuuccaggaggugccccacgugaucgaggaggugaugaacaucgugcugaucgcccugagccugcuggccauccugaagggcaucuacaacguggugaccugcggccuguucggccuggugagcuuccugcugcugugcggcagaagcugcagcaccaccuacaagggcguguacgagcugcagacccuggagcuggacauggccagccugaacaugugcaugccccugagcugcaccaagaacaacagccaccacuacaucauggugggcaacgagaccggccuggagcugacccugaccaacaccagcaucaucaaccacaaguucugcaaccugagcgacgcccacaagaagaaccuguacgaccacgcccugaugagcaucaucagcaccuuccaccugagcauccccaacuucaaccaguacgaggccaugagcugcgacuucaacggcggcaagaucagcgugcaguacaaccugagccacgccuacgccaucgacgccgccaaccacugcggcaccaucgccaacggcgugcugcagaccuucaugagaauggccuggggcggcagcuacaucgcccuggacagcggcaagggcagcugggacugcaucaugaccagcuaccaguaccugaucauccagaacaccaccugggaggaccacugccaguucagcagacccagccccaucggcuaccugggccugcugagccagagaaccagagacaucuacaucagcagaagacugcugggcaccuucaccuggacccugagcgacagcgagggcaacgagacccccggcggcuacugccugaccagauggaugcugaucgaggccgagcugaagugcuucggcaacaccgccguggccaagugcaacgagaagcacgacgaggaguucugcgacaugcugagacuguucgacuucugcaagcaggccaucagaagacugaagaccgaggcccagaugagcauccagcugaucaacaaggccgugaacgcccugaucaacgaccagcugaucaugaagaaccaccugagagacaucaugggcauccccuacugcaacuacagcaaguacugguaccugaaccacaccgugaccggcaagaccagccugcccagaugcuggcuggugagcaacggcagcuaccugaacgagacccacuucagcgacgacaucgagcagcaggccgacaacaugaucaccgagcugcugcagaaggaguacaucgacagacagggcaagaccccccugggccugguggaccuguucguguucagcaccagcuucuaccugaucagcaucuuccugcaccuggugaagauccccacccacagacacgugaucggcaagcccugccccaagccccacagacugaaccacaugggcaucugcagcugcggccuguacaagcaccccggcgugcccgugaaguggaagagaugaggacuaguaauaaggaaacuguaugaaugucugugggcaggaagugaagagauccuucuguaaagguuuuuggaauuaugucugcugaauaauaaacuuuuuugaaauaauaaaucugguagaaaaaugagaucucaaaggcucuuuucagagccaccaaaaaaaaaaaaaaaaaaaaaaaaaaaaaaaaaaaaaaaaaaaaaaaaaaaaaaaaaaaaaaaaagaauu

SEQ ID NO: 37523 - RNA, 1778 nt, Artificial Sequence
  mRNA product Design b-4 (hSL-A64-N5) comprising derived and/or modified sequence from LASV(LASV003-NIG-2008;Clade II)__AIT17580__GPCmut10 (opt4)
aggagagucccgcagucggcguccagcggcucugcuuguucgugugugugucguugcaggccuuauucaagcuuaccaugggccagaucaucaccuucuuccaggaggugccccacgugaucgaggaggugaugaacaucgugcugaucgcccugagccugcuggccauccugaagggcaucuacaacguggccaccugcggccuguucggccuggugagcuuccugcugcugugcggcagaagcugcagcaccaccuacaagggcguguacgagcugcagacccuggagcuggacauggccagccugaacaugugcaugccccugagcugcaccaagaacaacagccaccacuacaucauggugggcaacgagaccggccuggagcugacccugaccaacaccagcaucaucaaccacaaguucugcaaccugagcgacgcccacaagaagaaccuguacgaccacgcccugaugagcaucaucagcaccuuccaccugagcauccccaacuucaaccaguacgaggccaugagcugcgacuucaacggcggcaagaucagcgugcaguacaaccugagccacaccuacgccguggacgccgccaaccacugcggcaccaucgccaacggcgugcugcagaccuucaugagaauggccuggggcggcagcuacaucgcccuggacagcggcaagggcagcugggacugcaucaugaccagcuaccaguaccugaucauccagaacaccaccugggaggaccacugccaguucagcagacccagccccaucggcuaccugggccugcugagccagagaaccagagacaucuacaucagcagaagacugcugggcaccuucaccuggacccugagcgacagcgagagcaacgagacccccggcggcuacugccugaccagauggaugcugaucgaggccgagcugaagugcuucggcaacaccgccguggccaagugcaacgagaagcacgacgaggaguucugcgacaugcugagacuguucgacuucugcaagcaggccaucagaagacugaaggccgaggcccagaugagcauccagcugaucaacaaggccgugaacgcccugaucaacgaccagcugaucaugaagaaccaccugagagacaucaugggcauccccuacugcaacuacagcaaguacugguaccugaaccacaccgugaccggcagaaccagccugcccagaugcuggcuggugagcaacggcagcuaccugaacgagacccacuucagcgacgacaucgagcagcaggccgacaacaugaucaccgagcugcugcagaaggaguacauggacagacagggcaagaccccccugggccugguggaccuguucguguucagcaccagcuucuaccugaucagcaucuuccugcaccuggugaagauccccacccacagacacgugaucggcaagcccugccccaagccccacagacugaaccacaugggcaucugcagcugcggccuguacaagcaccccggcgugcccgugaaguggaagagaugaggacuaguaauaaggaaacuguaugaaugucugugggcaggaagugaagagauccuucuguaaagguuuuuggaauuaugucugcugaauaauaaacuuuuuugaaauaauaaaucugguagaaaaaugagaucucaaaggcucuuuucagagccaccaaaaaaaaaaaaaaaaaaaaaaaaaaaaaaaaaaaaaaaaaaaaaaaaaaaaaaaaaaaaaaaaagaauu

SEQ ID NO: 37524 - RNA, 1778 nt, Artificial Sequence
  mRNA product Design b-4 (hSL-A64-N5) comprising derived and/or modified sequence from LASV(LASV035-NIG-2009;Clade II)__AIT17588__GPCmut10 (opt4)
aggagagucccgcagucggcguccagcggcucugcuuguucgugugugugucguugcaggccuuauucaagcuuaccaugggccagaucaucaccuucuuccaggaggugccccacgugaucgaggaggugaugaacaucgugcugaucgcccugagccugcuggccauccugaagggcaucuacaacguggccaccugcggccuguucggccuggugagcuuccugcugcugugcggcagaagcugcagcaccaccuacaagggcguguacgagcugcagacccuggagcuggacauggccagccugaacaugugcaugccccugagcugcaccaagaacaacagccaccacuacaucauggugggcaacgagaccggccuggagcugacccugaccaacaccagcaucaucaaccacaaguucugcaaccugagcgacgcccacaagaagaaccuguacgaccacgcccugaugagcaucaucagcaccuuccaccugagcauccccaacuucaaccaguacgaggccaugagcugcgacuucaacggcggcaagaucagcgugcaguacaaccugagccacgccuacgccguggacgccgccaaccacugcggcaccaucgccaacggcgugcugcagaccuucaugagaauggccuggggcggcagcuacaucgcccuggacagcggcaagggcagcugggacugcaucaugaccagcuaccaguaccugaucauccagaacaccaccugggaggaccacugccaguucagcagacccagccccaucggcuaccugggccugcugagccagagaaccagagacaucuacaucagcagaagacugcugggcaccuucaccuggacccugagcgacagcgagggcaacgagacccccggcggcuacugccugaccagauggaugcugaucgaggccgagcugaagugcuucggcaacaccgccguggccaagugcaacgagaagcacgacgaggaguucugcgacaugcugagacuguucgacuucugcaagcaggccaucagaagacugaaggccgaggcccagaugagcauccagcugaucaacaaggccgugaacgcccugaucaacgaccagcugaucaugaagaaccaccugagagacaucaugggcauccccuacugcaacuacagcaaguacugguaccugaaccacaccgugaccggcaagaccagccugcccagaugcuggcuggugagcaacggcagcuaccugaacgagacccacuucagcgacgacaucgagcagcaggccgacaacaugaucaccgagcugcugcagaaggaguacaucgacagacagggcaagaccccccugggccugguggaccuguucguguucagcaccagcuucuaccugaucagcaucuuccugcaccuggugaagauccccacccacagacacgugaucggcaagcccugccccaagccccacagacugaaccacaugggcaucugcagcugcggccuguacaagcaccccggcgugcccgugaaguggaagagaugaggacuaguaauaaggaaacuguaugaaugucugugggcaggaagugaagagauccuucuguaaagguuuuuggaauuaugucugcugaauaauaaacuuuuuugaaauaauaaaucugguagaaaaaugagaucucaaaggcucuuuucagagccaccaaaaaaaaaaaaaaaaaaaaaaaaaaaaaaaaaaaaaaaaaaaaaaaaaaaaaaaaaaaaaaaaagaauu

SEQ ID NO: 37525 - RNA, 1778 nt, Artificial Sequence
  mRNA product Design b-4 (hSL-A64-N5) comprising derived and/or modified sequence from LASV(LASV1000-NIG-2009;Clade II)__AIT17782__GPCmut10 (opt4)
aggagagucccgcagucggcguccagcggcucugcuuguucgugugugugucguugcaggccuuauucaagcuuaccaugggccagaucaucaccuucuuccaggaggugccccacgugaucgaggaggugaugaacaucgugcugaucgcccugagccugcuggccauccugaagggcaucuacaacguggccaccugcggccuguucggccuggugagcuuccugcugcugugcggcagaagcugcagcaccaccuacaagggcguguacgagcugcagacccuggagcuggacauggccagccugaacaugugcaugccccugagcugcaccaagaacaacagccaccacuacaucauggugggcaacgagaccggccuggagcugacccugaccaacaccagcaucaucaaccacaaguucugcaaccugagcgacgcccacaagaagaaccuguacgaccacgcccugaugagcaucaucagcaccuuccaccugagcauccccaacuucaaccaguacgaggccaugagcugcgacuucaacggcggcaagaucagcgugcaguacaaccugagccacaccuacgccguggacgccgccaaccacugcggcaccaucgccaacggcgugcugcagaccuucaugagaauggccuggggcggcagcuacaucgcccuggacagcggcaagggcagcugggacugcaucaugaccagcuaccaguaccugaucauccagaacaccaccugggaggaccacugccaguucagcagacccagccccaucggcuaccugggccugcugagccagagaaccagagacaucuacaucagcagaagacugcugggcaccuucaccuggacccugagcgacagcgagggcaacgagacccccggcggcuacugccugaccagauggaugcugaucgaggccgagcugaagugcuucggcaacaccgccguggccaagugcaacgagaagcacgacgaggaguucugcgacaugcugagacuguucgacuucugcaagcaggccaucaagagacugaagaccgaggcccagaugagcauccagcugaucaacaaggccgugaacgcccugaucaacgaccagcugaucaugaagaaccaccugagagacaucaugggcauccccuacugcaacuacagcaaguacugguaccugaaccacaccgugaccggcaagaccagccugcccagaugcuggcuggugagcaacggcagcuaccugaacgagacccacuucagcgacgacaucgagcagcaggccgacaacaugaucaccgagcugcugcagaaggaguacaucgacagacagggcaagaccccccugggccugguggaccuguucguguucagcaccagcuucuaccugaucagcaucuuccugcaccuggugaagauccccacccacagacacguggugggcaagcccugccccaagccccacagacugaaccacaugggcaucugcagcugcggccuguacaagcaccccggcgugcccgugaaguggaagagaugaggacuaguaauaaggaaacuguaugaaugucugugggcaggaagugaagagauccuucuguaaagguuuuuggaauuaugucugcugaauaauaaacuuuuuugaaauaauaaaucugguagaaaaaugagaucucaaaggcucuuuucagagccaccaaaaaaaaaaaaaaaaaaaaaaaaaaaaaaaaaaaaaaaaaaaaaaaaaaaaaaaaaaaaaaaaagaauu

SEQ ID NO: 37526 - RNA, 1778 nt, Artificial Sequence
  mRNA product Design b-4 (hSL-A64-N5) comprising derived and/or modified sequence from LASV(LASV221-NIG-2010;Clade II)__AIT17624__GPCmut10 (opt4)
aggagagucccgcagucggcguccagcggcucugcuuguucgugugugugucguugcaggccuuauucaagcuuaccaugggccagaucaucaccuucuuccaggaggugccccacgugaucgaggaggugaugaacaucgugcugaucgcccugagccugcuggccauccugaagggcaucuacaacguggccaccugcggccuguucggccuggugagcuuccugcugcugugcggcagaagcugcagcaccaccuacaagggcguguacgagcugcagacccuggagcuggacauggccagccugaacaugugcaugccccugagcugcaccaagaacaacagccaccacuacaucauggugggcaacgagaccggccuggagcugacccugaccaacaccagcaucaucaaccacaaguucugcaaccugagcgacgcccacaagaagaaccuguacgaccacgcccugaugagcaucaucagcaccuuccaccugagcauccccaacuucaaccaguacgaggccaugagcugcgacuucaacggcggcaagaucagcgugcaguacaaccugagccacaccuacgccaucgacgccgccaaccacugcggcaccaucgccaacggcgugcugcagaccuucaugagaauggccuggggcggcagcuacaucgcccuggacagcggcaagggcagcugggacugcaucaugaccagcuaccaguaccugaucauccagaacaccaccugggaggaccacugccaguucagcagacccagccccaucggcuaccugggccugcugagccagagaaccagagacaucuacaucagcagaagacugcugggcaccuucaccuggacccugagcgacagcgagggcaacgagacccccggcggcuacugccugaccagauggaugcugaucgaggccgagcugaagugcuucggcaacaccgccguggccaagugcaacgagaagcacgacgaggaguucugcgacaugcugagacuguucgacuucugcaagcaggccaucagaagacugaagaccgaggcccagaugagcauccagcugaucaacaaggccgugaacgcccugaucaacgaccagcugaucaugaagaaccaccugagagacaucaugggcauccccuacugcaacuacagcaaguacugguaccugaaccacaccgugaccggcaagaccagccugcccagaugcuggcuggugagcaacggcagcuaccugaacgagacccacuucagcgacgacaucgagcagcaggccgacaacaugaucaccgagaugcugcagaaggaguacauggacagacagggcaagaccccccugggccugguggaccuguucguguucagcaccagcuucuaccugaucagcaucuuccugcaccuggugaagauccccacccacagacacgugaucggcaagcccugccccaagccccacagacugaaccacaugggcaucugcagcugcggccuguacaagcaccccggcgugcccgugaaguggaagagaugaggacuaguaauaaggaaacuguaugaaugucugugggcaggaagugaagagauccuucuguaaagguuuuuggaauuaugucugcugaauaauaaacuuuuuugaaauaauaaaucugguagaaaaaugagaucucaaaggcucuuuucagagccaccaaaaaaaaaaaaaaaaaaaaaaaaaaaaaaaaaaaaaaaaaaaaaaaaaaaaaaaaaaaaaaaaagaauu

SEQ ID NO: 37527 - RNA, 1778 nt, Artificial Sequence
  mRNA product Design b-4 (hSL-A64-N5) comprising derived and/or modified sequence from LASV(LASV237-NIG-2010;Clade II)__AIT17638__GPCmut10 (opt4)
aggagagucccgcagucggcguccagcggcucugcuuguucgugugugugucguugcaggccuuauucaagcuuaccaugggccagaucaucaccuucuuccaggaggugccccacgugaucgaggaggugaugaacaucgugcugaucgcccugagccugcuggccauccugaagggcaucuacaacguggccaccugcggccuguucggccuggugagcuuccugcugcugugcggcagaagcugcagcaccaccuacaagggcguguacgagcugcagacccuggagcuggacauggccagccugaacaugugcaugccccugagcugcaccaagaacaacagccaccacuacaucauggugggcaacgagaccggccuggagcugacccugaccaacaccagcaucaucaaccacaaguucugcaaccugagcgacgcccacaagaaggaccuguacgaccacgcccugaugagcaucaucagcaccuuccaccugagcauccccaacuucaaccaguacgaggccaugagcugcgacuucaacggcggcaagaucagcgugcaguacaaccugagccacaccuacgccguggacgccgccaaccacugcggcaccaucgccaacggcgugcugcagaccuucaugagaauggccuggggcggcagcuacaucgcccuggacagcggcaagggcagcugggacugcaucaugaccagcuaccaguaccugaucauccagaacaccaccugggaggaccacugccaguucagcagacccagccccaucggcuaccugggccugcugagccagagaaccagagacaucuacaucagcagaagacugcugggcaccuucaccuggacccugagcgacagcgagggcaacgagacccccggcggcuacugccugaccagauggaugcugaucgaggccgagcugaagugcuucggcaacaccgccguggccaagugcaacgagaagcacgacgaggaguucugcgacaugcugagacuguucgacuucugcaagcaggccaucagaagacugaagaccgaggcccagaugagcauccagcugaucaacaaggccgugaacgcccugaucaacgaccagcugaucaugaagaaccaccugagagacaucaugggcauccccuacugcaacuacagcaaguacugguaccugaaccacaccgugaccggcaagaccagccugcccagaugcuggcuggugagcaacggcagcuaccugaacgagacccacuucagcgacgacaucgagcagcaggccgacaacaugaucaccgagcugcugcagaaggaguacauggacagacagggcaagaccccccugggccugguggaccuguucguguucagcaccagcuucuaccugaucagcaucuuccugcaccugaucaagauccccacccacagacacaucaccggcaagcccugccccaagccccacagacugaaccacaugggcaucugcagcugcggccuguacaagcaccccggcgugcccgugaaguggaagagaugaggacuaguaauaaggaaacuguaugaaugucugugggcaggaagugaagagauccuucuguaaagguuuuuggaauuaugucugcugaauaauaaacuuuuuugaaauaauaaaucugguagaaaaaugagaucucaaaggcucuuuucagagccaccaaaaaaaaaaaaaaaaaaaaaaaaaaaaaaaaaaaaaaaaaaaaaaaaaaaaaaaaaaaaaaaaagaauu

SEQ ID NO: 37528 - RNA, 1778 nt, Artificial Sequence
  mRNA product Design b-4 (hSL-A64-N5) comprising derived and/or modified sequence from LASV(LASV253-NIG-2011;Clade II)__AIT17670__GPCmut10 (opt4)
aggagagucccgcagucggcguccagcggcucugcuuguucgugugugugucguugcaggccuuauucaagcuuaccaugggccagaucaucaccuucuuccaggaggugccccacgugaucgaggaggugaugaacaucgugcugaucgcccugagccugcuggccauccugaagggcaucuacaacguggccaccugcggccuguucggccuggugagcuuccugcugcugugcggcagaagcugcagcaccaccuacaagggcguguacgagcugcagacccuggagcuggacauggccagccugaacaugugcaugccccugagcugcaccaagaacaacagccaccacuacaucauggugggcaacgagaccggccuggagcugacccugaccaacaccagcaucaucaaccacaaguucugcaaccugagcgacgcccacaagaagaaccuguacgaccacgcccugaugagcaucaucagcaccuuccaccugagcauccccaacuucaaccaguacgaggccaugagcugcgacuucaacggcggcaagaucagcgugcaguacaaccugagccacaccuacgccguggacgccgccaaccacugcggcaccaucgccaacggcgugcugcagaccuucaugagaauggccuggggcggcagcuacaucgcccuggacagcggcaagggcagcugggacugcaucaugaccagcuaccaguaccugaucauccagaacaccaccugggaggaccacugccaguucagcagacccagccccaucggcuaccugggccugcugagccagagaaccagagacaucuacaucagcagaagacugcugggcaccuucaccuggacccugagcgacagcgagggcaacgagacccccggcggcuacugccugaccagauggaugcugaucgaggccgagcugaagugcuucggcaacaccgccguggccaagugcaacgagaagcacgacgaggaguucugcgacaugcugagacuguucgacuucugcaagcaggccaucagaagacugaaggccgaggcccagaugagcauccagcugaucaacaaggccgugaacgcccugaucaacgaccagcugaucaugaagaaccaccugagagacaucaugggcauccccuacugcaacuacagcaaguacugguaccugaaccacaccgugaccggcagaaccagccugcccagaugcuggcuggugagcaacggcagcuaccugaacgagacccacuucagcgacgacaucgagcagcaggccgacaacaugaucaccgagcugcugcagaaggaguacaucgacagacagggcaagaccccccugggccugguggaccuguucguguucagcaccagcuucuaccugaucagcaucuuccugcaccuggugaagauccccacccacagacacaucaucggcaagcccugccccaagccccacagacugaaccacaugggcaucugcagcugcggccuguacaagcaccccggcgugcccgugaaguggaagagaugaggacuaguaauaaggaaacuguaugaaugucugugggcaggaagugaagagauccuucuguaaagguuuuuggaauuaugucugcugaauaauaaacuuuuuugaaauaauaaaucugguagaaaaaugagaucucaaaggcucuuuucagagccaccaaaaaaaaaaaaaaaaaaaaaaaaaaaaaaaaaaaaaaaaaaaaaaaaaaaaaaaaaaaaaaaaagaauu

SEQ ID NO: 37529 - RNA, 1778 nt, Artificial Sequence
  mRNA product Design b-4 (hSL-A64-N5) comprising derived and/or modified sequence from LASV(LASV254-NIG-2011;Clade II)__AIT17674__GPCmut10 (opt4)
aggagagucccgcagucggcguccagcggcucugcuuguucgugugugugucguugcaggccuuauucaagcuuaccaugggccagaucaucaccuucuuccaggaggugccccacgugaucgaggaggugaugaacaucgugcugaucgcccugagccugcuggccauccugaagggcaucuacaacguggccaccugcggccuguucggccuggugagcuuccugcugcugugcggcagaagcugcagcaccaccuacaagggcguguacgagcugcagacccuggagcuggacaugaccaaccugaacaugugcaugccccugagcugcaccaagaacaacagccaccacuacaucauggugggcaacgagaccggccuggagcugacccugaccaacaccagcaucaucaaccacaaguucugcaaccugagcgacgcccacaagaagaaccuguacaaccacgcccugaugagcaucaucagcaccuuccaccugagcauccccaacuucaaccaguacgaggccaugagcugcgacuucaacggcggcaagaucagcgugcaguacaaccugagccacagcuacgccguggacgccgccaaccacugcggcaccaucgccaacggcgugcugcagaccuucaugagaauggccuggggcggcagcuacaucgcccuggacagcggcaagggcaacugggacugcaucaugaccagcuaccaguaccugaucauccagaacaccaccugggaggaccacugccaguucagcagacccagccccaucggcuaccugggccugcugagccagagaaccagagacaucuacaucagcagaagacugcugggcaccuucaccuggacccugagcgacagcgagggcaacgagacccccggcggcuacugccugaccagauggaugcugaucgaggccgagcugaagugcuucggcaacaccgccguggccaagugcaacgagaagcacgacgaggaguucugcgacaugcugagacuguucgacuucugcaagcaggccaucagaagacugaagaccgaggcccaggccaacauccagcugaucaacaaggccgugaacgcccugaucaacgaccagcugaucaugaagaaccaccugagagacaucaugggcauccccuacugcaacuacagcaaguacugguaccugaaccacaccgugaccggcaagaccagccugcccagaugcuggcuggugagcaacggcagcuaccugaacgagacccacuucagcgacgacaucgagcagcaggccgacaacaugaucaccgagcugcugcagaaggaguacauggacagacagggcaagaccccccugggccugguggaccuguucguguucagcaccagcuucuaccugaucagcaucuuccugcaccuggugaagauccccacccacagacacgugaucggcaagcccugccccaagccccacagacugaaccacaugggcaucugcagcugcggccuguacaagcaccccggcgugcccgugaaguggaagagaugaggacuaguaauaaggaaacuguaugaaugucugugggcaggaagugaagagauccuucuguaaagguuuuuggaauuaugucugcugaauaauaaacuuuuuugaaauaauaaaucugguagaaaaaugagaucucaaaggcucuuuucagagccaccaaaaaaaaaaaaaaaaaaaaaaaaaaaaaaaaaaaaaaaaaaaaaaaaaaaaaaaaaaaaaaaaagaauu

SEQ ID NO: 37530 - RNA, 1778 nt, Artificial Sequence
  mRNA product Design b-4 (hSL-A64-N5) comprising derived and/or modified sequence from LASV(Nig08-A19;Clade III)__ADU56618__GPCmut10 (opt4)
aggagagucccgcagucggcguccagcggcucugcuuguucgugugugugucguugcaggccuuauucaagcuuaccaugggccagaucgugaccuucuuccaggaggugccccacgugaucgaggaggugaugaacaucgugcugaucgcccugagcauccuggccauccugaagggccuguacaacaucgccaccugcggccugaucggccuggugaccuuccugcugcugagcggcagaagcugcagcaugaccuacaagggcguguacgagcugcagacccuggagcugaacaugaacacccugaacaugugcaugccccugagcugcaccaagaacaacagccaccacuacaucauggugggcaacgagaccggccuggagcugacccugaccaacaccagccugcugcaccacaaguucugcaaccugagcgacgcccacaagaagaaccuguacgaccacacccugaugagcaucaucagcaccuuccaccugagcauccccaacuucaaccaguacgaggccaugagcugcgacuucaacggcggcaagaucaccgugcaguacaaccugagccacagcuacgccaucgacgccgccaaccacugcggcaccguggccaacggcgugcugcagaccuucaugagaauggccuggggcggcagcuacaucgcccuggacagcggcagaggcaagugggacugcaucaugaccagcuaccaguaccugaucauccagaacaccaccugggaggaccacugccaguucagcagacccagccccaucggcuaccugggccugcugagccagagaaccagagacaucuacaucagcagaagacugcugggcaccuucaccuggacccugagcgacagcgagggcaacgagacccccggcggcuacugccugaccagauggaugcugaucgaggccgagcugaagugcuucggcaacaccgccguggccaagugcaacgagaagcacgacgaggaguucugcgacaugcugagacuguucgacuucugcaagcaggccaucagaagacugaaggccgaggcccagaugagcauccagcugaucaacaaggccgugaacgcccugaucaacgaccagcugaucaugaagaaccaccugagagacaucaugggcauccccuacugcaacuacagcaaguacugguaccugaaccacaccagcaccggcagaaccagccugcccagaugcuggcuggugagcaacggcagcuaccugaacgagacccacuucagcgacgacaucgagcagcaggccgacaacaugaucaccgagaugcugcagaaggaguaccuggacagacagggcaagaccccccugggccugguggaccuguucguguucagcaccagcuucuaccugaucagcaucuuccugcaccuggugaagauccccacccacagacacaucgugggcaagcccugccccaagccccacagacugaaccacaugggcaucugcagcugcggccuguacaagcagcccggcgugcccgugagauggaagagaugaggacuaguaauaaggaaacuguaugaaugucugugggcaggaagugaagagauccuucuguaaagguuuuuggaauuaugucugcugaauaauaaacuuuuuugaaauaauaaaucugguagaaaaaugagaucucaaaggcucuuuucagagccaccaaaaaaaaaaaaaaaaaaaaaaaaaaaaaaaaaaaaaaaaaaaaaaaaaaaaaaaaaaaaaaaaagaauu

SEQ ID NO: 37531 - RNA, 1781 nt, Artificial Sequence
  mRNA product Design b-4 (hSL-A64-N5) comprising derived and/or modified sequence from LASV(G1180-SLE-2010;Clade IV)__AIT17168__GPCmut10 (opt4)
aggagagucccgcagucggcguccagcggcucugcuuguucgugugugugucguugcaggccuuauucaagcuuaccaugggccagaucgugaccuucuuccaggaggugccccacgugaucgaggaggugaugaacaucgugcugaucgcccugagcauccuggccgugcugaagggccuguacaacuucgccaccugcggccuggugggccugcugaccuuccugcugcugugcggcagaagcugcaccgccagcagauacaagggcguguacgagcugcagacccuggagcugaacauggagacccugaacaugugcaugccccugagcugcaccaagaacaacagccaccacuacaucauggugggcaacgagaccggccuggagcugacccugaccaacaccagcaucaucaaccacaaguucugcaaccugagcgacgcccacaagaagaaccuguacgaccacgcccugaugagcaucaucagcaccuuccaccugagcauccccaacuucaaccaguacgaggccaugagcugcgacuucaacggcggcaagaucagcgugcaguacaaccugagccacagcuacgccggcgacgccgccaaccacugcggcaccguggccaacggcgugcugcagaccuucaugagaauggccuggggcggcagcuacaucgcccuggacagcggccacggcagcugggacugcaucaugaccagcuaccaguaccugaucauccagaacaccaccugggaggaccacugccaguucagcagacccagccccaucggcuaccugggccugcugagccagagaaccagagacaucuacaucagcagaagacugcugggcaccuucaccuggacccugagcgacagcgagggcaaggacacccccggcggcuacugccugaccagauggaugcugaucgaggccgagcugaagugcuucggcaacaccgccguggccaagugcaacgagaagcacgacgaggaguucugcgacaugcugagacuguucgacuucugcaagcaggccauccagagacugaaggccgaggcccagaugagcauccagcugaucaacaaggccgugaacgcccugaucaacgaccagcugaucaugaagaaccaccugagagacaucaugggcauccccuacugcaacuacagcaaguacugguaccugaaccacaccaccaccggcaagaccagccugcccaagugcuggcuggugagcaacggcagcuaccugaacgagacccacuucagcgacgacaucgagcagcaggccgacaacaugaucaccgagaugcugcagaaggaguacauggagagacagggcaagaccccccugggccugguggaccuguucguguucagcaccagcuucuaccugaucagcaucuuccugcaccuggugaagauccccacccacagacacaucgugggcaagagcugccccaagccccacagacugaaccacaugggcaucugcagcugcggccuguacaagcagcccggcgugcccgugaaguggaagagaugaggacuaguaauaaggaaacuguaugaaugucugugggcaggaagugaagagauccuucuguaaagguuuuuggaauuaugucugcugaauaauaaacuuuuuugaaauaauaaaucugguagaaaaaugagaucucaaaggcucuuuucagagccaccaaaaaaaaaaaaaaaaaaaaaaaaaaaaaaaaaaaaaaaaaaaaaaaaaaaaaaaaaaaaaaaaagaauu

SEQ ID NO: 37532 - RNA, 1781 nt, Artificial Sequence
  mRNA product Design b-4 (hSL-A64-N5) comprising derived and/or modified sequence from LASV(G1442-SLE-2011;Clade IV)__AIT17180__GPCmut10 (opt4)
aggagagucccgcagucggcguccagcggcucugcuuguucgugugugugucguugcaggccuuauucaagcuuaccaugggccagaucgugaccuucuuccaggaggugccccacgugaucgaggaggugaugaacaucgugcugaucgcccugagcauccuggccgugcugaagggccuguacaacguggccaccugcggccugaucggccuggugaccuuccugcugcugugcggcagaagcugcaccaccacccuguacaagggcguguacgagcugcagacccuggagcugaacauggagacccugaacaugugcaugccccugagcugcaccaagaacaacagccaccacuacaucagagugggcaacgagaccggccuggagcugacccugaccaacaccagcaucaucaaccacaaguucugcaaccugagcgacgcccacaagaagaaccuguacgaccacgcccugaugagcaucaucagcaccuuccaccugagcauccccaacuucaaccaguacgaggccaugagcugcgacuucaacggcggcaagaucagcgugcaguacaaccugagccacagcuacgccggcgacgccgccaaccacugcggcaccguggccaacggcgugcugcagaccuucaugagaauggccuggggcggcagcuacaucgcccuggacagcggcagaggcaacugggacugcaucaugaccagcuaccaguaccugaucauccagaacaccaccugggacgaccacugccaguucagcagacccagccccaucggcuaccugggccugcugagccagagaaccagagacguguacaucagcagaagacugcugggcaccuucaccuggacccugagcgacagcgagggcaaggacacccccggcggcuacugccugaccagauggaugcugaucgaggccgagcugaagugcuucggcaacaccgccguggccaagugcaacgagaagcacgacgaggaguucugcgacaugcugagacuguucgacuucugcaagcaggccauccagagacugaaggccgaggcccagaugagcauccagcugaucaacaaggccgugaacgcccugaucaacgaccagcugaucaugaagaaccaccugagagacaucaugggcauccccuacugcaacuacagcaaguacugguaccugaacaacaccgccaccggcaagaccagccugcccaagugcuggcugaucagcaacggcagcuaccugaacgagacccacuucagcgacgacaucgagcaggaggccgacaacaugaucaccgagaugcugcagaaggaguacauggagagacagggcaagaccccccugggccugguggaccuguucguguucagcaccagcuucuaccugaucagcaucuuccugcaccuggugaagauccccacccacagacacaucgugggcaagagcugccccaagccccacagacugaaccacaugggcaucugcagcugcggccuguacaagcagcccggcgugcccgugagauggaagagaugaggacuaguaauaaggaaacuguaugaaugucugugggcaggaagugaagagauccuucuguaaagguuuuuggaauuaugucugcugaauaauaaacuuuuuugaaauaauaaaucugguagaaaaaugagaucucaaaggcucuuuucagagccaccaaaaaaaaaaaaaaaaaaaaaaaaaaaaaaaaaaaaaaaaaaaaaaaaaaaaaaaaaaaaaaaaagaauu

SEQ ID NO: 37533 - RNA, 1781 nt, Artificial Sequence
  mRNA product Design b-4 (hSL-A64-N5) comprising derived and/or modified sequence from LASV(G3010-SLE-2013;Clade IV)__AIT17344__GPCmut10 (opt4)
aggagagucccgcagucggcguccagcggcucugcuuguucgugugugugucguugcaggccuuauucaagcuuaccaugggccagaucgugaccuucuuccaggaggugccccacgugaucgaggaggugaugaacaucgugcugaucgcccugagcauccuggccgugcugaagggccuguacaacuucgccaccugcggccuggugggccuggugaccuuccugcugcugugcggcagaagcugcaccaccagccuguacaagggcguguacgagcugcagacccuggagcugaacauggagacccugaacaugugcaugccccugagcugcaccaagaacaacagccaccacuacaucauggugggcaacgagaccggccuggagcugacccugaccaacaccagcaucaucaaccacaaguucugcaaccugagcgacgcccacaagaagaaccuguacaaccacgcccugaugagcaucaucagcaccuuccaccugagcauccccaacuucaaccaguacgaggccaugagcugcgacuucaacggcggcaagaucagcgugcaguacaaccugagccacagcuacgccggcgacgccgccagccacugcggcaccguggccaacggcgugcugcagaccuucaugagaauggccuggggcggcagcuacaucgcccuggacagcggcuacggcaagugggacugcaucaugaccagcuaccaguaccugaucauccagaacaccaccugggaggaccacugccaguucagcagacccagccccaucggcuaccugggccugcugagccagagaaccagagacaucuacaucagcagaagacugcugggcaccuucaccuggacccugagcgacagcgagggcaaggacacccccggcggcuacugccugaccagauggaugcugaucgaggccgagcugaagugcuucggcaacaccgccguggccaagugcaacgagaagcacgacgaggaguucugcgacaugcugagacuguucgacuucugcaagcaggccauccagagacugaagaccgaggcccagaugagcauccagcugaucaacaaggccgugaacgcccugaucaacgaccagcugaucaugaagaaccaccugagagacaucaugggcauccccuacugcaacuacagcaaguacugguaccugaaccacaccaccaccggcaagaccagccugcccaagugcuggcuggugagcaacggcagcuaccugaacgagacccacuucagcgacgacaucgagcagcaggccgacaacaugaucaccgagaugcugcagaaggaguacauggagagacagggcaagaccccccugggccugguggaccuguucguguucagcaccagcuucuaccugaucagcaucuuccugcaccuggugaagauccccacccacagacacaucgugggcaagagcugccccaagccccacagacugaaccacaugggcaucugcagcugcggccuguacaagcagcccggcgugcccgugagauggaagagaugaggacuaguaauaaggaaacuguaugaaugucugugggcaggaagugaagagauccuucuguaaagguuuuuggaauuaugucugcugaauaauaaacuuuuuugaaauaauaaaucugguagaaaaaugagaucucaaaggcucuuuucagagccaccaaaaaaaaaaaaaaaaaaaaaaaaaaaaaaaaaaaaaaaaaaaaaaaaaaaaaaaaaaaaaaaaagaauu

SEQ ID NO: 37534 - RNA, 1781 nt, Artificial Sequence
  mRNA product Design b-4 (hSL-A64-N5) comprising derived and/or modified sequence from LASV(G502-SLE-2009;Clade IV)__AIT17126__GPCmut10 (opt4)
aggagagucccgcagucggcguccagcggcucugcuuguucgugugugugucguugcaggccuuauucaagcuuaccaugggccagaucgugaccuucuuccaggaggugccccacgugaucgaggaggugaugaacaucgugcugaucgcccugagcauccuggccgugcugaagggccuguacaacuucgccaccugcggccuggugggccugcugaccuuccugcugcugugcggcagaagcugcaccaccggccuguacaagggcguguacgagcugcagacccuggagcugaacauggagacccugaacaugugcaugccccugagcugcaccaagaacaacagccaccacuacaucauggugggcaacgagaccggccuggagcugacccugaccaacaccagcaucaucaaccacaaguucugcaaccugagcgacgcccacaagaagaaccuguacgaccacgcccugaugagcaucaucagcaccuuccaccugagcauccccaacuucaaccaguacgaggccaugagcugcgacuucaacggcggcaagaucagcgugcaguacaaccugagccacagcuacgccggcgacgccgccgaccacugcggcaccguggccaacggcgugcugcagaccuucaugagaauggccuggggcggcagcuacaucgcccuggacagcggcagaggcagaugggacugcaucaugaccagcuaccaguaccugaucauccagaacaccaccugggaggaccacugccaguucagcagacccagccccaucggcuaccugggccugcugagccagagaaccagagacaucuacaucagcagaagacugcugggcaccuucaccuggacccugagcgacagcgagggcaaggacacccccggcggcuacugccugaccagauggaugcugaucgaggccgagcugaagugcuucggcaacaccgccguggccaagugcaacgagaagcacgacgaggaguucugcgacaugcugagacuguucgacuucugcaagcaggccauccagagacugaaggccgaggcccagaugagcauccagcugaucaacaaggccgugaacgcccugaucaacgaccagcuggugaugaagaaccaccugagagacaucaugggcauccccuacugcaacuacagcagauacugguaccugaaccacaccaccaccggcagaaccagccugcccaagugcuggcuggugagcaacggcagcuaccugaacgagacccacuucagcgacgacaucgagcagcaggccgacaacaugaucaccgagaugcugcagaaggaguacauggagagacagggcaagaccccccugggccugguggaccuguucguguucagcaccagcuucuaccugaucagcaucuuccugcaccuggugaagauccccacccacagacacaucgugggcaagagcugccccaagccccacagacugaaccacaugggcaucugcagcugcggccuguacaagcagcccggcgugcccgugaaguggaagagaugaggacuaguaauaaggaaacuguaugaaugucugugggcaggaagugaagagauccuucuguaaagguuuuuggaauuaugucugcugaauaauaaacuuuuuugaaauaauaaaucugguagaaaaaugagaucucaaaggcucuuuucagagccaccaaaaaaaaaaaaaaaaaaaaaaaaaaaaaaaaaaaaaaaaaaaaaaaaaaaaaaaaaaaaaaaaagaauu

SEQ ID NO: 37535 - RNA, 1781 nt, Artificial Sequence
  mRNA product Design b-4 (hSL-A64-N5) comprising derived and/or modified sequence from LASV(G733-SLE-2010;Clade IV)__AIT17154__GPCmut10 (opt4)
aggagagucccgcagucggcguccagcggcucugcuuguucgugugugugucguugcaggccuuauucaagcuuaccaugggccagaucgugaccuucuuccaggaggugccccacgugaucgaggaggugaugaacaucgugcugaucgcccugagcauccuggccgugcugaagggccuguacaacuucgccaccugcggcaucgugggccuggugagcuuccugcugcugugcggcagaagcugcaccaccagccuguacaagggcguguacgagcugcagacccuggagcugaacauggagacccugaacaugugcaugccccugagcugcaccaagaacaacagccaccacuacaucauggugggcaacgagaccggccuggagcugacccugaccaacaccagcaucaucaaccacaaguucugcaaccugagcgacgcccacaagaagaaccuguacgaccacgcccugaugagcaucaucagcaccuuccaccugagcauccccaacuucaaccaguacgaggccaugagcugcgacuucaacggcggcaagaucagcgugcaguacaaccugagccacagcuacgccggcgacgccgccaaccacugcggcaccaucgccaacggcgugcugcagaccuucaugagaauggccuggggcggcagcuacaucgcccuggacagcggcagagacagaugggacugcaucaugaccagcuaccaguaccugaucauccagaacaccaccugggaggaccacugccaguucagcagacccagccccaucggcuaccugggccugcugagccagagaaccagagacaucuacaucagcagaagacugcugggcaccuucaccuggacccugagcgacagcgagggcaaggacacccccggcggcuacugccugaccagauggaugcugaucgaggccgagcugaagugcuucggcaacaccgccguggccaagugcaacgagaagcacgacgaggaguucugcgacaugcugagacuguucgacuucugcaagcaggccauccagagacugaaggccgaggcccagaugagcauccagcugaucaacaaggccgugaacgcccugaucaacgaccagcugaucaugaagaaccaccugagagacaucaugggcauccccuacugcaacuacagcaaguacugguaccugaaccacaccaccaccggcaagaccagccugcccaagugcuggcuggugagcaacggcagcuaccugaacgagacccacuucagcgacgacaucgagcagcaggccgacaacaugaucaccgagaugcugcagaaggaguacauggagagacagggcaagaccccccugggccugguggaccuguucguguucagcaccagcuucuaccugaucagcaucuuccugcaccuggugaagauccccacccacagacacguggugggcaagagcugccccaagccccacagacugaaccacaugggcaucugcagcugcggccuguacggccagcccggcgugcccgugaaguggaagagaugaggacuaguaauaaggaaacuguaugaaugucugugggcaggaagugaagagauccuucuguaaagguuuuuggaauuaugucugcugaauaauaaacuuuuuugaaauaauaaaucugguagaaaaaugagaucucaaaggcucuuuucagagccaccaaaaaaaaaaaaaaaaaaaaaaaaaaaaaaaaaaaaaaaaaaaaaaaaaaaaaaaaaaaaaaaaagaauu

SEQ ID NO: 37536 - RNA, 1781 nt, Artificial Sequence
  mRNA product Design b-4 (hSL-A64-N5) comprising derived and/or modified sequence from MOPV/LASV reassortant(IGS-1;Clade IV)__AFY05576__GPCmut10 (opt4)
aggagagucccgcagucggcguccagcggcucugcuuguucgugugugugucguugcaggccuuauucaagcuuaccaugggccagaucgugaccuucuuccaggaggugccccacgugaucgaggaggugaugaacaucgugcugaucgcccugagcgugcuggccgugcugaagggccuguacaacuucgccaccugcggccuggugggccuggugaccuuccugcugcugugcggcagaagcugcaccaccagccuguacaagggcguguacgagcugcagacccuggagcugaacauggagacccugaacaugugcaugccccugagcugcaccaagaacaacagccaccacuacaucauggugggcaacgagaccggccuggagcugacccugaccaacaccagcaucaucaaccacaaguucugcaaccugagcgacgcccacaagaagaaccuguacgaccacgcccugaugagcaucaucagcaccuuccaccugagcauccccaacuucaaccaguacgaggccaugagcugcgacuucaacggcggcaagaucagcgugcaguacaaccugagccacagcuacgccggcgacgccgccaaccacugcggcaccguggccaacggcgugcugcagaccuucaugagaauggccuggggcggcagcuacaucgcccuggacagcggcagaggcaacugggacugcaucaugaccagcuaccaguaccugaucauccagaacaccaccugggaggaccacugccaguucagcagacccagccccaucggcuaccugggccugcugagccagagaaccagagacaucuacaucagcagaagacugcugggcaccuucaccuggacccugagcgacagcgagggcgaggacacccccggcggcuacugccugaccagauggaugcugaucgaggccgagcugaagugcuucggcaacaccgccguggccaagugcaacgagaagcacgacgaggaguucugcgacaugcugagacuguucgacuucugcaagcaggccauccagagacugaaggccgaggcccagaugagcauccagcugaucaacaaggccgugaacgcccugaucaacgaccagcugaucaugaagaaccaccugagagacaucaugggcauccccuacugcaacuacagcaaguacugguaccugaaccacaccaccaccggcagaaccagccugcccaagugcuggcuggugagcaacggcagcuaccugaacgagacccacuucagcgacgacaucgagcagcaggccgacaacaugaucaccgagaugcugcagaaggaguacauggagagacagggcaagaccccccugggccugguggaccuguucguguucagcaccagcuucuaccugaucagcaucuuccugcaccuggugaagauccccacccacagacacaucgugggcaagagcugccccaagccccacagacugaaccacaugggcaucugcagcugcggccuguacaagcagcccggcgugcccgugaaguggaagagaugaggacuaguaauaaggaaacuguaugaaugucugugggcaggaagugaagagauccuucuguaaagguuuuuggaauuaugucugcugaauaauaaacuuuuuugaaauaauaaaucugguagaaaaaugagaucucaaaggcucuuuucagagccaccaaaaaaaaaaaaaaaaaaaaaaaaaaaaaaaaaaaaaaaaaaaaaaaaaaaaaaaaaaaaaaaaagaauu

SEQ ID NO: 37537 - RNA, 1781 nt, Artificial Sequence
  mRNA product Design b-4 (hSL-A64-N5) comprising derived and/or modified sequence from LASV(LM765-SLE-2012;Clade IV)__AIT17814__GPCmut10 (opt4)
aggagagucccgcagucggcguccagcggcucugcuuguucgugugugugucguugcaggccuuauucaagcuuaccaugggccagaucgugaccuucuuccaggaggugccccacgugaucgaggaggugaugaacaucgugcugaucgcccugagcauccuggccgugcugaagggccuguacaacuucgccaccugcggccuggugggccuggugaccuuccugcugcugugcggcagaagcugcaccaccagccuguacaagggcguguacgagcugcagacccuggagcugaacauggagacccugaacaugugcaugccccugagcugcaccaagaacaacagccaccacuacaucauggugggcaacgagaccggccuggagcugacccugaccaacaccagcaucaucgaccacaaguucugcaaccugagcgacgcccacagaaagaaccuguacgaccacgcccugaugagcaucaucagcaccuuccaccugagcauccccaacuucaaccaguacgaggccaugagcugcgacuucaacggcggcaagaucagcgugcaguacaaccugagccacagcuacgccaaggacgccgccgaccacugcggcaccguggccaacggcgugcugcagaccuucaugagaauggccuggggcggcagcuacaucgcccuggacagcggcagaggcagaugggacugcaucaugaccagcuaccaguaccugaucauccagaacaccaccugggaggaccacugccaguucagcagacccagccccaucggcuaccugggccugcugagccagagaaccagagacaucuacaucagcagaagacugcugggcaccuucaccuggacccugagcgacagcgagggcaaggacacccccggcggcuacugccugaccagauggaugcugaucgaggccgagcugaagugcuucggcaacaccgccguggccaagugcaacgagaagcacgacgaggaguucugcgacaugcugagacuguucgacuucugcaagcaggccauccagagacugaaggccgaggcccagaugagcauccagcugaucaacaaggccgugaacgcccugaucaacgaccagcugaucaugaagaaccaccugagagacaucaugggcauccccuacugcaacuacagcaaguacugguaccugaaccacaccaccaccggcaagaccagccugcccaagugcuggcuggugagcaacggcagcuaccugaacgagacccacuucagcgacgacaucgagcagcaggccgacaacaugaucaccgagaugcugcagaaggaguacauggagagacagggcaagaccccccugggccugguggaccuguucguguucagcaccagcuucuaccugaucagcaucuuccugcaccuggugaagauccccacccacagacacaucgugggcaagcccugccccaagccccacagacugaaccacaugggcaucugcagcugcggccuguacaagcagcccggcgugcccgugaaguggaagagaugaggacuaguaauaaggaaacuguaugaaugucugugggcaggaagugaagagauccuucuguaaagguuuuuggaauuaugucugcugaauaauaaacuuuuuugaaauaauaaaucugguagaaaaaugagaucucaaaggcucuuuucagagccaccaaaaaaaaaaaaaaaaaaaaaaaaaaaaaaaaaaaaaaaaaaaaaaaaaaaaaaaaaaaaaaaaagaauu

SEQ ID NO: 37538 - RNA, 1781 nt, Artificial Sequence
  mRNA product Design b-4 (hSL-A64-N5) comprising derived and/or modified sequence from LASV(LM776-SLE-2012;Clade IV)__AIT17824__GPCmut10 (opt4)
aggagagucccgcagucggcguccagcggcucugcuuguucgugugugugucguugcaggccuuauucaagcuuaccaugggccagaucgugaccuucuuccaggaggugccccacgugaucgaggaggugaugaacaucgugcugaucgcccugagcauccuggccgugcugaagggccuguacaacuucgccaccugcggccuggugggccuggugaccuuccugcugcugugcggcagaagcugcaccaccagcguguacaagggcguguacgagcugcagacccuggagcugaacauggagacccugaacaugugcaugccccugagcugcaccaagaacaacagccaccacuacaucauggugggcaacgagaccggccuggagcugacccugaccaacaccagcaucaucaaccacaaguucugcaaccugagcgacgcccacaagaagaaccuguacgaccacgcccugaugagcaucaucagcaccuuccaccugagcauccccaacuucaaccaguacgaggccaugagcugcgacuucaacggcggcaagaucagcgugcaguacaaccugagccacagcuacgccggcgacgccgccaaccacugcggcaccguggccaacggcgugcugcagaccuucaugagaauggccuggggcggcagcuacaucgcccuggacagcggccacggcaagugggacugcaucaugaccagcuaccaguaccugaucauccagaacaccaccugggaggaccacugccaguucagcagacccagccccaucggcuaccugggccugcugagccagagaaccagagacaucuacaucagcagaagacugcugggcaccuucaccuggacccugagcgacagcgagggcaaggacacccccggcggcuacugccugaccagauggaugcugaucgaggccgagcugaagugcuucggcaacaccgccguggccaagugcaacgagaagcacgacgaggaguucugcgacaugcugagacuguucgacuucugcaagcaggccauccagagacugaaggccgaggcccagaugagcauccagcugaucaacaaggccgugaacgcccugaucaacgaccagcugaucaugaagaaccaccugagagacaucaugggcauccccuacugcaacuacagcaaguacugguaccugaaccacaccaccaccggcaagaccagccugcccaagugcuggcuggugagcaacggcagcuaccugaacgagacccacuucagcgacgacaucgagcagcaggccgacaacaugaucaccgagaugcugcagaaggaguacauggagagacagggcaagaccccccugggccugguggaccuguucguguucagcaccagcuucuaccugaucagcaucuuccugcaccuggugaagauccccacccacagacacaucgugggcaagagcugccccaagccccacagacugaaccacaugggcaucugcagcugcggccuguacaagcagcccggcgugcccgugagauggaagagaugaggacuaguaauaaggaaacuguaugaaugucugugggcaggaagugaagagauccuucuguaaagguuuuuggaauuaugucugcugaauaauaaacuuuuuugaaauaauaaaucugguagaaaaaugagaucucaaaggcucuuuucagagccaccaaaaaaaaaaaaaaaaaaaaaaaaaaaaaaaaaaaaaaaaaaaaaaaaaaaaaaaaaaaaaaaaagaauu

SEQ ID NO: 37539 - RNA, 1781 nt, Artificial Sequence
  mRNA product Design b-4 (hSL-A64-N5) comprising derived and/or modified sequence from LASV(Mad39;Clade IV)__ANH09722__GPCmut10 (opt4)
aggagagucccgcagucggcguccagcggcucugcuuguucgugugugugucguugcaggccuuauucaagcuuaccaugggccagaucgugaccuucuuccaggaggugccccacgugaucgaggaggugaugaacaucgugcugaucgcccugagcauccuggccgugcugaagggccuguacaacguggccaccugcggccugaucggccuggugaccuuccugcugcugugcggcagaagcugcaccaccacccuguacaagggcguguacgagcugcaggcccuggagcugaacauggagacccugaacaugugcaugccccugagcugcaccaagaacaacagccaccacuacaucagagugggcaacgagaccggccuggagcugacccugaccaacaccagccugaucaaccacaaguucugcaaccugagcgacgcccacaagaagaaccuguacgaccacgcccugaugagcaucaucagcaccuuccaccugagcauccccaacuucaaccaguacgaggccaugagcugcgacuucaacgacggcaagaucagcgugcaguacaaccugagccacaccuacgccggcgacaccgccaaccacugcggcaccguggccaacggcgugcugcagaccuucaugagaauggccuggggcggcagcuacaucgcccuggacagcggcagaggcggcugggacugcaucaugaccagcuaccaguaccugaucauccagaacaccaccugggaggaccacugccaguucagcagacccagccccaucggcuaccugggccugcugagccagagaaccagagacaucuacaucagcagaagacugcugggcaccuucaccuggacccugagcgacagcgagggcaaggacacccccggcggcuacugccugaccagauggaugcugaucgaggccgagcugaagugcuucggcaacaccgccguggccaagugcaacgagaagcacgacgaggaguucugcgacaugcugagacuguucgacuucugcaagcaggccauccagagacugaaggccgaggcccagaugagcauccagcugaucaacaaggccgugaacgcccugaucaacgaccagcugaucaugaagaaccaccugagagacaucaugggcauccccuacugcaacuacagcaaguacugguaccugaaccacaccgugaccggcaagaccagccugcccaagugcuggcuggugagcaacggcagcuaccugaacgagacccacuucagcgacgacaucgagcagcaggccgacaacaugaucaccgagaugcugcagaaggaguacauggagagacagggcaagaccccccugggccugguggaccuguucguguucagcaccagcuucuaccugaucagcaucuuccugcaccuggugaagauccccacccacagacacguggugggcaagcccugccccaagccccacagacugaaccacaugggcaucugcagcugcggcuucuacaagcagcccggcgugcccgugagauggaagagaugaggacuaguaauaaggaaacuguaugaaugucugugggcaggaagugaagagauccuucuguaaagguuuuuggaauuaugucugcugaauaauaaacuuuuuugaaauaauaaaucugguagaaaaaugagaucucaaaggcucuuuucagagccaccaaaaaaaaaaaaaaaaaaaaaaaaaaaaaaaaaaaaaaaaaaaaaaaaaaaaaaaaaaaaaaaaagaauu

SEQ ID NO: 37540 - RNA, 1781 nt, Artificial Sequence
  mRNA product Design b-4 (hSL-A64-N5) comprising derived and/or modified sequence from LASV(Z0947-SLE-2011;Clade IV)__AIT17840__GPCmut10 (opt4)
aggagagucccgcagucggcguccagcggcucugcuuguucgugugugugucguugcaggccuuauucaagcuuaccaugggccagaucgugaccuucuuccaggaggugccccacgugaucgaggaggugaugaacaucgugcugaucgcccugagcauccuggccgugcugaagggccuguacaacuucgccaccugcggccuggugggccuggugaccuuccugcugcugugcggcagaagcugcaccaucagccuguacaagggcguguacgagcugcagacccuggagcugaacauggagacccugaacaugugcaugccccugagcugcaccaagaacaacagccaccacuacaucauggugggcaacgagaccggccuggagcugacccugaccaacaccagcaucaucaaccacaaguucugcaaccugagcgacgcccacaagaagaaccuguacgaccacgcccugaugagcaucaucagcaccuuccaccugagcauccccaacuucaaccaguacgaggccaugagcugcgacuucaacggcggcaagaucagcgugcaguacaaccugagccacagcuacgccggcgacgccgccaaccacugcggcaccguggccaacggcgugcugcagaccuucaugagaauggccuggggcggcagcuacaucgcccuggacagcggcagagacagaugggacugcaucaugaccagcuaccaguaccugaucauccagaacaccaccugggaggaccacugccaguucagcagacccagccccaucggcuaccugggccugcugagccagagaaccagagacaucuacaucagcagaagacugcugggcaccuucaccuggacccugagcgacagcgagggcaaggacacccccggcggcuacugccugaccagauggaugcugaucgaggccgagcugaagugcuucggcaacaccgccguggccaagugcaacgagaagcacgacgaggaguucugcgacaugcugagacuguucgacuucugcaagcaggccauccagagacugaaggccgaggcccagaugagcauccagcugaucaacaaggccgugaacgcccugaucaacgaccagcugaucaugaagaaccaccugagagacaucaugggcauccccuacugcaacuacagcaaguacugguaccugaaccacaccaccaccggcaagaccagccugcccaagugcuggcuggugagcaacggcagcuaccugaacgagacccacuucagcgacgacaucgagcagcaggccgacaacaugaucaccgagaugcugcagaaggaguacauggagagacagggcaagaccccccugggccugguggaccuguucguguucagcaccagcuucuaccugaucagcaucuuccugcaccuggugaagauccccacccacagacacaucgugggcaagcccugccccaagccccacagacugaaccacaugggcaucugcagcugcggccuguacaagcagcccggcgugcccgugaaguggaagagaugaggacuaguaauaaggaaacuguaugaaugucugugggcaggaagugaagagauccuucuguaaagguuuuuggaauuaugucugcugaauaauaaacuuuuuugaaauaauaaaucugguagaaaaaugagaucucaaaggcucuuuucagagccaccaaaaaaaaaaaaaaaaaaaaaaaaaaaaaaaaaaaaaaaaaaaaaaaaaaaaaaaaaaaaaaaaagaauu

SEQ ID NO: 37541 - RNA, 1781 nt, Artificial Sequence
  mRNA product Design b-4 (hSL-A64-N5) comprising derived and/or modified sequence from LASV(Josiah;Clade IV)__NP_694870__GPCmut10 (opt5)
aggagagucccgcagucggcguccagcggcucugcuuguucgugugugugucguugcaggccuuauucaagcuuaccaugggccagaucgugaccuucuuucaagaggucccccacguuauugaagaggugaugaacaucgugcugauugcccucagcguccuggcugugcuuaaggggcuguacaauuucgccacaugcggacucguuggccuggugacguuucuucugcucugugggagauccugcaccacaucucuguauaaaggagucuacgaacugcagacccucgagcugaacauggaaacacuuaauauguguaugccucugagcugcaccaagaacaauucccaucacuauaucauggugggcaacgagacagggcucgagcugacccuuacgaauaccucuauuaucaaccauaaauucuguaaucugagcgacgcgcacaagaaaaaccucuacgaucaugcucugauguccaucauuucuacauuucaccugagcaucccgaauuucaaccaguaugaagccauguccugcgacuuuaauggaggcaagauuagcguucaguacaaccucucucacuccuaugccggcgaugcugccaaucauugugggaccguggcuaacggaguccugcaaacauucaugcggauggccuggggcgggagcuacaucgcgcuugacucuggacgcggcaacugggauugcauuaugaccuccuaccaguaucugaucauucagaauacgacaugggaggaccacugucaguuuagcagacccucuccuaucggguaccucggacugcuuucccaacggacccgcgauaucuauauuagcagacggcugcucggcacauucaccuggacccuguccgacucugaaggcaaggauacacccgggggauacugccugacgcgcuggaugcucaucgaggccgagcugaaauguuuuggcaacaccgcuguggccaagugcaaugaaaaacaugacgaggaguucugcgauaugcuuagacuguuugacuucuguaagcaggcuauucagcggcucaaagccgaagcgcagaugagcauccaacugauuaacaaggccgugaaugcucuuaucaacgaucagcugaucaugaagaaucaccuccgcgacauuauggggaucccuuauugcaacuacuccaaauauugguaccugaaucacacaaccacaggaagaaccagccugcccaaguguuggcucgucucuaacggcuccuaccugaaugaaacgcauuucagcgacgauauugagcagcaagccgacaacaugaucacagagaugcuucagaaagaauauauggagcggcaggggaagaccccucugggacucguugaucuguuuguguucucuaccagcuuuuaccugauuuccaucuuccuucaccucgugaaaaucccgacacaucgccacauugucggcaagucuugccccaaaccucauagacugaaucacaugggcaucuguagcugcgggcuguauaagcagcccggagugccuguuaaguggaaacggugaggacuaguaauaaggaaacuguaugaaugucugugggcaggaagugaagagauccuucuguaaagguuuuuggaauuaugucugcugaauaauaaacuuuuuugaaauaauaaaucugguagaaaaaugagaucucaaaggcucuuuucagagccaccaaaaaaaaaaaaaaaaaaaaaaaaaaaaaaaaaaaaaaaaaaaaaaaaaaaaaaaaaaaaaaaaagaauu

SEQ ID NO: 37542 - RNA, 1778 nt, Artificial Sequence
  mRNA product Design b-4 (hSL-A64-N5) comprising derived and/or modified sequence from LASV(LP;Clade I)__AAF86701__GPCmut10 (opt5)
aggagagucccgcagucggcguccagcggcucugcuuguucgugugugugucguugcaggccuuauucaagcuuaccaugggccagaucauuaccuucuuucaagaggugccccacgucaucgaagagguuaugaacauugugcugaucgcccucagccugcuugcuauucugaaggggcucuacaauaucgccacaugcggaaucauuggccugguggcguuccuuuuucugugugggaaauccugcucucucacgcugaagggaggcuaugaacugcagacccucgagcugaacauggaaacacuuaauauguguaugccucugagcugcaccaaaaacuccucucaucacuacaucagagucgggaaugagacaggacucgagcugacccuuacaaacaccagcauuaucaaucauaaguucuguaaccuguccgacgcucacaaaaagaaucucuaugaucaugcccugaugucuauuaucagcacguuucaccuguccauuccgaacuucaaucaguacgaagccaugagcugcgacuuuaacggcggcaagaucucugugcaguauaaucucucccacagcuacgcuggggaugccgcugagcauuguggaaccguugccaacggcgugcugcaaacauucaugcggauggcguggggagggcgcuauaucgcccuugacucuggcaaagggaauugggauugcauuaugaccuccuaccaguaccugaucauucagaacacaaccugggaagaccacugucaguuuagcagacccucuccuaucggauaucucggccugcuuucccaacggacgcgcgauauuuacaucagcagacggcugcucggcacauucaccuggacacuguccgacucugaggggaacgagacccccggaggcuauugccugacccgcuggaugcucaucgaagcugagcugaaguguuuugggaauacagccgucgcuaaaugcaacgaaaagcaugaugaggaguucugcgacaugcuuagacuguuugauuucuguaaacaggccauucggcgccucaaggcggaagcccagaugagcauccagcugauuaauaaggcugugaacgcccuuaucaaugaccaacugauuaugaaaaaccaccucagagauaucaugggaaucccuuacugcaauuauuccaaguacugguaucugaaccacacgagcucuggccggaccucccugcccaaauguuggcucauuagcaaugggucuuaccugaacgagacacaguucagcgacgacaucgaacagcaagcugauaauaugauuaccgagaugcuucagaaggaauacaucgagcgccagggaaaaacaccucugggccucguugacauuuuuaucuucuccaccucuuuuuaucugauuagcaucuuccugcaucuuaucaagauuccgacgcacagacauaucgugggcaaacccugcccuaagccccaccggcucaaccauaugggggucuguuccugcggacuguacaagcacccuggcgugcccacaaaauggaagcgcugaggacuaguaauaaggaaacuguaugaaugucugugggcaggaagugaagagauccuucuguaaagguuuuuggaauuaugucugcugaauaauaaacuuuuuugaaauaauaaaucugguagaaaaaugagaucucaaaggcucuuuucagagccaccaaaaaaaaaaaaaaaaaaaaaaaaaaaaaaaaaaaaaaaaaaaaaaaaaaaaaaaaaaaaaaaaagaauu

SEQ ID NO: 37543 - RNA, 1778 nt, Artificial Sequence
  mRNA product Design b-4 (hSL-A64-N5) comprising derived and/or modified sequence from LASV(803213;Clade II)__AAF86703__GPCmut10 (opt5)
aggagagucccgcagucggcguccagcggcucugcuuguucgugugugugucguugcaggccuuauucaagcuuaccaugggccagaucauuaccuucuuucaagaggugccccacgucaucgaagagguuaugaacauugugcugaucgcccucagccugcuugcuauucugaaggggaucuacaauguggccacaugcggacucuucggccugaucuccuuucuucugcucugugggagaucuugcagcgucacguauaaaggaguguacgaacugcagacccuggagcucaacauggcgaaucugaacauguguaugccucuuuccugcacaaagaauaacucucaucacuauauuaugguuggcaaugaaaccgggcuggagcucacacugaccaacacaagcaucauuaaucauaaauucuguaaccuuuccgacgcucacaagaaaaaucuguacgaucaugcccucaugucuaucauuagcaccuuucaccuguccaucccgaacuucaaucaguaugaggccaugagcugcgacuuuaacggaggcaagauuucugugcaguacaaucugucccacagcuucgcugucgaugccgcuaaccauuguggcacgaucgccaacggggugcuccaaaccuuuaugcggauggcguggggaggcucuuauaucgcccuggacuccgggaagggaaauugggauugcauuaugacaagcuaccaguaccuuaucauucagaacaccacaugggaagaccacugucaguucucucgccccuccccuaucggcuaucuggggcuccugagccaaagaacccgggauauuuacaucucccgcagacuucugggaacguuuacauggacccucucugacagcgagggcaaugaagcucccggcggguauugccugacacgguggaugcugaucgaggccgagcucaaauguuucggaaacaccgcuguugccaagugcaaugaaaaacaugaugaggaauuuugcgacaugcugcgccuuuucgauuucuguaagcaggcgauuaaaagacugaagaccgaggcccagauguccauccagcucauuaacaaggcugugaaugcccugaucaacgaccaacuuauuaugaaaaaucaucugcgggauaucaugggcaucccuuacugcaacuauagccgcuacugguaucucaaucacacagucacggggaagaccucucugcccagauguuggcugguguccaacggaagcuaccucaaugaaacacacuuuucugacgacauugagcagcaggcugauaacaugaucaccgagaugcugcaaaaagaauacauggaccggcagggcaagacaccucuugggcugguggaucucuucgucuuuagcaccuccuucuaucugauuucuaucuuucugcaccuuguuaaaauuccgacgcaucgccacaucgugggaaagcccugcccuaaaccccauagacucaaucacaugggcauuuguagcugcggccuguacaagcacccuggggugcccgucaaguggaaacggugaggacuaguaauaaggaaacuguaugaaugucugugggcaggaagugaagagauccuucuguaaagguuuuuggaauuaugucugcugaauaauaaacuuuuuugaaauaauaaaucugguagaaaaaugagaucucaaaggcucuuuucagagccaccaaaaaaaaaaaaaaaaaaaaaaaaaaaaaaaaaaaaaaaaaaaaaaaaaaaaaaaaaaaaaaaaagaauu

SEQ ID NO: 37544 - RNA, 1778 nt, Artificial Sequence
  mRNA product Design b-4 (hSL-A64-N5) comprising derived and/or modified sequence from LASV(GA391;Clade III)__CAA36645__GPCmut10 (opt5)
aggagagucccgcagucggcguccagcggcucugcuuguucgugugugugucguugcaggccuuauucaagcuuaccaugggccagaucgugaccuucuuucaagaggucccccacguuauugaagaggugaugaacaucgugcugauugcccucagcauccuggcuauucuuaaggggcuguacaaugucgccacaugcggacucaucggccuggugacguuccuucugcucuccgggagaucuuguagccugaucuauaaaggaaccuacgaacugcagacacucgagcugaacauggaaacccuuaauaugugcaugccucuguccuguacaaagaacaauucucaucacuauauucggguuggcaacgagaccgggcucgagcugacacuuaccaauacgagcauccugaaccauaaauuuugcaaucucuccgacgcgcacaagcgcaaccuguacgaucauucucugaugagcauuaucuccaccuuccaccucagcauuccgaauuuuaaccaguaugaagcuaugucuugugacuucaauggaggcaaaaucacagugcaguacaaccugucccacagcuuugccgucgaugccgcuggccauugcgggacccuugccaauggagugcugcaaacauucaugagaauggcuuggggcgggucuuauauugcccucgacuccggacggggcaacugggauuguaucaugaccagcuaccaguaccugaucauucagaacacgacaugggacgaucacugccaguuuucucgccccuccccuaucggguaucuuggacugcucagccaaagaacccgggacauuuacaucucccgcagacugcugggcacauucaccuggacccucucugauagcgagggcaaugaaacacccgggggauauugucugacgcgguggaugcuuauugaggcggagcugaagugcuuuggcaacaccgccguugcuaaguguaaugaaaaacaugacgaggaguucugcgauaugcuccgccuguuugacuucugcaagcaggccaucagacggcuuaaaacagaagcucagauguccauccagcugauuaacaaggccgugaaugcgcucaucaacgaucaacugauuaugaaaaaucaucugcgcgacaucauggggauuccuuacuguaacuauagcagauacugguaucucaaucacaccucuacaggaaagaccucccugccccggugcuggcuuaucagcaacggcucuuaccugaaugaaacgaaguucagcgacgauaucgagcagcaggccgacaacaugauuacagagaugcuccaaaaagaauacaucgaucgccaggggaagaccccucugggacuggucgaccuuuuuguguucuccaccucuuuuuaucucauuagcaucuuccugcaccuggugaaaauuccgacacacagacauaucgucggcaagcccuguccuaaaccccaccggcucaaucauaugggcauuugcuccugugggcuguacaagcagccuggaguucccgugagauggaaacgcugaggacuaguaauaaggaaacuguaugaaugucugugggcaggaagugaagagauccuucuguaaagguuuuuggaauuaugucugcugaauaauaaacuuuuuugaaauaauaaaucugguagaaaaaugagaucucaaaggcucuuuucagagccaccaaaaaaaaaaaaaaaaaaaaaaaaaaaaaaaaaaaaaaaaaaaaaaaaaaaaaaaaaaaaaaaaagaauu

SEQ ID NO: 37545 - RNA, 1781 nt, Artificial Sequence
  mRNA product Design b-4 (hSL-A64-N5) comprising derived and/or modified sequence from LASV(AV;Clade V)__CCA30314__GPCmut10 (opt5)
aggagagucccgcagucggcguccagcggcucugcuuguucgugugugugucguugcaggccuuauucaagcuuaccaugggccagaucgugaccuucuuucaagaggucccccacguuauugaagaggugaugaacaucgugcugauugcccucagcauccuggcuguccuuaaggggcuguacaauauugccacaugcggacucaucggccugaucacguuccuucugcucugugggagauccugcucuagcaaccuguauaaaggaguguacgaacugcagucccucgaccugaauauggagacccuuaacauguguaugccucugucuugcacaaagaauaacagccaucacuauauucggguuggcaaugauaccgggcucgaacugacacuuaccaacacauccauccugaaucauaaauuuuguaaccucucugacgcgcacaagaaagaucuguacgaccaugcucugaugagcauuaucuccaccuuccaccucagcauuccgaauuuuaaccaguaugaggccaugucuugcgauuucaauggaggcaagaucuccgugcaguacaaccugagccacucuuaugccauugacgcugccaaucauuguggcacggucgcuaacgggauccuucaaaccuuuaugcgcauggccuggggaggcuccuacaucgcgcuggauagcgggagaggaaacugggacugcauuaugacaucuuaccaguaucucaucauucagaauaccacaugggagaaccacugucaguucucccggcccagcccuaucggcuaccuggggcuucugucccaacgcaccagagauauuuauaucucucggcgccuccugggaacguuuacauggacccugagcgacuccgaaggcaaugccacacccggcggguacugccucaccagauggaugcugaucgaggcugaacuuaaguguuucggaaacaccgccguggcuaaaugcaaugagaagcaugaugaggaauuuugcgacaugcugcgccucuucgauuuuuguaaacaggccauuagccggcugaagucugaggcgcagauguccauccagcuuauuaacaaagccguuaaugcucugaucaacgaccaacucauuaugaagaaucaccugagagacaucaugggcaucccuuauugcaacuacagcaaguauugguaccugaaucacacaauuacggggaaaaccucucuccccaaguguuggcuggugagcaacggauccuaccuuaaugaaacacauuucucugaugacaucgagcagcaggccgauaacaugauuaccgaaaugcugcaaaaagaguauauggagcggcagggcaagacaccucucgggcuggucgaccuguucguguuuagcaccuccuucuaccuuaucagcauuuuucuccgccuggugaaaaucccgacgcacagacauauugucggaaagcccugcccuaaaccccaccggcugaaucauaugggcaucuguucuugcggccucuauaagcagccugggguucccgugcgcuggaagagaugaggacuaguaauaaggaaacuguaugaaugucugugggcaggaagugaagagauccuucuguaaagguuuuuggaauuaugucugcugaauaauaaacuuuuuugaaauaauaaaucugguagaaaaaugagaucucaaaggcucuuuucagagccaccaaaaaaaaaaaaaaaaaaaaaaaaaaaaaaaaaaaaaaaaaaaaaaaaaaaaaaaaaaaaaaaaagaauu

SEQ ID NO: 37546 - RNA, 1778 nt, Artificial Sequence
  mRNA product Design b-4 (hSL-A64-N5) comprising derived and/or modified sequence from LASV(Togo/2016/7082;Clade VI)__AMR44577__GPCmut10 (opt5)
aggagagucccgcagucggcguccagcggcucugcuuguucgugugugugucguugcaggccuuauucaagcuuaccaugggccagaucauuaccuucuuucaagaggugccccacgucaucgaagagguuaugaacauugugcugaucgcccucagccugcuugcuauucugaaggggguguacaaugucgccacaugcggaaucaucggccucgugacguuccuguuucuuugugggagauccugcucucugauuuauaaaggaagcuacgaacuccagacccuggagcugaacauggaaacacucaauauguguaugccucuguccugcaccaagaacucuagccaucacuauauccggguuggcaaugagacagggcuugagcugacccucacaaacaccuccauuaucaaucauaaauucuguaaccugucugacgcgcacaagcgcaaucuuuacgaucaugcucugaugagcauucucuccacguuucaccugagcaucccgaacuucaaucaguaugaagccaugucuugcgacuuuaacggaggcaaaauuuccgugcaguacaaucugagccacgccuaugcugucgaugccgcugagcauuguggcaccguggccaacgggguucuccaaacauucaugagaauggcguggggaggcucuuacaucgcccuggacuccgggcggggaaauugggauugcaucaugaccagcuaccaguaucuuauuauccagaacacaaccugggaagaccacugucaguuuucucgccccuccccuauuggcuaccuggggcuccugagccaaagaacgcgggauaucuauauuucccgcagacuucugggaacauucaccuggacacucucugacagcgagggcaacgagacccccggcggguacugccugacccgguggaugcugaucgaagcugagcucaaguguuuuggaaauacagccguggcuaagugcaacgaaaaacaugaugaggaguucugcgacaugcugcgccuuuuugauuucuguaagcaggccauccagagacugaaauccgaagcgcagaugagcauucaacucaucaauaaggccgucaacgcucugauuaaugaccagcuuaucaugaaaaaccaucugcgggauaugaugggcauuccuuauugcaauuacucuaaguauugguaccucaaccacacguccagcgggcgcaccucucugcccaaguguuggcuggugagcaauggauccuaccucaacgagacacacuucucugacgacaucgaacagcaagccgauaauaugaucaccgagaugcugcagaaagaauauauugacagacagggcaagacaccucuugggcugguggaucucuuugucuucagcaccuccuuuuaccugaucagcauuuuccugcaccuuaucaaaauuccgacgcaucggcacaucguuggaaagcccugcccuaaaccccaucgccucaaccacaugggcauuuguucuugcggccuguauaagcagccuggggugcccacaagauggaaacggugaggacuaguaauaaggaaacuguaugaaugucugugggcaggaagugaagagauccuucuguaaagguuuuuggaauuaugucugcugaauaauaaacuuuuuugaaauaauaaaucugguagaaaaaugagaucucaaaggcucuuuucagagccaccaaaaaaaaaaaaaaaaaaaaaaaaaaaaaaaaaaaaaaaaaaaaaaaaaaaaaaaaaaaaaaaaagaauu

SEQ ID NO: 37547 - RNA, 1778 nt, Artificial Sequence
  mRNA product Design b-4 (hSL-A64-N5) comprising derived and/or modified sequence from LASV(KAK-428;Clade n.d. (VII))__ANH09740__GPCmut10 (opt5)
aggagagucccgcagucggcguccagcggcucugcuuguucgugugugugucguugcaggccuuauucaagcuuaccaugggccagaucgugaccuucuuucaagaggucccccacguuauugaagaggugaugaacaucgugcugauugcccucagccugcuugcuauccugaaggggcucuacaauuucgccacaugcggagucauuggccugaucacguuucuucugcucugugggagauccugcucugcgaccuauaaaggacaguacgaacugcagacacuggagcucaacauggaaagccugaauauguguaugccucuuuccugcaccaagaacaauucucaucacuauauccgggcuggcaacaauacagggcuggagcucacccugacaaacaccagcauuaucucccauaaauucuguaaucuuucugacgcccacaagaaaaaccuguacgaucauacgcucaugagcauuaucaccacauuucaccuguccauuccgaauuucaaccaguaugaggccaugagcugcgacuuuaauggaggcaagaucucuauucaauacaaccugucccacagcuaugcuggcgaugccgcucagcauugugggaccguggccaauggaguucuccagacauucaugcgcauggcguggggcgggucuuaccuggcccuugacuccggaagacggggcugggauugcaucaucagcucuuaccaguaucugauuauccaaaacaccacgugggacgaucacugucaguuuucccgccccagcccuauuggguaccucggauucgugucccagaagacaagagacaucuauauuucucggcgccugcuuggcaccuuuacauggacccugagcgauuccgaaggccaugacaugcccgggggauacugccucaccagauggaugcugaucgaggcugaucugaaauguuucggcaacacagccgucgcuaagugcaaugaaaaacacgacgaggaguuuugcgauauguggcgccucuucgacuucuguaagcaggccauccaacggcugaaagcggaagcccagaugaacauucagcuuaucaauaaggcugugaacgcccugauuaaugaccaacucaugaugaagaaccaccugagagauaucauggggauuccuuauugcaauuacagcaaauuuugguaucuuaacaauacgaccacaggacggaccucucugccccgcuguuggcucaucuccaacggcagcuaccugaaugagacacauuucucugacgauaucgaacagcaggcugacaacaugauuaccgagaugcugcagaaggaauacauggauagacaagggaaaacgccucucggacugguugaccuuuuuguguucagcacauccuuuuaucugaucaccauuuuccuccaccuggucaagaucccgacccaucggcacauugugggcaaacccugcccuaagccccaucgccugaaucacaugggcaucuguucuugcgggcuuuacaaacagccuggagugcccgucagauggaagcggugaggacuaguaauaaggaaacuguaugaaugucugugggcaggaagugaagagauccuucuguaaagguuuuuggaauuaugucugcugaauaauaaacuuuuuugaaauaauaaaucugguagaaaaaugagaucucaaaggcucuuuucagagccaccaaaaaaaaaaaaaaaaaaaaaaaaaaaaaaaaaaaaaaaaaaaaaaaaaaaaaaaaaaaaaaaaagaauu

SEQ ID NO: 37548 - RNA, 1778 nt, Artificial Sequence; identical to SEQ ID NO: 37542
  mRNA product Design b-4 (hSL-A64-N5) comprising derived and/or modified sequence from LASV(Pinneo-NIG-1969;Clade I)__AIT17836__GPCmut10 (opt5)

SEQ ID NO: 37549 - RNA, 1778 nt, Artificial Sequence
  mRNA product Design b-4 (hSL-A64-N5) comprising derived and/or modified sequence from LASV(ISTH0009-NIG-2011;Clade II)__AIT17404__GPCmut10 (opt5)
aggagagucccgcagucggcguccagcggcucugcuuguucgugugugugucguugcaggccuuauucaagcuuaccaugggccagaucauuaccuucuuucaagaggugccccacgucaucgaagagguuaugaacauugugcugaucgcccucagccugcuugcuauucugaaggggaucuacaauguggccacaugcggacucuucggccuggucuccuuucuucugcucugugggagaucuugcagcacgaccuauaaaggaguguacgaacugcagacacuggagcucgacauggcgucccugaacauguguaugccucuuucuugcaccaagaauaacagccaucacuauaucaugguuggcaaugaaacagggcuggagcucacccugacaaacaccuccauuaucaaucauaaauucuguaaccuuucugaugcucacaagaaaaaucuguacgaccaugcccucaugagcauuaucuccacguuucaccugagcauuccgaacuucaaucaguaugaggccaugucuugcgauuuuaacggaggcaagaucuccgugcaguacaaucugagccacgcuuaugccgucgacgcugccaaccauuguggcaccauugcgaauggggugcuccaaacauucaugcggauggccuggggaggcucuuacaucgcucuggauuccgggaagggaagcugggacugcaucaugaccucuuaccaguaucuuauuauccagaacacaaccugggaagaucacugucaguuuucccgccccagcccuauuggcuaccuggggcuccugucccaaagaacgcgggacaucuauauuucucgcagacuucugggaacauucaccuggacacucagcgauuccgagggcaacgaaacccccggcggguacugccugacccgguggaugcugaucgaggccgagcucaaauguuuuggaaauacagcuguugccaagugcaacgaaaaacaugacgaggaguucugcgauaugcugcgccuuuuugacuucuguaagcaggcgaucagacggcugaaaacggaagcccagaugagcauucagcucaucaauaaggcugugaacgcccugauuaaugaucaacuuaucaugaagaaccaucugcgcgacauuaugggcaucccuuauugcaauuacucuaaauauugguaccucaaccacaccgucacagggaagaccucccugcccagauguuggcuggugagcaauggaucuuaccucaacgaaacacacuucagcgacgauaucgagcagcaggcugacaauaugauuaccgagcugcuucaaaaagaauauauggaucggcagggcaagacgccucuggggcucguggaccuguuugucuucuccacaucuuuuuaccugaucagcauuuuccuucaccucaucaaaauuccgacccaucgccacaucaccggaaagcccugcccuaaaccccauagacugaaccacaugggcauuuguuccugcggccuguauaagcacccugggguucccgugaaguggaaacggugaggacuaguaauaaggaaacuguaugaaugucugugggcaggaagugaagagauccuucuguaaagguuuuuggaauuaugucugcugaauaauaaacuuuuuugaaauaauaaaucugguagaaaaaugagaucucaaaggcucuuuucagagccaccaaaaaaaaaaaaaaaaaaaaaaaaaaaaaaaaaaaaaaaaaaaaaaaaaaaaaaaaaaaaaaaaagaauu

SEQ ID NO: 37550 - RNA, 1778 nt, Artificial Sequence
  mRNA product Design b-4 (hSL-A64-N5) comprising derived and/or modified sequence from LASV(ISTH2010-NIG-2012;Clade II)__AIT17482__GPCmut10 (opt5)
aggagagucccgcagucggcguccagcggcucugcuuguucgugugugugucguugcaggccuuauucaagcuuaccaugggccagaucauuaccuucuuucaagaggugccccacgucaucgaagagguuaugaacauugugcugaucgcccucagccugcuugcuauucugaaggggaucuacaauguggccacaugcggacucuucggccuggucuccuuucuucugcucugugggagaucuugcagcacgaccuauaaaggaguguacgaacugcagacacuggagcucgacauggcgucccugaacauguguaugccucuuucuugcaccaagaauaacagccaucacuauaucaugguuggcaaugaaacagggcuggagcucacccugacaaacaccuccauuaucaaucauaaauucuguaaccuuucugaugcucacaagaaaaaucuguacgaccaugcccucaugagcauuaucuccacguuucaccugagcauuccgaacuucaaucaguaugaggccaugucuugcgauuuuaacggaggcaagaucuccgugcaguacaaucugagccacgcuuaugccgucgacgcugccaaccauuguggcaccauugcgaauggggugcuccaaacauucaugcggauggccuggggaggcucuuacaucgcucuggauuccgggaagggaagcugggacugcaucaugaccucuuaccaguaucuuauuauccagaacauuacaugggaagaucacugucaguuuucccgccccagcccuaucggcuaccuggggcuccugucccaaagaacccgggacauuuauaucucucgcagacuucugggaacguucacauggacccucagcgauuccgagggcaacgaaacacccggcggguacugccugacccgguggaugcugaucgaggccgagcucaaauguuuuggaaauaccgcuguugccaagugcaacgaaaaacaugacgaggaguucugcgauaugcugcgccuuuuugacuucuguaagcaggcgauuagacggcugaaaacagaagcccagaugagcauccagcucauuaauaaggcugugaacgcccugaucaaugaucaacuuauuaugaagaaccaucugcgcgacaucaugggcaucccuuauugcaauuacucuaaauauugguaccucaaccacacggucaccgggaagacaucccugcccagauguuggcuggugagcaauggaucuuaccucaacgaaacccacuucagcgacgauauugagcagcaggcugacaauaugaucacagagcugcuucaaaaagaauauauugaucggcagggcaagaccccucuggggcucguggaccuguuugucuucuccacgucuuuuuaccugaucagcauuuuccuucaccucguuaaaaucccgacacaucgccacguggugggaaagcccugcccuaaaccccauagacugaaccacaugggcauuuguuccugcggccuguauaagcacccugggguccccgugaaguggaaacggugaggacuaguaauaaggaaacuguaugaaugucugugggcaggaagugaagagauccuucuguaaagguuuuuggaauuaugucugcugaauaauaaacuuuuuugaaauaauaaaucugguagaaaaaugagaucucaaaggcucuuuucagagccaccaaaaaaaaaaaaaaaaaaaaaaaaaaaaaaaaaaaaaaaaaaaaaaaaaaaaaaaaaaaaaaaaagaauu

SEQ ID NO: 37551 - RNA, 1778 nt, Artificial Sequence
  mRNA product Design b-4 (hSL-A64-N5) comprising derived and/or modified sequence from LASV(Lassa virus/H.sapiens-wt/NGA/2015/ISTH_0543;Clade II)__AVO03639__GPCmut10 (opt5)
aggagagucccgcagucggcguccagcggcucugcuuguucgugugugugucguugcaggccuuauucaagcuuaccaugggccagaucauuaccuucuuucaagaggugccccacgucaucgaagagguuaugaacauugugcugaucgcccucagccugcuugcuauucugaaggggaucuacaauguggccacaugcggacucuucggccuggucuccuuucuucugcucugugggagaucuugcagcacgaccuauaaaggaguguacgaacugcagacacuggagcucgacauggcgaaccugaauauguguaugccucuuuccugcaccaagaacaauucucaucacuauaucaugguuggcaacgaaacagggcuggagcucacccugacaaauaccagcauuaucaaccauaaauucuguaaucuuuccgaugcucacaagaaaaaccuguacgaccaugcccucaugucuauuaucagcacguuucaccuguccauuccgaauuucaaccaguaugaggccaugagcugcgauuuuaauggaggcaagaucucugugcaguacaaccugucccacaccuaugcugucgacgccgcuaaucauuguggcacaauugccaacggggugcuccaaaccuucaugcggauggcguggggaggcagcuacaucgcccuggauucugggaagggauccugggacugcaucaugacaagcuaccaguaucuuguuauucagaacaccacgugggaagaucacugucaguuuucucgccccuccccuaucggcuaccuggggcuccugagccaaagaacacgggacauuuauaucucccgcagacuucugggaaccuucacauggacccucucugauagcgagggcaaugaaacccccggcggguacugccugacacgguggaugcugauugaggcugagcucaaauguuuuggaaacacggccguggcuaagugcaaugaaaaacaugacgaggaguucugcgauaugcugcgccuuuuugacuucuguaagcaggccaucagacggcugaaaaccgaagcgcagauguccauccagcucauuaacaaggccgucaaugcucugaucaacgaucaacuuauuaugaagaaucaucugcgcgacaucaugggcauuccuuauugcaacuacagcaaauauugguaccucaaucacacagugaccgggaagacaucucugcccagauguuggcugguguccaacggaagcuaccucaaugaaacccacuucucugacgauaucgagcagcaggccgacaacaugaucacggagcugcuucaaaaagaauauauugaucggcagggcaagacaccucuggggcucgucgaccuguuuguuuucagcaccuccuuuuaccugaucucuauuuuccuucaccucgugaaaaucccgacccaucgccacauuacaggaaagcccugcccuaaaccccauagacugaaucacaugggcaucuguagcugcggccuguauaagcacccuggggugcccgucaaguggaaacggugaggacuaguaauaaggaaacuguaugaaugucugugggcaggaagugaagagauccuucuguaaagguuuuuggaauuaugucugcugaauaauaaacuuuuuugaaauaauaaaucugguagaaaaaugagaucucaaaggcucuuuucagagccaccaaaaaaaaaaaaaaaaaaaaaaaaaaaaaaaaaaaaaaaaaaaaaaaaaaaaaaaaaaaaaaaaagaauu

SEQ ID NO: 37552 - RNA, 1778 nt, Artificial Sequence
  mRNA product Design b-4 (hSL-A64-N5) comprising derived and/or modified sequence from LASV(Lassa virus/H.sapiens-wt/NGA/2016/ISTH_0009;Clade II)__AVO03571__GPCmut10 (opt5)
aggagagucccgcagucggcguccagcggcucugcuuguucgugugugugucguugcaggccuuauucaagcuuaccaugggccagaucauuaccuucuuucaagaggugccccacgucaucgaagagguuaugaacauugugcugaucgcccucagccugcuugcuauucugaaggggaucuacaauguggccacaugcggacuccugggccuugucuccuuccugcuccugugugggagaucuugcagcacgaccuauaaaggaguguacgaacugcagacacucgagcuggacauggcgucccuuaacauguguaugccucugucuugcaccaagaauaacagccaucacuauaucaugguuggcaaugaaacagggcucgagcugacccuuacaaacaccuccauuaucaaucauaaauuuuguaaccugucugaugcucacaagaaaaaucucuacgaccaugcccugaugagcauuaucuccacguuccaccugagcauuccgaacuuuaaucaguaugaggccaugucuugcgauuucaacggaggccggaucuccgugcaguacaaucucagccacucuuaugcugucgacgccgcuaaccauuguggcaccauugccaauggggugcugcaaacauuuaugcgcauggcguggggaggcuccuacaucgcccuugauagcgggaagggaucuugggacugcaucaugaccuccuaccaguaucugauuauccagaacacaaccugggaagaucacugucaguucagcagacccuccccuauuggcuaccucgggcugcuuucucaacggacgcgcgacaucuauauuagcagacggcugcucggaacauuuaccuggacacuguccgauagcgagggcaacgaaacccccggcggguacugccugacccgcuggaugcucaucgaggcugagcugaaguguuucggaaauacagccguugcuaaaugcaacgaaaagcaugacgaggaauuuugcgauaugcuuagacuguucgacuuuuguaaacaggccauccggcgccucaagacggaggcgcagaugucuauucagcugaucaauaaagccgugaacgcucuuauuaaugaucaacugaucaugaagaaccaccucagagacauuaugggcaucccuuauugcaauuacuccaaguauugguaccugaaccacaccgucacagggaaaaccagccugccccgguguuggcucgugucuaauggaagcuaccugaacgaaacacauuucuccgacgauaucgagcagcaggccgacaauaugauuaccgagcuucugcaaaaggaauauaucgaucgccagggcaaaacgccucucgggcugguggaccuguucgucuuuucuaccagcuucuaccuuauuuccaucuuucuccaccugguuaagauuccgacacauagacacaucaccggaaaacccugcccuaagccccaucggcugaaccacaugggcauuuguagcugcggccucuauaaucacccuggggugcccgugaaauggaagcgcugaggacuaguaauaaggaaacuguaugaaugucugugggcaggaagugaagagauccuucuguaaagguuuuuggaauuaugucugcugaauaauaaacuuuuuugaaauaauaaaucugguagaaaaaugagaucucaaaggcucuuuucagagccaccaaaaaaaaaaaaaaaaaaaaaaaaaaaaaaaaaaaaaaaaaaaaaaaaaaaaaaaaaaaaaaaaagaauu

SEQ ID NO: 37553 - RNA, 1778 nt, Artificial Sequence
  mRNA product Design b-4 (hSL-A64-N5) comprising derived and/or modified sequence from LASV(Lassa virus/H.sapiens-wt/NGA/2016/ISTH_0017;Clade II)__AVO03567__GPCmut10 (opt5)
aggagagucccgcagucggcguccagcggcucugcuuguucgugugugugucguugcaggccuuauucaagcuuaccaugggccagaucauuaccuucuuucaagaggugccccacgucaucgaagagguuaugaacauugugcugaucgcccucagccugcuugcuauucugaaggggaucuacaauguggccacaugcggacucuucggccuggucuccuuucuucugcucugugggagaucuugcagcacgaccuauaaaggaguguacgaacugcagacacuggagcucgacauggcgucccugaacauguguaugccucuuucuugcaccaagaauaacagccaucacuauaucaugguuggcaaugaaacagggcuggagcucacccugacaaacaccuccauuaucaaucauaaauucuguaaccuuucugaugcucacaagaaaaaucuguacgaccaugcccucaugagcauuaucuccacguuucaccugagcauuccgaacuucaaucaguaugaggccaugucuugcgauuuuaacggaggcaagaucuccgugcaguacaaucugagccacaccuaugcuauugacgccgcuaaccauuguggcacaaucgccaaugggguccuccaaaccuucaugcggauggcguggggaggcucuuacaucgcccuggauuccgggaagggaagcugggacugcauuaugacaucuuaccaguaucuuaucauucagaacaccacgugggaagaucacugucaguuuucccgccccagcccuaucggcuaccuggggcuccugucccaaagaacacgggacauuuauaucucucgcagacuucugggaaccuucacauggacccucagcgauuccgagggcaacgaaacccccggcggguacugccugacacgguggaugcugaucgaggcugagcucaaauguuuuggaaauacggccguggcuaagugcaacgaaaaacaugacgaggaguucugcgauaugcugcgccuuuuugacuucuguaagcaggccauuagacggcugaaaaccgaagcgcagaugagcauccagcucauuaauaaggccguuaacgcucugaucaaugaucaacuuauuaugaagaaccaucugcgcgacaucaugggcaucccuuauugcaauuacucuaaauauugguaccucaaccacacagugaccgggaagacaucccugcccagauguuggcuggucagcaauggaucuuaccucaacgaaacccacuucagcgacgauauugagcagcaggccgacaauaugaucacggagcugcuucaaaaagaauauauggaucggcagggcaagacaccucuggggcucguggaccuguuuguguucuccaccucuuuuuaccugauuagcaucuuccuucaccucguccgcauuccgacccauagacacguuaucggaaaacccugcccuaagccccaucggcugaaccacaugggcauuuguuccugcggccuguauaaacacccuggggugcccgugaaguggaagcgcugaggacuaguaauaaggaaacuguaugaaugucugugggcaggaagugaagagauccuucuguaaagguuuuuggaauuaugucugcugaauaauaaacuuuuuugaaauaauaaaucugguagaaaaaugagaucucaaaggcucuuuucagagccaccaaaaaaaaaaaaaaaaaaaaaaaaaaaaaaaaaaaaaaaaaaaaaaaaaaaaaaaaaaaaaaaaagaauu

SEQ ID NO: 37554 - RNA, 1778 nt, Artificial Sequence
  mRNA product Design b-4 (hSL-A64-N5) comprising derived and/or modified sequence from LASV(Lassa virus/H.sapiens-wt/NGA/2018/ISTH_0959;Clade II)__AVV65099__GPCmut10 (opt5)
aggagagucccgcagucggcguccagcggcucugcuuguucgugugugugucguugcaggccuuauucaagcuuaccaugggccagaucauuaccuucuuucaagaggugccccacgucaucgaagagguuaugaacauugugcugaucgcccucagccugcuugcuauucugaaggggaucuacaauguggucacaugcggacucuucggccugguguccuuucuucugcucugugggagaucuugcagcacgaccuauaaaggaguuuacgaacugcagacacuggagcucgacauggccucccugaacauguguaugccucuuucuugcaccaagaauaacagccaucacuauaucauggugggcaaugaaacagggcuggagcucacccugacaaacaccuccauuaucaaucauaaauucuguaaccuuucugaugcgcacaagaaaaaucuguacgaccaugcucucaugagcauuaucuccacguuucaccugagcauuccgaacuucaaucaguaugaggccaugucuugcgauuuuaacggaggcaagaucuccguccaguacaaucugagccacgccuaugcuauugacgccgcuaaccauuguggcaccaucgccaauggggugcuccaaacauucaugcggauggcguggggaggcucuuacaucgcccuggauuccgggaagggaagcugggacugcauuaugaccucuuaccaguaucuuaucauucagaacacaaccugggaagaucacugucaguuuucccgccccagcccuaucggcuaccuggggcuccugucccaaagaacgcgggacauuuauaucucucgcagacuucugggaacauucaccuggacacucagcgauuccgagggcaacgaaacccccggcggguacugccugacccgguggaugcugaucgaggcugagcucaaauguuuuggaaauacagccguugcuaagugcaacgaaaaacaugacgaggaguucugcgauaugcugcgccuuuuugacuucuguaagcaggccauuagacggcugaaaacggaagcgcagaugagcauccagcucauuaauaaggccgugaacgcucugaucaaugaucaacuuauuaugaagaaccaucugcgcgacaucaugggcaucccuuauugcaauuacucuaaauauugguaccucaaccacaccgucacagggaagaccucccugcccagauguuggcuggugagcaauggaucuuaccucaacgaaacacacuucagcgacgauauugagcagcaggccgacaauaugaucaccgagcugcuucaaaaagaauauauugaucggcagggcaagacgccucuggggcucguggaccuguuugucuucuccacaucuuuuuaccugaucagcauuuuccuucaccucguuaaaaucccgacccaucgccacgugauuggaaagcccugcccuaaaccccauagacugaaccacaugggcaucuguuccugcggccuguauaagcacccuggggugcccgucaaguggaaacggugaggacuaguaauaaggaaacuguaugaaugucugugggcaggaagugaagagauccuucuguaaagguuuuuggaauuaugucugcugaauaauaaacuuuuuugaaauaauaaaucugguagaaaaaugagaucucaaaggcucuuuucagagccaccaaaaaaaaaaaaaaaaaaaaaaaaaaaaaaaaaaaaaaaaaaaaaaaaaaaaaaaaaaaaaaaaagaauu

SEQ ID NO: 37555 - RNA, 1778 nt, Artificial Sequence
  mRNA product Design b-4 (hSL-A64-N5) comprising derived and/or modified sequence from LASV(LASV003-NIG-2008;Clade II)__AIT17580__GPCmut10 (opt5)
aggagagucccgcagucggcguccagcggcucugcuuguucgugugugugucguugcaggccuuauucaagcuuaccaugggccagaucauuaccuucuuucaagaggugccccacgucaucgaagagguuaugaacauugugcugaucgcccucagccugcuugcuauucugaaggggaucuacaauguggccacaugcggacucuucggccuggucuccuuucuucugcucugugggagaucuugcagcacgaccuauaaaggaguguacgaacugcagacacuggagcucgacauggcgucccugaacauguguaugccucuuucuugcaccaagaauaacagccaucacuauaucaugguuggcaaugaaacagggcuggagcucacccugacaaacaccuccauuaucaaucauaaauucuguaaccuuucugaugcucacaagaaaaaucuguacgaccaugcccucaugagcauuaucuccacguuucaccugagcauuccgaacuucaaucaguaugaggccaugucuugcgauuuuaacggaggcaagaucuccgugcaguacaaucugagccacaccuaugcugucgacgccgcuaaccauuguggcacaauugccaauggggugcuccaaaccuucaugcggauggcguggggaggcucuuacaucgcccuggauuccgggaagggaagcugggacugcaucaugacaucuuaccaguaucuuauuauccagaacaccacgugggaagaucacugucaguuuucccgccccagcccuauuggcuaccuggggcuccugucccaaagaacacgggacaucuauauuucucgcagacuucugggaaccuucacauggacccucagcgauuccgagagcaacgaaacccccggcggcuacugccugacacgguggaugcugaucgaggcugagcucaaauguuuugggaauacggccguugcuaagugcaacgaaaaacaugacgaggaguucugcgauaugcugcgccuuuuugacuucuguaagcaggccaucagacggcugaaagcggaagcccagaugucuauucagcucaucaauaaggcugugaacgcccugauuaaugaucaacuuaucaugaagaaccaucugcgcgacauuaugggaaucccuuauugcaauuacuccaaauauugguaccucaaccacaccgucacaggcagaaccagccugccccgguguuggcuggugucuaaugggagcuaccucaacgaaacacacuucuccgacgauaucgagcagcaggcugacaauaugauuaccgagcugcuucaaaaggaauauauggaucgccagggaaaaacgccucugggccucguggaccuguuugucuucucuaccagcuuuuaccugaucuccauuuuccuucaccucguuaagaucccgacacauagacacgugauugggaaacccugcccuaagccccaucggcugaaccacaugggaaucuguagcugcggccuguauaaacacccuggcgugcccgucaaguggaagcgcugaggacuaguaauaaggaaacuguaugaaugucugugggcaggaagugaagagauccuucuguaaagguuuuuggaauuaugucugcugaauaauaaacuuuuuugaaauaauaaaucugguagaaaaaugagaucucaaaggcucuuuucagagccaccaaaaaaaaaaaaaaaaaaaaaaaaaaaaaaaaaaaaaaaaaaaaaaaaaaaaaaaaaaaaaaaaagaauu

SEQ ID NO: 37556 - RNA, 1778 nt, Artificial Sequence
  mRNA product Design b-4 (hSL-A64-N5) comprising derived and/or modified sequence from LASV(LASV035-NIG-2009;Clade II)__AIT17588__GPCmut10 (opt5)
aggagagucccgcagucggcguccagcggcucugcuuguucgugugugugucguugcaggccuuauucaagcuuaccaugggccagaucauuaccuucuuucaagaggugccccacgucaucgaagagguuaugaacauugugcugaucgcccucagccugcuugcuauucugaaggggaucuacaauguggccacaugcggacucuucggccuggucuccuuucuucugcucugugggagaucuugcagcacgaccuauaaaggaguguacgaacugcagacacuggagcucgacauggcgucccugaacauguguaugccucuuucuugcaccaagaauaacagccaucacuauaucaugguuggcaaugaaacagggcuggagcucacccugacaaacaccuccauuaucaaucauaaauucuguaaccuuucugaugcucacaagaaaaaucuguacgaccaugcccucaugagcauuaucuccacguuucaccugagcauuccgaacuucaaucaguaugaggccaugucuugcgauuuuaacggaggcaagaucuccgugcaguacaaucugagccacgcuuaugccgucgacgcugccaaccauuguggcaccauugcgaauggggugcuccaaacauucaugcggauggccuggggaggcucuuacaucgcucuggauuccgggaagggaagcugggacugcaucaugaccucuuaccaguaucuuauuauccagaacacaaccugggaagaucacugucaguuuucccgccccagcccuauuggcuaccuggggcuccugucccaaagaacgcgggacaucuauauuucucgcagacuucugggaacauucaccuggacacucagcgauuccgagggcaacgaaacccccggcggguacugccugacccgguggaugcugaucgaggccgagcucaaauguuuuggaaauacagcuguugccaagugcaacgaaaaacaugacgaggaguucugcgauaugcugcgccuuuuugacuucuguaagcaggcgaucagacggcugaaagccgaagcucagaugagcauucagcucaucaauaaggccgugaacgcucugauuaaugaucaacuuaucaugaagaaccaucugcgcgacauuaugggcaucccuuauugcaauuacucuaaauauugguaccucaaccacacggucaccgggaagacaucccugcccagauguuggcuggugagcaauggaucuuaccucaacgaaacccacuucagcgacgauaucgagcagcaggccgacaauaugauuacagagcugcuucaaaaagaauauaucgaucggcagggcaagaccccucuggggcucguggaccuguuugucuucuccacgucuuuuuaccugauuagcaucuuccuucaccucguuaaaauuccgacacaucgccacgugaucggaaagcccugcccuaaaccccauagacugaaccacaugggcauuuguuccugcggccuguauaagcacccuggggugcccgucaaguggaaacggugaggacuaguaauaaggaaacuguaugaaugucugugggcaggaagugaagagauccuucuguaaagguuuuuggaauuaugucugcugaauaauaaacuuuuuugaaauaauaaaucugguagaaaaaugagaucucaaaggcucuuuucagagccaccaaaaaaaaaaaaaaaaaaaaaaaaaaaaaaaaaaaaaaaaaaaaaaaaaaaaaaaaaaaaaaaaagaauu

SEQ ID NO: 37557 - RNA, 1778 nt, Artificial Sequence
  mRNA product Design b-4 (hSL-A64-N5) comprising derived and/or modified sequence from LASV(LASV1000-NIG-2009;Clade II)__AIT17782__GPCmut10 (opt5)
aggagagucccgcagucggcguccagcggcucugcuuguucgugugugugucguugcaggccuuauucaagcuuaccaugggccagaucauuaccuucuuucaagaggugccccacgucaucgaagagguuaugaacauugugcugaucgcccucagccugcuugcuauucugaaggggaucuacaauguggccacaugcggacucuucggccuggucuccuuucuucugcucugugggagaucuugcagcacgaccuauaaaggaguguacgaacugcagacacuggagcucgacauggcgucccugaacauguguaugccucuuucuugcaccaagaauaacagccaucacuauaucaugguuggcaaugaaacagggcuggagcucacccugacaaacaccuccauuaucaaucauaaauucuguaaccuuucugaugcucacaagaaaaaucuguacgaccaugcccucaugagcauuaucuccacguuucaccugagcauuccgaacuucaaucaguaugaggccaugucuugcgauuuuaacggaggcaagaucuccgugcaguacaaucugagccacaccuaugcugucgacgccgcuaaccauuguggcacaauugccaauggggugcuccaaaccuucaugcggauggcguggggaggcucuuacaucgcccuggauuccgggaagggaagcugggacugcaucaugacaucuuaccaguaucuuauuauccagaacaccacgugggaagaucacugucaguuuucccgccccagcccuauuggcuaccuggggcuccugucccaaagaacacgggacaucuauauuucucgcagacuucugggaaccuucacauggacccucagcgauuccgagggcaacgaaacccccggcggguacugccugacacgguggaugcugaucgaggcugagcucaaauguuuuggaaauacggccguugcuaagugcaacgaaaaacaugacgaggaguucugcgauaugcugcgccuuuuugacuucuguaagcaggccaucaaaagacugaagaccgaagcgcagaugagcauucagcucaucaauaaggccgugaacgcucugauuaaugaucaacuuaucaugaaaaaccaucugcgggacauuaugggcaucccuuauugcaauuacucuaaguauugguaccucaaccacacagucaccgggaaaacaucccugccccgcuguuggcuggugagcaauggaucuuaccucaacgaaacccacuucagcgacgauaucgagcagcaggccgacaauaugauuacggagcugcuucaaaaggaauauaucgauagacagggcaaaacaccucuggggcucguggaccuguuugucuucuccaccucuuuuuaccugauuagcaucuuccuucaccucguuaagauuccgacccaucggcacguggugggaaaacccugcccuaagccccaucgccugaaccacaugggcaucuguuccugcggccuguauaagcacccugggguccccgugaaauggaagagaugaggacuaguaauaaggaaacuguaugaaugucugugggcaggaagugaagagauccuucuguaaagguuuuuggaauuaugucugcugaauaauaaacuuuuuugaaauaauaaaucugguagaaaaaugagaucucaaaggcucuuuucagagccaccaaaaaaaaaaaaaaaaaaaaaaaaaaaaaaaaaaaaaaaaaaaaaaaaaaaaaaaaaaaaaaaaagaauu

SEQ ID NO: 37558 - RNA, 1778 nt, Artificial Sequence
  mRNA product Design b-4 (hSL-A64-N5) comprising derived and/or modified sequence from LASV(LASV221-NIG-2010;Clade II)__AIT17624__GPCmut10 (opt5)
aggagagucccgcagucggcguccagcggcucugcuuguucgugugugugucguugcaggccuuauucaagcuuaccaugggccagaucauuaccuucuuucaagaggugccccacgucaucgaagagguuaugaacauugugcugaucgcccucagccugcuugcuauucugaaggggaucuacaauguggccacaugcggacucuucggccuggucuccuuucuucugcucugugggagaucuugcagcacgaccuauaaaggaguguacgaacugcagacacuggagcucgacauggcgucccugaacauguguaugccucuuucuugcaccaagaauaacagccaucacuauaucaugguuggcaaugaaacagggcuggagcucacccugacaaacaccuccauuaucaaucauaaauucuguaaccuuucugaugcucacaagaaaaaucuguacgaccaugcccucaugagcauuaucuccacguuucaccugagcauuccgaacuucaaucaguaugaggccaugucuugcgauuuuaacggaggcaagaucuccgugcaguacaaucugagccacaccuaugcuauugacgccgcuaaccauuguggcacaaucgccaaugggguccuccaaaccuucaugcggauggcguggggaggcucuuacaucgcccuggauuccgggaagggaagcugggacugcauuaugacaucuuaccaguaucuuaucauucagaacaccacgugggaagaucacugucaguuuucccgccccagcccuaucggcuaccuggggcuccugucccaaagaacacgggacauuuauaucucucgcagacuucugggaaccuucacauggacccucagcgauuccgagggcaacgaaacccccggcggguacugccugacacgguggaugcugaucgaggcugagcucaaauguuuuggaaauacggccguggcuaagugcaacgaaaaacaugacgaggaguucugcgauaugcugcgccuuuuugacuucuguaagcaggccauuagacggcugaaaaccgaagcgcagaugagcauccagcucauuaauaaggccguuaacgcucugaucaaugaucaacuuauuaugaagaaccaucugcgcgacaucaugggcaucccuuauugcaauuacucuaaauauugguaccucaaccacacagugaccgggaagacaucccugcccagauguuggcuggucagcaauggaucuuaccucaacgaaacccacuucagcgacgauauugagcagcaggccgacaauaugaucacggagaugcugcaaaaagaauauauggaucggcagggcaagacaccucuugggcugguggaccucuuuguguucuccaccucuuuuuaccugauuagcaucuuccugcaccuugucaaaauuccgacccaucgccacguuaucggaaagcccugcccuaaaccccauagacucaaccacaugggcauuuguuccugcggccuguauaagcacccuggggugcccgugaaguggaaacggugaggacuaguaauaaggaaacuguaugaaugucugugggcaggaagugaagagauccuucuguaaagguuuuuggaauuaugucugcugaauaauaaacuuuuuugaaauaauaaaucugguagaaaaaugagaucucaaaggcucuuuucagagccaccaaaaaaaaaaaaaaaaaaaaaaaaaaaaaaaaaaaaaaaaaaaaaaaaaaaaaaaaaaaaaaaaagaauu

SEQ ID NO: 37559 - RNA, 1778 nt, Artificial Sequence
  mRNA product Design b-4 (hSL-A64-N5) comprising derived and/or modified sequence from LASV(LASV237-NIG-2010;Clade II)__AIT17638__GPCmut10 (opt5)
aggagagucccgcagucggcguccagcggcucugcuuguucgugugugugucguugcaggccuuauucaagcuuaccaugggccagaucauuaccuucuuucaagaggugccccacgucaucgaagagguuaugaacauugugcugaucgcccucagccugcuugcuauucugaaggggaucuacaauguggccacaugcggacucuucggccuggucuccuuucuucugcucugugggagaucuugcagcacgaccuauaaaggaguguacgaacugcagacacuggagcucgacauggcgucccugaacauguguaugccucuuucuugcaccaagaauaacagccaucacuauaucaugguuggcaaugaaacagggcuggagcucacccugacaaacaccuccauuaucaaucauaaauucuguaaccuuucugaugcucacaagaaagaccuguacgaucaugcccucaugagcauuaucuccacguuucaccugagcauuccgaauuucaaccaguaugaggccaugucuugcgacuuuaauggaggcaagaucuccgugcaguacaaccugagccacaccuaugcugucgaugccgcuaaucauuguggcacaauugccaacggggugcuccaaaccuucaugcggauggcguggggaggcucuuacaucgcccuggacuccgggaagggaagcugggauugcaucaugacaucuuaccaguaucuuauuauccagaauaccacgugggaagaccacugucaguuuucccgccccagcccuauuggcuaccuggggcuccugucccaaagaacacgggauaucuauauuucucgcagacuucugggaaccuucacauggacccucagcgacuccgagggcaacgaaacccccggcggguacugccugacacgguggaugcugaucgaggcugagcucaaauguuuuggaaacacggccguugcuaagugcaaugaaaaacaugaugaggaguucugcgacaugcugcgccuuuuugauuucuguaagcaggccaucagacggcugaaaaccgaagcgcagaugagcauucagcucaucaacaaggccgugaaugcucugauuaacgaccaacuuaucaugaagaaucaucugcgcgacauuaugggcaucccuuauugcaacuacucuaaauauugguaccucaaucacacagucaccgggaagacaucccugcccagauguuggcuggugagcaacggaucuuaccucaaugaaacccacuucagcgaugacaucgagcagcaggccgauaacaugauuacggagcugcuucaaaaagaauauauggaccggcagggcaagacaccucuggggcucguggaucuguuugucuucuccaccucuuuuuaccugaucagcauuuuccuucaccucaucaaaauuccgacccaucgccacaucacaggaaagcccugcccuaaaccccauagacugaaucacaugggcauuuguuccugcggccuguauaagcacccugggguucccgugaaguggaaacggugaggacuaguaauaaggaaacuguaugaaugucugugggcaggaagugaagagauccuucuguaaagguuuuuggaauuaugucugcugaauaauaaacuuuuuugaaauaauaaaucugguagaaaaaugagaucucaaaggcucuuuucagagccaccaaaaaaaaaaaaaaaaaaaaaaaaaaaaaaaaaaaaaaaaaaaaaaaaaaaaaaaaaaaaaaaaagaauu

SEQ ID NO: 37560 - RNA, 1778 nt, Artificial Sequence
  mRNA product Design b-4 (hSL-A64-N5) comprising derived and/or modified sequence from LASV(LASV253-NIG-2011;Clade II)__AIT17670__GPCmut10 (opt5)
aggagagucccgcagucggcguccagcggcucugcuuguucgugugugugucguugcaggccuuauucaagcuuaccaugggccagaucauuaccuucuuucaagaggugccccacgucaucgaagagguuaugaacauugugcugaucgcccucagccugcuugcuauucugaaggggaucuacaauguggccacaugcggacucuucggccuggucuccuuucuucugcucugugggagaucuugcagcacgaccuauaaaggaguguacgaacugcagacacuggagcucgacauggcgucccugaacauguguaugccucuuucuugcaccaagaauaacagccaucacuauaucaugguuggcaaugaaacagggcuggagcucacccugacaaacaccuccauuaucaaucauaaauucuguaaccuuucugaugcucacaagaaaaaucuguacgaccaugcccucaugagcauuaucuccacguuucaccugagcauuccgaacuucaaucaguaugaggccaugucuugcgauuuuaacggaggcaagaucuccgugcaguacaaucugagccacaccuaugcugucgacgccgcuaaccauuguggcacaauugccaauggggugcuccaaaccuucaugcggauggcguggggaggcucuuacaucgcccuggauuccgggaagggaagcugggacugcaucaugacaucuuaccaguaucuuauuauccagaacaccacgugggaagaucacugucaguuuucccgccccagcccuauuggcuaccuggggcuccugucccaaagaacacgggacaucuauauuucucgcagacuucugggaaccuucacauggacccucagcgauuccgagggcaacgaaacccccggcggguacugccugacacgguggaugcugaucgaggcugagcucaaauguuuuggaaauacggccguugcuaagugcaacgaaaaacaugacgaggaguucugcgauaugcugcgccuuuuugacuucuguaagcaggccaucagacggcugaaagcggaagcccagaugagcauucagcucaucaauaaggcugugaacgcccugauuaaugaucaacuuaucaugaagaaccaucugcgcgacauuaugggcaucccuuauugcaauuacucuaaauauugguaccucaaccacaccgucacagggagaaccucccugccccgguguuggcuggugagcaauggaucuuaccucaacgaaacacacuucagcgacgauaucgagcagcaggcugacaauaugauuaccgagcugcuucaaaaggaauauaucgaucgccagggcaaaacgccucuggggcucguggaccuguuugucuucuccacaucuuuuuaccugauuagcaucuuccuucaccucguuaagauuccgacccauagacacaucauuggaaaacccugcccuaagccccaucggcugaaccacaugggcaucuguuccugcggccuguauaaacacccuggggugcccgugaaguggaagcgcugaggacuaguaauaaggaaacuguaugaaugucugugggcaggaagugaagagauccuucuguaaagguuuuuggaauuaugucugcugaauaauaaacuuuuuugaaauaauaaaucugguagaaaaaugagaucucaaaggcucuuuucagagccaccaaaaaaaaaaaaaaaaaaaaaaaaaaaaaaaaaaaaaaaaaaaaaaaaaaaaaaaaaaaaaaaaagaauu

SEQ ID NO: 37561 - RNA, 1778 nt, Artificial Sequence
  mRNA product Design b-4 (hSL-A64-N5) comprising derived and/or modified sequence from LASV(LASV254-NIG-2011;Clade II)__AIT17674__GPCmut10 (opt5)
aggagagucccgcagucggcguccagcggcucugcuuguucgugugugugucguugcaggccuuauucaagcuuaccaugggccagaucauuaccuucuuucaagaggugccccacgucaucgaagagguuaugaacauugugcugaucgcccucagccugcuugcuauucugaaggggaucuacaauguggccacaugcggacucuucggccuggucuccuuucuucugcucugugggagaucuugcagcacgaccuauaaaggaguguacgaacugcagacacuggagcucgacaugaccaaccugaauauguguaugccucuuuccugcacaaagaacaauucucaucacuauaucaugguuggcaacgaaaccgggcuggagcucacacugaccaauacgagcauuaucaaccauaaauucuguaaucuuuccgaugcgcacaagaaaaaccuguacaaucaugcucucaugucuauuaucagcaccuuucaccuguccauuccgaacuucaaucaguaugaggccaugagcugcgacuuuaacggaggcaagaucucugugcaguacaaucugucccacagcuaugccgucgaugcugccaaccauuguggcacaauugcuaacggggugcuccaaaccuucaugcggauggccuggggaggcucuuacaucgcgcuggacuccgggaagggaaauugggauugcaucaugacaagcuaccaguaucuuauuauccagaacaccacgugggaagaccacugucaguuuucucgccccuccccuauuggcuaccuggggcuccugagccaaagaacacgggauaucuauauuucccgcagacuucugggaaccuucacauggacccucucugacagcgagggcaaugaaacccccggcggguacugccugacacgguggaugcugaucgaggccgagcucaaauguuuuggaaacacggcuguugccaagugcaaugaaaaacaugaugaggaguucugcgacaugcugcgccuuuuugauuucuguaagcaggcuaucagacggcugaaaaccgaagcccaggcgaacauucagcucaucaauaaggccgugaacgcucugauuaaugaccaacuuaucaugaagaaccaucugcgcgauauuaugggcaucccuuauugcaauuacuccaaauauugguaccucaaccacacagucaccgggaagacaagccugcccagauguuggcuggugucuaauggauccuaccucaacgaaacccacuucagcgacgacaucgagcagcaggccgauaauaugauuacggagcugcuucaaaaagaauauauggaccggcagggcaagacaccucuggggcucguggaucuguuugucuucucuaccagcuuuuaccugaucuccauuuuccuucaccucguuaaaaucccgacccaucgccacgugauuggaaagcccugcccuaaaccccauagacugaaccacaugggcaucuguucuugcggccuguauaagcacccuggggugcccgucaaguggaaacggugaggacuaguaauaaggaaacuguaugaaugucugugggcaggaagugaagagauccuucuguaaagguuuuuggaauuaugucugcugaauaauaaacuuuuuugaaauaauaaaucugguagaaaaaugagaucucaaaggcucuuuucagagccaccaaaaaaaaaaaaaaaaaaaaaaaaaaaaaaaaaaaaaaaaaaaaaaaaaaaaaaaaaaaaaaaaagaauu

SEQ ID NO: 37562 - RNA, 1778 nt, Artificial Sequence
  mRNA product Design b-4 (hSL-A64-N5) comprising derived and/or modified sequence from LASV(Nig08-A19;Clade III)__ADU56618__GPCmut10 (opt5)
aggagagucccgcagucggcguccagcggcucugcuuguucgugugugugucguugcaggccuuauucaagcuuaccaugggccagaucgugaccuucuuucaagaggucccccacguuauugaagaggugaugaacaucgugcugauugcccucagcauccuggcuauucuuaaggggcuguacaauaucgccacaugcggacucaucggccuggucacguuccuucugcucuccgggagaucuuguagcaugaccuauaaaggaguguacgaacugcagacacuggagcucaacaugaauacccugaacaugugcaugccucuuuccuguacaaagaauaacucucaucacuauauuaugguuggcaaugaaaccgggcuggagcucacacugaccaacacgagccuucugcaucacaaauuuugcaaucucuccgacgcgcauaagaaaaaccuguacgaucacacccugaugucuaucauuagcacauuccaccucuccaucccgaauuuuaaccaguaugaggcuaugagcugugacuucaauggaggcaagauuaccgugcaguacaaccugucucauuccuaugccaucgaugccgcuaaucacugcggcacagucgccaacggggugcuucaaaccuuuaugcggauggcuuggggaggcagcuacauugcccuggacucugggcgcggaaagugggauuguaucaugacguccuaccaguaucucaucauucagaacacaaccugggaagaccauugccaguucagcagacccucuccuaucggcuaccuggggcuucugucccaacggacacgcgauauuuauaucagcagacggcuccugggaaccuuuaccuggacacuguccgacucugagggcaaugaaacgcccggcggguacugucucacccgcuggaugcugauugaggcggagcuuaaaugcuucggaaacacagccguugcuaaguguaaugaaaaacacgaugaggaauuuugcgacaugcugagacucuucgauuuuugcaagcaggccauccggcgccugaaagcugaggcccagaugagcauccagcuuauuaacaaggcggugaaugcccugaucaacgaccaacucauuaugaagaaucaccugagagauaucaugggcauuccuuauuguaacuacuccaaauauugguaccugaaucauaccagcacagggcggaccucucucccccgcugcuggcuggucuccaacggaagcuaccuuaaugaaacgcacuucucugacgacaucgagcagcaggcugauaacaugaucacagagaugcugcaaaaggaauaucucgacagacagggcaaaaccccucuggggcugguggaucuuuucguguuuagcaccuccuucuaccucauuucuaucuuucugcaucuggucaagauuccgacacaccggcauaucguuggaaaacccuguccuaagccccaccgccucaaucacaugggcauuugcagcuguggccuguauaaacagccuggggugcccgugagauggaagcggugaggacuaguaauaaggaaacuguaugaaugucugugggcaggaagugaagagauccuucuguaaagguuuuuggaauuaugucugcugaauaauaaacuuuuuugaaauaauaaaucugguagaaaaaugagaucucaaaggcucuuuucagagccaccaaaaaaaaaaaaaaaaaaaaaaaaaaaaaaaaaaaaaaaaaaaaaaaaaaaaaaaaaaaaaaaaagaauu

SEQ ID NO: 37563 - RNA, 1781 nt, Artificial Sequence
  mRNA product Design b-4 (hSL-A64-N5) comprising derived and/or modified sequence from LASV(G1180-SLE-2010;Clade IV)__AIT17168__GPCmut10 (opt5)
aggagagucccgcagucggcguccagcggcucugcuuguucgugugugugucguugcaggccuuauucaagcuuaccaugggccagaucgugaccuucuuucaagaggucccccacguuauugaagaggugaugaacaucgugcugauugcccucagcauccuggcuguccuuaaggggcuguacaauuucgccacaugcggacucgugggccugcuuacguuucugcuccugugugggagauccugcaccgcgucucgguauaaaggaguuuacgaacugcagacacucgagcugaacauggaaacccuuaauauguguaugccucugagcugcacaaagaacaauucccaucacuauauuauggugggcaacgagaccgggcucgagcugacacuuaccaauacgucuaucaucaaccauaaauucuguaaucugagcgacgcucacaagaaaaaccucuacgaucaugcccugauguccauuaucucuaccuuucaccugagcauuccgaauuucaaccaguaugaagccauguccugcgacuuuaauggaggcaagaucagcguccaguacaaccucucucacuccuaugcuggcgaugccgcuaaucauugugggacaguggccaacggaguucugcaaaccuucaugcgcauggcguggggcgggagcuacauugcccuugacucuggacacggcuccugggauugcaucaugacaagcuaccaguaucugauuauccagaacaccacgugggaggaccauugucaguuuucuagacccuccccuaucggguaccucggacugcuuagccaacggacacgcgauauuuauaucuccagacggcugcucggcaccuucacauggacccugucugacagcgaaggcaaggauacccccgggggauacugccugacacgcuggaugcucauugaggcugagcugaaauguuuuggcaauacggccguggcuaagugcaacgaaaaacacgacgaggaguucugcgauaugcuuagacuguuugacuucuguaagcaggccauccagcggcucaaagcggaagcccagauguccauucaacugaucaauaaggcugucaacgcccuuaucaaugaucagcugauuaugaagaaccaccuccgcgacaucauggggauuccuuauugcaauuacagcaaauauugguaccugaaccauaccacaaccggaaagacaucucugcccaaauguuggcucguguccaauggcagcuaccugaacgaaacccacuucucugacgauaucgagcagcaagcugacaauaugauuacggagaugcuucagaaggaauauauggagagacaggggaaaacaccucugggacucguggaucuguuugucuucagcaccuccuuuuaccugaucucuaucuuccuucaucucguuaagauuccgacccaccggcauaucgugggcaaaagcugccccaagccucaccgccugaaccacaugggcauuuguuccugcgggcuguauaagcagcccggagugccugucaaauggaagagaugaggacuaguaauaaggaaacuguaugaaugucugugggcaggaagugaagagauccuucuguaaagguuuuuggaauuaugucugcugaauaauaaacuuuuuugaaauaauaaaucugguagaaaaaugagaucucaaaggcucuuuucagagccaccaaaaaaaaaaaaaaaaaaaaaaaaaaaaaaaaaaaaaaaaaaaaaaaaaaaaaaaaaaaaaaaaagaauu

SEQ ID NO: 37564 - RNA, 1781 nt, Artificial Sequence
  mRNA product Design b-4 (hSL-A64-N5) comprising derived and/or modified sequence from LASV(G1442-SLE-2011;Clade IV)__AIT17180__GPCmut10 (opt5)
aggagagucccgcagucggcguccagcggcucugcuuguucgugugugugucguugcaggccuuauucaagcuuaccaugggccagaucgugaccuucuuucaagaggucccccacguuauugaagaggugaugaacaucgugcugauugcccucagcauccuggcuguccuuaaggggcuguacaauguggccacaugcggacucauuggccugguuacguuccuucugcucugugggagauccugcaccacaacccuguauaaaggaguguacgaacugcagacacucgagcugaacauggaaacccuuaauauguguaugccucugucuugcacaaagaacaauagccaucacuauauccgggucggcaacgagaccgggcucgagcugacgcuuaccaauacauccaucauuaaccauaaauuuuguaaucugucugacgcgcacaagaaaaaccucuacgaucaugcucugaugagcaucauuuccaccuuccaccugucuaucccgaauuuuaaccaguaugaagccaugagcugcgacuucaauggaggcaagauuuccgugcaguacaaccucagccacucuuaugccggcgaugcugccaaucauugugggacaguugcuaacggagugcugcaaaccuuuaugcgcauggccuggggcggguccuacaucgcgcuugacagcggaagaggcaacugggauugcauuaugacgucuuaccaguaucugaucauccagaauacaaccugggacgaucacugucaguucucccggcccagcccuauuggguaccucggacugcuuucucaacgcacaagagacgucuauaucucccggcgccugcucggcaccuuuaccuggacacugagcgauuccgagggcaaggacacgcccgggggauacugccugaccagauggaugcucauugaagccgagcugaaauguuucggcaacacagcuguggccaagugcaaugagaaacaugaugaagaguuuugcgacaugcuucggcuguucgauuuuuguaagcaggcuauccagcgccucaaagccgaagcgcagaugucuauucaacugaucaacaaggccgugaaugcucuuaucaacgaccagcugauuaugaagaaucaccucagagacaucauggggauuccuuauugcaacuacagcaaauauugguaccugaauaacaccgccacaggaaagaccucccugcccaaauguuggcucaucagcaauggcucuuaccugaacgagacgcacuucuccgaugacauugaacaggaggcugauaauaugaucacagagaugcuucaaaaggaauauauggagcggcaggggaaaaccccucugggacucgucgaccuguucguuuuuagcaccucuuucuaccugaucagcauuuuucuucaucucgugaagaucccgacacaccgccauauugugggcaaauccugccccaagccucacagacugaaccauaugggcaucuguucuugcgggcuguauaagcagcccggagucccugugcgguggaaacgcugaggacuaguaauaaggaaacuguaugaaugucugugggcaggaagugaagagauccuucuguaaagguuuuuggaauuaugucugcugaauaauaaacuuuuuugaaauaauaaaucugguagaaaaaugagaucucaaaggcucuuuucagagccaccaaaaaaaaaaaaaaaaaaaaaaaaaaaaaaaaaaaaaaaaaaaaaaaaaaaaaaaaaaaaaaaaagaauu

SEQ ID NO: 37565 - RNA, 1781 nt, Artificial Sequence
  mRNA product Design b-4 (hSL-A64-N5) comprising derived and/or modified sequence from LASV(G3010-SLE-2013;Clade IV)__AIT17344__GPCmut10 (opt5)
aggagagucccgcagucggcguccagcggcucugcuuguucgugugugugucguugcaggccuuauucaagcuuaccaugggccagaucgugaccuucuuucaagaggucccccacguuauugaagaggugaugaacaucgugcugauugcccucagcauccuggcuguccuuaaggggcuguacaauuucgccacaugcggacucgugggccugguuacguuucuucugcucugugggagauccugcaccacaucucuguauaaaggaguguacgaacugcagacccucgagcugaacauggaaacacuuaauauguguaugccucugagcugcaccaagaacaauucccaucacuauauuauggucggcaacgagacagggcucgagcugacccuuacgaauaccucuaucaucaaccauaaauucuguaaucugagcgacgcgcacaagaaaaaccucuacaaucaugcucugauguccauuaucucuacauuucaccugagcauuccgaacuucaaucaguaugaagccauguccugcgauuuuaacggaggcaagaucagcgugcaguacaaucucucucacuccuaugccggcgacgcugccagccauugugggaccguugcuaacggagugcugcaaacauucaugcggauggccuggggcgggucuuacauugcgcuugauuccggauacggcaagugggacugcaucaugaccagcuaucaguaccugauuauccagaacacgacaugggaggaucacugucaguuuucucgccccuccccuaucggguaucucggacugcuuagccaaagaacccgggacauuuacaucucccgcagacugcucggcacauucaccuggacccugucugauagcgaaggcaaagacacacccgggggauauugccugacgcgguggaugcucauugaggccgagcugaaguguuuuggcaauaccgcugucgccaaaugcaacgaaaagcaugaugaggaguucugcgacaugcuucgccuguuugauuucuguaaacaggcuauccagagacucaagacagaagcccagauguccauucaacugaucaauaaggcggugaacgcccuuaucaaugaccagcugauuaugaaaaaccaccuccgggauaucauggggauuccuuacugcaauuauagcaaguacugguaccugaaccacaccacaaccggaaaaacgucucugcccaaguguuggcucguguccaauggcagcuaucugaacgaaacacauuucucugacgacaucgagcagcaagcugauaauaugauuaccgagaugcuucagaaagaauacauggagcgccaggggaagaccccucugggacucgucgaccuguuuguuuucagcacauccuuuuaucugaucucuaucuuccuucaccucgugaaaauuccgacccauagacacaucgugggcaagagcugccccaagccucaucggcugaaccacaugggcauuuguuccugcgggcuguacaaacagcccggagucccugugcgcuggaagagaugaggacuaguaauaaggaaacuguaugaaugucugugggcaggaagugaagagauccuucuguaaagguuuuuggaauuaugucugcugaauaauaaacuuuuuugaaauaauaaaucugguagaaaaaugagaucucaaaggcucuuuucagagccaccaaaaaaaaaaaaaaaaaaaaaaaaaaaaaaaaaaaaaaaaaaaaaaaaaaaaaaaaaaaaaaaaagaauu

SEQ ID NO: 37566 - RNA, 1781 nt, Artificial Sequence
  mRNA product Design b-4 (hSL-A64-N5) comprising derived and/or modified sequence from LASV(G502-SLE-2009;Clade IV)__AIT17126__GPCmut10 (opt5)
aggagagucccgcagucggcguccagcggcucugcuuguucgugugugugucguugcaggccuuauucaagcuuaccaugggccagaucgugaccuucuuucaagaggucccccacguuauugaagaggugaugaacaucgugcugauugcccucagcauccuggcuguccuuaaggggcuguacaauuucgccacaugcggacucgugggccugcuuacguuucugcuccugugugggagauccugcaccacaggacuguauaaaggcguuuacgaacuccagacccuggagcuuaacauggaaacacugaauauguguaugccucucucuugcaccaagaacaauagccaucacuauauuaugguggggaacgagacaggacuggagcuuacccugacgaauaccuccaucaucaaccauaaauucuguaaucucucugacgcgcacaagaaaaaccuguacgaucaugcucugaugagcauuaucuccacauuucaccucucuauuccgaauuucaaccaguaugaagccaugagcugcgacuuuaauggcggcaagaucuccguccaguacaaccugagccacucuuaugccggggaugcugccgaccauuguggaaccguggcuaauggcguucuucaaacauucaugcggauggccuggggaggguccuacauugcgcuggauagcggccgcgggagaugggacugcaucaugaccucuuaccaguaucucauuauccagaacacgacaugggaggaucacugucaguuuucccggcccagcccuaucggauaccugggccuucugucucaacgcaccagagacauuuauaucucccggcgccuccugggcacauucaccuggacccugagcgauuccgaagggaaggacacacccggaggcuacugccucacgagauggaugcugauugaggccgagcuuaaauguuuugggaacaccgcuguggccaagugcaaugaaaaacaugaugaggaguucugcgacaugcugcggcucuuugauuucuguaagcaggcuauccagcgccugaaagccgaagcgcagaugucuauucaacuuaucaacaaggccgucaaugcucugaucaacgaccagcucgugaugaagaaucaccugagagacauuaugggaaucccuuauugcaacuacagccgguauugguaccugaaucacacaaccacaggccgcaccucccuccccaaauguuggcuggugagcaacgggucuuaccuuaaugaaacgcauuucuccgaugacauugagcagcaagccgauaacaugaucacagagaugcugcagaaggaauauauggagagacagggaaaaaccccucucggccuggucgaccuguuuguuuucagcaccucuuuuuaccuuauuagcaucuuccuccaccuggugaagaucccgacacaucggcacauugugggcaaauccugccccaagccucaucgccugaaucacauggggaucuguucuugcggacucuauaaacagcccggcgucccugugaaguggaagagaugaggacuaguaauaaggaaacuguaugaaugucugugggcaggaagugaagagauccuucuguaaagguuuuuggaauuaugucugcugaauaauaaacuuuuuugaaauaauaaaucugguagaaaaaugagaucucaaaggcucuuuucagagccaccaaaaaaaaaaaaaaaaaaaaaaaaaaaaaaaaaaaaaaaaaaaaaaaaaaaaaaaaaaaaaaaaagaauu

SEQ ID NO: 37567 - RNA, 1781 nt, Artificial Sequence
  mRNA product Design b-4 (hSL-A64-N5) comprising derived and/or modified sequence from LASV(G733-SLE-2010;Clade IV)__AIT17154__GPCmut10 (opt5)
aggagagucccgcagucggcguccagcggcucugcuuguucgugugugugucguugcaggccuuauucaagcuuaccaugggccagaucgugaccuucuuucaagaggucccccacguuauugaagaggugaugaacaucgugcugauugcccucagcauccuggcuguccuuaaggggcuguacaauuucgccacaugcggaauugugggccucguuuccuuucugcuucugugugggagaucuugcacgaccagccucuauaaaggaguguacgaacugcagacacuggagcucaacauggaaacccugaauauguguaugccucuuuccugcacaaagaacaauucucaucacuauaucauggucggcaacgagaccgggcuggagcucacacugaccaauacgagcaucauuaaccauaaauucuguaaucuuuccgacgcgcacaagaaaaaccuguacgaucaugcucucaugucuaucauuagcaccuuucaccuguccaucccgaauuucaaccaguaugaagccaugagcugcgacuuuaauggaggcaagauuucugugcaguacaaccugucccacagcuaugccggcgaugcugccaaucauugugggacaaucgcuaacggaguucuccaaaccuucaugcggauggccuggggcgggucuuacauugcgcuggacuccggacgcgauagaugggacugcaucaugacaagcuaccaguaucuuaucauucagaacaccacgugggaggaucacugucaguuuucucggcccuccccuaucggcuaccuggggcuccugagccaacgcacaagagacauuuauaucucccggcgccuucugggaaccuucacauggacccucucugauagcgaaggcaaggacacccccggcggguacugccugacaagauggaugcugauugaggccgagcucaaauguuuuggaaauacggcuguggccaagugcaacgaaaaacaugaugaggaguucugcgacaugcugcggcuuuuugauuucuguaagcaggcuauccagcgccugaaagccgaagcgcagauguccauccaacucauuaauaaggccgucaacgcucugaucaaugaccagcuuauuaugaagaaccaccugagagacaucaugggcauuccuuauugcaauuacagcaaauauugguaccucaaccacaccacaaccgggaagacaucucugcccaaauguuggcugguguccaauggaagcuaccucaacgaaacccauuucucugaugacaucgagcagcaagccgauaauaugaucacggagaugcugcagaaggaauauauggagcggcagggcaaaacaccucuugggcugguggaccucuuugucuucagcaccuccuuuuaccugauuucuaucuuccugcaccuuguuaagauuccgacccaucgccacguggugggaaaaagcugccccaagccucauagacucaaccacaugggcaucuguuccugcggccuguaugggcagcccggagucccugugaaguggaaacggugaggacuaguaauaaggaaacuguaugaaugucugugggcaggaagugaagagauccuucuguaaagguuuuuggaauuaugucugcugaauaauaaacuuuuuugaaauaauaaaucugguagaaaaaugagaucucaaaggcucuuuucagagccaccaaaaaaaaaaaaaaaaaaaaaaaaaaaaaaaaaaaaaaaaaaaaaaaaaaaaaaaaaaaaaaaaagaauu

SEQ ID NO: 37568 - RNA, 1781 nt, Artificial Sequence
  mRNA product Design b-4 (hSL-A64-N5) comprising derived and/or modified sequence from MOPV/LASV reassortant(IGS-1;Clade IV)__AFY05576__GPCmut10 (opt5)
aggagagucccgcagucggcguccagcggcucugcuuguucgugugugugucguugcaggccuuauucaagcuuaccaugggccagaucgugaccuucuuucaagaggucccccacguuauugaagaggugaugaacaucgugcugauugcccucagcguccuggcugugcuuaaggggcuguacaauuucgccacaugcggacucguuggccuggugacguuucuucugcucugugggagauccugcaccacaucucuguauaaaggagucuacgaacugcagacccucgagcugaacauggaaacacuuaauauguguaugccucugagcugcaccaagaacaauucccaucacuauaucauggugggcaacgagacagggcucgagcugacccuuacgaauaccucuauuaucaaccauaaauucuguaaucugagcgacgcgcacaagaaaaaccucuacgaucaugcucugauguccaucauuucuacauuucaccugagcaucccgaauuucaaccaguaugaagccauguccugcgacuuuaauggaggcaagauuagcguucaguacaaccucucucacuccuaugccggcgaugcugccaaucauugugggaccguggcuaacggaguccugcaaacauucaugcggauggccuggggcgggagcuacaucgcgcuugacucuggacgcggcaacugggauugcauuaugaccuccuaccaguaucugaucauucagaauacgacaugggaggaccacugucaguuuagcagacccucuccuaucggguaccucggacugcuuucccaacggacccgcgauaucuauauuagcagacggcugcucggcacauucaccuggacccuguccgacucugaaggcgaggauacacccgggggauacugccugacgcgcuggaugcucaucgaggccgaacugaaguguuuuggcaacaccgcuguggccaaaugcaaugagaagcaugacgaagaguucugcgauaugcuuagacuguuugacuucuguaaacaggcuauucagcggcucaaggccgaagcgcagaugagcauccaacugauuaacaaagccgugaaugcucuuaucaacgaucagcugaucaugaagaaucaccuccgcgacauuauggggaucccuuauugcaacuacuccaaguauugguaccugaaucacacaaccacaggaagaaccagccugcccaaauguuggcucgucucuaacggcuccuaccugaaugagacgcauuucagcgacgauauugagcagcaagccgacaacaugaucacagaaaugcuucagaaggaguauauggaacggcaggggaaaaccccucugggacucguugaucuguuuguguucucuaccagcuuuuaccugauuuccaucuuccuucaccucgugaagaucccgacacaucgccacauugucggcaaaucuugccccaagccucauagacugaaucacaugggcaucuguagcugcgggcuguauaaacagcccggagugccuguuaaguggaagcggugaggacuaguaauaaggaaacuguaugaaugucugugggcaggaagugaagagauccuucuguaaagguuuuuggaauuaugucugcugaauaauaaacuuuuuugaaauaauaaaucugguagaaaaaugagaucucaaaggcucuuuucagagccaccaaaaaaaaaaaaaaaaaaaaaaaaaaaaaaaaaaaaaaaaaaaaaaaaaaaaaaaaaaaaaaaaagaauu

SEQ ID NO: 37569 - RNA, 1781 nt, Artificial Sequence
  mRNA product Design b-4 (hSL-A64-N5) comprising derived and/or modified sequence from LASV(LM765-SLE-2012;Clade IV)__AIT17814__GPCmut10 (opt5)
aggagagucccgcagucggcguccagcggcucugcuuguucgugugugugucguugcaggccuuauucaagcuuaccaugggccagaucgugaccuucuuucaagaggucccccacguuauugaagaggugaugaacaucgugcugauugcccucagcauccuggcuguccuuaaggggcuguacaauuucgccacaugcggacucgugggccugguuacguuucuucugcucugugggagauccugcaccacaucucuguauaaaggaguguacgaacugcagacccucgagcugaacauggaaacacuuaauauguguaugccucugagcugcaccaagaacaauucccaucacuauauuauggucggcaacgagacagggcucgagcugacccuuacgaauaccucuaucaucgaccauaaauucuguaaccugagcgaugcgcaccggaagaaucucuacgaccaugcucugauguccauuaucucuacauuucaccugagcauuccgaacuucaaucaguaugaagccauguccugcgauuuuaacggaggcaaaaucagcgugcaguacaaucucucucacuccuaugccaaggacgcugccgaucauuguggcaccguugcuaacggggugcugcaaacauucaugcgcauggccuggggaggcagcuacauugcgcuugacucugggagaggacggugggauugcaucaugaccuccuaccaguaucugauuauccagaauacgacaugggaggaccacugucaguuuagccgccccucuccuaucggcuaccucgggcugcuuucccaaagaacccgggauauuuauaucagccgcagacugcucggaacauucaccuggacccuguccgacucugaaggcaaggauacacccggcggguacugccugacgcgguggaugcucauugaggccgagcugaaauguuuuggaaacaccgcugucgccaagugcaacgaaaaacaugacgaggaguucugcgauaugcuucgccuguuugacuucuguaagcaggcuauccagagacucaaagccgaagcgcagaugagcauucaacugaucaauaaggccgugaacgcucuuaucaaugaccagcugauuaugaagaaccaccuccgggauaucaugggcauuccuuauugcaauuacuccaaauauugguaccugaaccacacaaccacagggaagaccagccugcccaaauguuggcucgugucuaauggauccuaccugaacgaaacgcauuucagcgacgauaucgagcagcaagccgacaauaugauuacagagaugcuucagaaggaauauauggagcgccagggcaaaaccccucuggggcucgucgaucuguuuguuuucucuaccagcuuuuaccugaucuccaucuuccuucaccucgugaagauuccgacacauagacacaucgugggaaaacccugcccuaagccccaucggcugaaccacaugggcauuuguucuugcggccuguauaagcagccugggguccccgugaaauggaagcgcugaggacuaguaauaaggaaacuguaugaaugucugugggcaggaagugaagagauccuucuguaaagguuuuuggaauuaugucugcugaauaauaaacuuuuuugaaauaauaaaucugguagaaaaaugagaucucaaaggcucuuuucagagccaccaaaaaaaaaaaaaaaaaaaaaaaaaaaaaaaaaaaaaaaaaaaaaaaaaaaaaaaaaaaaaaaaagaauu

SEQ ID NO: 37570 - RNA, 1781 nt, Artificial Sequence
  mRNA product Design b-4 (hSL-A64-N5) comprising derived and/or modified sequence from LASV(LM776-SLE-2012;Clade IV)__AIT17824__GPCmut10 (opt5)
aggagagucccgcagucggcguccagcggcucugcuuguucgugugugugucguugcaggccuuauucaagcuuaccaugggccagaucgugaccuucuuucaagaggucccccacguuauugaagaggugaugaacaucgugcugauugcccucagcauccuggcuguccuuaaggggcuguacaauuucgccacaugcggacucgugggccugguuacguuucuucugcucugugggagauccugcaccacaucuguguauaaaggagucuacgaacugcagacccuggagcucaacauggaaacacugaauauguguaugccucuuagcugcaccaagaacaauucccaucacuauauuauggugggcaacgagacagggcuggagcucacccugacgaauaccucuaucaucaaccauaaauucuguaaucuuagcgacgcgcacaagaaaaaccuguacgaucaugcucucauguccauuaucucuacauuucaccugagcauuccgaauuucaaccaguaugaagccauguccugcgacuuuaauggaggcaagaucagcguucaguacaaccugucucacuccuaugccggcgaugcugccaaucauugugggaccguggcuaacggaguccuccaaacauucaugcggauggccuggggcgggagcuacauugcgcuggacucuggacacggcaagugggauugcaucaugaccuccuaccaguaucuuauuauccagaacacgacaugggaggaccauugucaguuuagccgccccucuccuaucggguaccugggacuccugucccaaagaacccgggauauuuauaucagccgcagacuucugggcacauucaccuggacccucuccgacucugaaggcaaagauacacccgggggauacugccugacgcgguggaugcugauugaggccgagcucaaguguuuuggcaauaccgcuguggccaaaugcaacgaaaagcacgacgaggaguucugcgauaugcugcgccuuuuugacuucuguaaacaggcuauccagagacugaaggccgaagcgcagaugagcauucaacucaucaauaaggccgugaacgcucugaucaaugaucagcuuauuaugaaaaaccaucugcgggacaucauggggauuccuuauugcaauuacuccaaguauugguaccucaaccacacaaccacaggaaaaaccagccugcccaaguguuggcuggucucuaauggcuccuaccucaacgaaacgcacuucagcgacgauaucgagcagcaagccgacaauaugauuacagagaugcugcagaaagaauauauggagcgccaggggaagaccccucuuggacugguugaucucuuuguguucucuaccagcuuuuaccugaucuccaucuuccugcaucuugugaaaauuccgacacacagacauaucgucggcaagucuugccccaagccucaccggcucaaccacaugggcauuuguagcugcgggcuguauaaacagcccggagugccuguucgcuggaagagaugaggacuaguaauaaggaaacuguaugaaugucugugggcaggaagugaagagauccuucuguaaagguuuuuggaauuaugucugcugaauaauaaacuuuuuugaaauaauaaaucugguagaaaaaugagaucucaaaggcucuuuucagagccaccaaaaaaaaaaaaaaaaaaaaaaaaaaaaaaaaaaaaaaaaaaaaaaaaaaaaaaaaaaaaaaaaagaauu

SEQ ID NO: 37571 - RNA, 1781 nt, Artificial Sequence
  mRNA product Design b-4 (hSL-A64-N5) comprising derived and/or modified sequence from LASV(Mad39;Clade IV)__ANH09722__GPCmut10 (opt5)
aggagagucccgcagucggcguccagcggcucugcuuguucgugugugugucguugcaggccuuauucaagcuuaccaugggccagaucgugaccuucuuucaagaggucccccacguuauugaagaggugaugaacaucgugcugauugcccucagcauccuggcuguccuuaaggggcuguacaauguggccacaugcggacucauuggccugguuacguuccuucugcucugugggagauccugcaccacaacccuguauaaaggaguguacgaacugcaggcgcucgagcugaacauggaaacacuuaauauguguaugccucugucuugcaccaagaacaauagccaucacuauauccgggucggcaacgagacagggcucgagcugacccuuacgaauaccucccugaucaaccauaaauuuuguaaucucucugacgcucacaagaaaaaccuguacgaucaugcccugaugagcauuaucuccacauuccaccucucuauuccgaauuuuaaccaguaugaagccaugagcugcgacuucaaugauggaaagaucuccgugcaguacaaccugagccacaccuaugcuggcgacacagccaaucauuguggcaccguugcuaacggggugcuucaaacguuuaugcgcauggccuggggaggcucuuacauugcgcuggauuccgggagaggaggcugggacugcaucaugacaagcuaccaguaucucauuauccagaacaccacaugggaggaucacugucaguucucucggcccuccccuaucggguaccugggacuucugagccaacgcaccagagacauuuauaucucucggcgccuccugggcaccuuuacauggacgcuguccgauagcgaaggcaaggacacccccgggggauacugccucacaagauggaugcugauugaggccgagcuuaaauguuucggcaauaccgcugucgccaagugcaacgaaaaacaugaugaggaauuuugcgacaugcugcgccucuucgauuuuuguaagcaggcuauccagcggcugaaagccgaggcgcagauguccauucaacuuaucaauaaggccgugaacgcucugaucaaugaccagcucauuaugaagaaccaccugagagacaucauggggauuccuuauugcaauuacucuaaauauugguaccugaaccacacagugaccggaaagacgagccuccccaaauguuggcuggucuccaauggcagcuaccuuaacgaaacacauuucucugaugacaucgagcagcaagccgauaauaugauuaccgagaugcugcagaaggaauauauggagcggcaggggaaaaccccucucggacugguugaccuguucguguuuuccaccagcuucuaccuuaucucuaucuuucuccaccuggugaagauuccgacacaucgccacgucgugggcaaacccugcccuaagccccauagacugaaccacaugggcaucuguagcugcggguucuauaagcagccuggaguucccgugcgguggaaacgcugaggacuaguaauaaggaaacuguaugaaugucugugggcaggaagugaagagauccuucuguaaagguuuuuggaauuaugucugcugaauaauaaacuuuuuugaaauaauaaaucugguagaaaaaugagaucucaaaggcucuuuucagagccaccaaaaaaaaaaaaaaaaaaaaaaaaaaaaaaaaaaaaaaaaaaaaaaaaaaaaaaaaaaaaaaaaagaauu

SEQ ID NO: 37572 - RNA, 1781 nt, Artificial Sequence
  mRNA product Design b-4 (hSL-A64-N5) comprising derived and/or modified sequence from LASV(Z0947-SLE-2011;Clade IV)__AIT17840__GPCmut10 (opt5)
aggagagucccgcagucggcguccagcggcucugcuuguucgugugugugucguugcaggccuuauucaagcuuaccaugggccagaucgugaccuucuuucaagaggucccccacguuauugaagaggugaugaacaucgugcugauugcccucagcauccuggcuguccuuaaggggcuguacaauuucgccacaugcggacucgugggccugguuacguuucuucugcucugugggagauccugcaccauuucucuguauaaaggaguguacgaacugcagacacucgagcugaacauggaaacccuuaauauguguaugccucugagcugcacaaagaacaauucccaucacuauaucauggucggcaacgagaccgggcucgagcugacacuuaccaauacgucuaucauuaaccauaaauucuguaaucugagcgacgcgcacaagaaaaaccucuacgaucaugcucugauguccaucauuucuaccuuucaccugagcaucccgaauuucaaccaguaugaagccauguccugcgacuuuaauggaggcaagauuagcgugcaguacaaccucucucacuccuaugccggcgaugcugccaaucauugugggacaguugcuaacggagugcugcaaaccuucaugcggauggccuggggcgggagcuacaucgcgcuugacucuggacgcgauagaugggacugcauuaugacauccuaccaguaucugaucauccagaacaccacgugggaggaucacugucaguuuagccggcccucuccuauuggcuaccucgggcugcuuucccaacgcacaagagacaucuauauuagccggcgccugcucggaaccuucacauggacccuguccgauucugaaggcaaggacacccccggcggguacugccugacaagauggaugcucaucgaggccgagcugaaauguuuuggaaauacggcugucgccaagugcaacgaaaaacaugaugaggaguucugcgacaugcuucggcuguuugauuucuguaagcaggcuauucagcgccucaaagccgaagcgcagaugagcauccaacugaucaauaaggccgugaacgcucuuauuaaugaccagcugaucaugaagaaccaccucagagacauuaugggcaucccuuauugcaauuacuccaaauauugguaccugaaccacaccacaaccgggaagacaagccugcccaaauguuggcucgugucuaauggauccuaccugaacgaaacccauuucagcgaugacauugagcagcaagccgauaauaugaucacggagaugcuucagaaggaauauauggagcggcagggcaaaacaccucuggggcucgucgaccuguuuguuuucucuaccagcuuuuaccugaucuccauuuuccuucaccucgugaagaucccgacccaucgccacauugugggaaaacccugcccuaagccccauagacugaaccacaugggcaucuguucuugcggccuguauaagcagccugggguccccgugaaauggaagcggugaggacuaguaauaaggaaacuguaugaaugucugugggcaggaagugaagagauccuucuguaaagguuuuuggaauuaugucugcugaauaauaaacuuuuuugaaauaauaaaucugguagaaaaaugagaucucaaaggcucuuuucagagccaccaaaaaaaaaaaaaaaaaaaaaaaaaaaaaaaaaaaaaaaaaaaaaaaaaaaaaaaaaaaaaaaaagaauu

SEQ ID NO: 37573 - RNA, 1812 nt, Artificial Sequence
  mRNA product Design b-4 (hSL-A100) comprising derived and/or modified sequence from LASV(Josiah;Clade IV)__NP_694870__GPCmut10 (opt1)
aggagagucccgcagucggcguccagcggcucugcuuguucgugugugugucguugcaggccuuauucaagcuuaccaugggccagaucgugaccuucuuccaggaggucccccacgugaucgaggaggugaugaacaucguccugaucgcccucagcgugcuggccgugcugaaggggcucuacaacuucgcgaccugcggccuggucgggcuggugacguuccuccugcugugcggccgcuccugcaccaccagccucuacaaggggguguacgagcugcagacccuggagcucaacauggagacgcugaacaugugcaugccgcuguccugcaccaagaacaacagccaccacuacaucauggucggcaacgagaccggccucgagcugacgcugaccaacaccuccaucaucaaccacaaguucugcaaccucagcgacgcccacaagaagaaccuguacgaccacgcccugauguccaucaucagcaccuuccaccucuccauccccaacuucaaccaguacgaggccaugagcugcgacuucaacgggggcaagaucuccgugcaguacaaccugagccacuccuacgccggggacgcggccaaccacugcggcacgguggccaacgggguccugcagaccuucaugcggauggccuggggcggcagcuacaucgcgcucgacuccgggcgcggcaacugggacugcaucaugaccagcuaccaguaccugaucauccagaacaccacgugggaggaccacugccaguucucccggcccagccccaucggguaccugggccuccugucccagcgcacccgggacaucuacaucagccgccggcugcucggcaccuucaccuggacgcugagcgacuccgaggggaaggacaccccgggcggguacugccugacccgcuggaugcucaucgaggccgagcugaagugcuucggcaacaccgccguggccaagugcaacgagaagcacgacgaggaguucugcgacaugcugcggcuguucgacuucugcaagcaggccauccagcgccugaaggcggaggcccagaugagcauccagcugaucaacaaggccgugaacgcccucaucaacgaccagcugaucaugaagaaccaccuccgggacaucauggggauccccuacugcaacuacuccaaguacugguaccucaaccacacgaccaccggccgcaccagccugcccaagugcuggcuggucuccaacggcagcuaccucaacgagacgcacuucuccgacgacaucgagcagcaggccgacaacaugaucaccgagaugcugcagaaggaguacauggagcggcaggggaagacgccccugggccucguggaccuguucguguucagcaccuccuucuaccugaucagcaucuuccugcaccucgucaagaucccgacccaccgccacaucguggggaaguccugccccaagccccaccggcugaaccacaugggcaucugcagcugcgggcuguacaagcagcccggcgugccggucaaguggaagcgcugaggacuaguaauaaggaaacuguaugaaugucugugggcaggaagugaagagauccuucuguaaagguuuuuggaauuaugucugcugaauaauaaacuuuuuugaaauaauaaaucugguagaaaaaugagaucucaaaggcucuuuucagagccaccaaaaaaaaaaaaaaaaaaaaaaaaaaaaaaaaaaaaaaaaaaaaaaaaaaaaaaaaaaaaaaaaaaaaaaaaaaaaaaaaaaaaaaaaaaaaaaaaaaaaa

SEQ ID NO: 37574 - RNA, 1809 nt, Artificial Sequence
  mRNA product Design b-4 (hSL-A100) comprising derived and/or modified sequence from LASV(LP;Clade I)__AAF86701__GPCmut10 (opt1)
aggagagucccgcagucggcguccagcggcucugcuuguucgugugugugucguugcaggccuuauucaagcuuaccaugggccagaucaucaccuucuuccaggaggugccccacgucaucgaggaggugaugaacaucgugcugaucgcccucagccugcuggccauccucaaggggcuguacaacaucgcgaccugcggcaucaucgggcuggucgccuuccucuuccugugcggcaaguccugcagccugacgcucaagggcggguacgagcugcagacccuggagcucaacauggagacccugaacaugugcaugccgcuguccugcacgaagaacagcucccaccacuacauccgcgugggcaacgagaccgggcucgagcugacccugaccaacacgagcaucaucaaccacaaguucugcaaccucuccgacgcccacaagaagaaccuguacgaccacgcccugaugagcaucaucuccaccuuccaccucagcauccccaacuucaaccaguacgaggccauguccugcgacuucaacggcgggaagaucagcgugcaguacaaccugucccacagcuacgcgggcgacgccgccgagcacugcgggaccgucgccaacggcgugcugcagaccuucaugcggauggcguggggcgggcgcuacaucgcccucgacuccggcaaggggaacugggacugcaucaugacgagcuaccaguaccugaucauccagaacaccaccugggaggaccacugccaguucucccggcccagccccaucggcuaccugggccuccugucccagcgcacccgggacaucuacaucagccgccggcugcucgggacguucaccuggacccugagcgacuccgagggcaacgagacccccgggggcuacugccugacgcgcuggaugcucaucgaggccgagcugaagugcuucgggaacaccgccguggccaagugcaacgagaagcacgacgaggaguucugcgacaugcugcggcuguucgacuucugcaagcaggcgauccgccggcugaaggccgaggcccagaugagcauccagcugaucaacaaggccgucaacgcccucaucaacgaccagcugaucaugaagaaccaccuccgcgacaucaugggcauccccuacugcaacuacuccaaguacugguaccucaaccacaccagcuccggccggaccagccugcccaagugcuggcugaucuccaacgggagcuaccucaacgagacgcaguucuccgacgacaucgagcagcaggcggacaacaugaucaccgagaugcugcagaaggaguacaucgagcgccagggcaagaccccgcuggggcucguggacaucuucaucuucagcaccuccuucuaccugaucagcaucuuccugcaccugaucaagaucccgacgcaccggcacaucgugggcaagcccugccccaagccccaccgccucaaccacaugggggucugcuccugcggccuguacaagcacccgggcgugcccaccaaguggaagcggugaggacuaguaauaaggaaacuguaugaaugucugugggcaggaagugaagagauccuucuguaaagguuuuuggaauuaugucugcugaauaauaaacuuuuuugaaauaauaaaucugguagaaaaaugagaucucaaaggcucuuuucagagccaccaaaaaaaaaaaaaaaaaaaaaaaaaaaaaaaaaaaaaaaaaaaaaaaaaaaaaaaaaaaaaaaaaaaaaaaaaaaaaaaaaaaaaaaaaaaaaaaaaaaaa

SEQ ID NO: 37575 - RNA, 1809 nt, Artificial Sequence
  mRNA product Design b-4 (hSL-A100) comprising derived and/or modified sequence from LASV(803213;Clade II)__AAF86703__GPCmut10 (opt1)
aggagagucccgcagucggcguccagcggcucugcuuguucgugugugugucguugcaggccuuauucaagcuuaccaugggccagaucaucaccuucuuccaggaggugccccacgucaucgaggaggugaugaacaucgugcugaucgcccucagccugcuggccauccucaaggggaucuacaacgucgcgaccugcggccuguucgggcugaucuccuuccuccugcugugcggccgcagcugcuccgugacguacaaggggguguacgagcuccagacccuggagcugaacauggccaaccucaacaugugcaugccgcugagcugcaccaagaacaacucccaccacuacaucauggucggcaacgagacgggccuggagcucacccugaccaacaccagcaucaucaaccacaaguucugcaaccuguccgacgcccacaagaagaaccucuacgaccacgcccugaugagcaucaucuccacguuccaccugagcauccccaacuucaaccaguacgaggccauguccugcgacuucaacgggggcaagaucagcgugcaguacaaccucucccacagcuucgcgguggacgccgccaaccacugcgggaccaucgccaacggcguccugcagaccuucaugcggauggcguggggcggguccuacaucgcccuggacagcggcaaggggaacugggacugcaucaugaccuccuaccaguaccucaucauccagaacacgaccugggaggaccacugccaguucagccgccccucccccaucggcuaccuggggcugcucagccagcggacccgcgacaucuacaucagccggcgccugcugggcaccuucacguggacccucuccgacagcgagggcaacgaggcccccgggggcuacugccugacccgguggaugcugaucgaggccgagcucaagugcuucgggaacaccgccguggcgaagugcaacgagaagcacgacgaggaguucugcgacaugcugcgccuguucgacuucugcaagcaggccaucaagcggcucaagacggaggcccagauguccauccagcugaucaacaaggccgugaacgcccugaucaacgaccagcucaucaugaagaaccaccuccgcgacaucaugggcauccccuacugcaacuacagccgguacugguaccugaaccacaccgucaccgggaagaccucccugccccgcugcuggcuggugagcaacggcuccuaccugaacgagacgcacuucagcgacgacaucgagcagcaggcggacaacaugaucaccgagaugcuccagaaggaguacauggaccggcagggcaagaccccgcuggggcugguggaccucuucgucuucuccaccagcuucuaccugaucuccaucuuccugcaccuggugaagaucccgacgcaccgccacaucgugggcaagcccugccccaagccccaccggcucaaccacauggggaucugcagcugcggccuguacaagcacccggggguccccgugaaguggaagcgcugaggacuaguaauaaggaaacuguaugaaugucugugggcaggaagugaagagauccuucuguaaagguuuuuggaauuaugucugcugaauaauaaacuuuuuugaaauaauaaaucugguagaaaaaugagaucucaaaggcucuuuucagagccaccaaaaaaaaaaaaaaaaaaaaaaaaaaaaaaaaaaaaaaaaaaaaaaaaaaaaaaaaaaaaaaaaaaaaaaaaaaaaaaaaaaaaaaaaaaaaaaaaaaaaa

SEQ ID NO: 37576 - RNA, 1809 nt, Artificial Sequence
  mRNA product Design b-4 (hSL-A100) comprising derived and/or modified sequence from LASV(GA391;Clade III)__CAA36645__GPCmut10 (opt1)
aggagagucccgcagucggcguccagcggcucugcuuguucgugugugugucguugcaggccuuauucaagcuuaccaugggccagaucgugaccuucuuccaggaggucccccacgugaucgaggaggugaugaacaucguccugaucgcccucagcauccuggccauccugaaggggcucuacaacguggcgaccugcggccugaucgggcuggugacguuccuccugcuguccggccgcagcugcucccucaucuacaaggggaccuacgagcugcagacccuggagcucaacauggagacccugaacaugugcaugccgcugagcugcaccaagaacaacucccaccacuacauccgggucggcaacgagaccggccucgagcugacccugacgaacaccagcauccucaaccacaaguucugcaaccuguccgacgcccacaagcgcaaccuguacgaccacagccucauguccaucaucagcaccuuccaccuguccauccccaacuucaaccaguacgaggccaugagcugcgacuucaacgggggcaagaucaccgugcaguacaaccugucccacagcuucgccguggacgccgcggggcacugcggcacgcucgccaacgggguccugcagaccuucaugcggauggccuggggcggcuccuacaucgcccuggacagcgggcgcggcaacugggacugcaucaugaccuccuaccaguaccucaucauccagaacaccacgugggacgaccacugccaguucagccggcccucccccaucggguaccugggccugcucagccagcgcacccgggacaucuacaucagccgccggcugcugggcaccuucaccuggacgcucuccgacagcgaggggaacgagaccccgggcggguacugccugacccgcuggaugcugaucgaggcggagcucaagugcuucggcaacaccgccguggccaagugcaacgagaagcacgacgaggaguucugcgacaugcugcggcuguucgacuucugcaagcaggccauccgccggcucaagacggaggcccagauguccauccagcugaucaacaaggcggugaacgcccugaucaacgaccagcucaucaugaagaaccaccuccgcgacaucauggggauccccuacugcaacuacagccgguacugguaccugaaccacaccuccaccggcaagaccagccugccccgcugcuggcugaucuccaacggcagcuaccugaacgagacgaaguucuccgacgacaucgagcagcaggccgacaacaugaucaccgagaugcuccagaaggaguacaucgaccggcaggggaagacgccccugggccuggucgaccuguucguguucagcaccuccuucuaccucaucagcaucuuccugcaccuggugaagaucccgacccaccgccacaucgucgggaagcccugccccaagccccaccggcucaaccacaugggcaucugcuccugcgggcuguacaagcagccgggcgugcccgugcgcuggaagcggugaggacuaguaauaaggaaacuguaugaaugucugugggcaggaagugaagagauccuucuguaaagguuuuuggaauuaugucugcugaauaauaaacuuuuuugaaauaauaaaucugguagaaaaaugagaucucaaaggcucuuuucagagccaccaaaaaaaaaaaaaaaaaaaaaaaaaaaaaaaaaaaaaaaaaaaaaaaaaaaaaaaaaaaaaaaaaaaaaaaaaaaaaaaaaaaaaaaaaaaaaaaaaaaaa

SEQ ID NO: 37577 - RNA, 1812 nt, Artificial Sequence
  mRNA product Design b-4 (hSL-A100) comprising derived and/or modified sequence from LASV(AV;Clade V)__CCA30314__GPCmut10 (opt1)
aggagagucccgcagucggcguccagcggcucugcuuguucgugugugugucguugcaggccuuauucaagcuuaccaugggccagaucgugaccuucuuccaggaggucccccacgugaucgaggaggugaugaacaucguccugaucgcccucagcauccuggccgugcugaaggggcucuacaacaucgcgaccugcggccugaucgggcugaucacguuccuccugcugugcggccgcuccugcagcuccaaccucuacaaggggguguacgagcugcagagccuggaccucaacauggagacccugaacaugugcaugccgcuguccugcaccaagaacaacagccaccacuacauccgggucggcaacgacacgggccucgagcugacccugaccaacaccuccauccucaaccacaaguucugcaaccugagcgacgcccacaagaaggaccuguacgaccacgcccucauguccaucaucagcacguuccaccuguccauccccaacuucaaccaguacgaggccaugagcugcgacuucaacgggggcaagaucuccgugcaguacaaccugagccacuccuacgccaucgacgcggccaaccacugcgggaccguggccaacggcauccuccagaccuucaugcgcauggccuggggcgggagcuacaucgcgcuggacuccggccgggggaacugggacugcaucaugaccagcuaccaguaccugaucauccagaacacgaccugggagaaccacugccaguucucccgccccagccccaucggcuaccucgggcugcugagccagcggacccgcgacaucuacaucucccggcgccuccugggcaccuucacguggacccugagcgacuccgagggcaacgccacccccgggggcuacugccucacccgguggaugcugaucgaggccgagcugaagugcuucgggaacacggccgucgccaagugcaacgagaagcacgacgaggaguucugcgacaugcuccgccuguucgacuucugcaagcaggcgaucagccggcugaaguccgaggcccagaugagcauccagcucaucaacaaggccgugaacgcccugaucaacgaccagcugaucaugaagaaccaccuccgcgacaucaugggcauccccuacugcaacuacuccaaguacugguaccugaaccacaccaucaccgggaagaccagccugcccaagugcuggcucguguccaacggcagcuaccugaacgagacgcacuucuccgacgacaucgagcagcaggccgacaacaugaucaccgagaugcugcagaaggaguacauggagcggcagggcaagaccccgcucgggcuggucgaccuguucguguucagcaccuccuucuaccugaucagcaucuuccuccgccuggugaagaucccgacgcaccggcacaucgucggcaagcccugccccaagccccaccgccugaaccacauggggaucugcuccugcggccucuacaagcagccgggggugcccgugcgguggaagcgcugaggacuaguaauaaggaaacuguaugaaugucugugggcaggaagugaagagauccuucuguaaagguuuuuggaauuaugucugcugaauaauaaacuuuuuugaaauaauaaaucugguagaaaaaugagaucucaaaggcucuuuucagagccaccaaaaaaaaaaaaaaaaaaaaaaaaaaaaaaaaaaaaaaaaaaaaaaaaaaaaaaaaaaaaaaaaaaaaaaaaaaaaaaaaaaaaaaaaaaaaaaaaaaaaa

SEQ ID NO: 37578 - RNA, 1809 nt, Artificial Sequence
  mRNA product Design b-4 (hSL-A100) comprising derived and/or modified sequence from LASV(Togo/2016/7082;Clade VI)__AMR44577__GPCmut10 (opt1)
aggagagucccgcagucggcguccagcggcucugcuuguucgugugugugucguugcaggccuuauucaagcuuaccaugggccagaucaucaccuucuuccaggaggugccccacgucaucgaggaggugaugaacaucgugcugaucgcccucagccugcuggccauccucaagggggucuacaacguggcgaccugcggcaucaucgggcuggugacguuccuguuccucugcggccgcuccugcagccugaucuacaagggguccuacgagcugcagacccucgagcugaacauggagacccugaacaugugcaugccgcucagcugcacgaagaacuccagccaccacuacauccgggucggcaacgagaccggccuggagcugacccucaccaacacguccaucaucaaccacaaguucugcaaccugagcgacgcccacaagcgcaaccuguacgaccacgcccucauguccauccugagcaccuuccaccuguccauccccaacuucaaccaguacgaggccaugagcugcgacuucaacgggggcaagaucuccgugcaguacaaccucagccacgccuacgcgguggacgccgccgagcacugcgggaccgucgccaacggcgugcugcagaccuucaugcggauggcguggggcggguccuacaucgcccuggacagcggccgcgggaacugggacugcaucaugacguccuaccaguaccucaucauccagaacaccaccugggaggaccacugccaguucagccggcccucccccaucggcuaccuggggcugcucagccagcgcacccgggacaucuacaucagccgccggcugcugggcacguucaccuggacccucuccgacagcgagggcaacgagacccccgggggcuacugccugacgcgcuggaugcugaucgaggccgagcucaagugcuucgggaacaccgccguggccaagugcaacgagaagcacgacgaggaguucugcgacaugcugcggcuguucgacuucugcaagcaggcgauccagcgccucaaguccgaggcccagaugagcauccagcugaucaacaaggccgucaacgcccugaucaacgaccagcucaucaugaagaaccaccuccgggacaugaugggcauccccuacugcaacuacuccaaguacugguaccugaaccacaccagcuccgggcgcaccagccugcccaagugcuggcugguguccaacggcagcuaccugaacgagacgcacuucuccgacgacaucgagcagcaggccgacaacaugaucaccgagaugcuccagaaggaguacaucgaccggcagggcaagaccccgcuggggcugguggaccucuucgucuucagcaccuccuucuaccugaucagcaucuuccugcaccugaucaagaucccgacgcaccgccacaucgugggcaagcccugccccaagccccaccggcucaaccacauggggaucugcuccugcggccuguacaagcagccgggggugcccacccgcuggaagcggugaggacuaguaauaaggaaacuguaugaaugucugugggcaggaagugaagagauccuucuguaaagguuuuuggaauuaugucugcugaauaauaaacuuuuuugaaauaauaaaucugguagaaaaaugagaucucaaaggcucuuuucagagccaccaaaaaaaaaaaaaaaaaaaaaaaaaaaaaaaaaaaaaaaaaaaaaaaaaaaaaaaaaaaaaaaaaaaaaaaaaaaaaaaaaaaaaaaaaaaaaaaaaaaaa

SEQ ID NO: 37579 - RNA, 1809 nt, Artificial Sequence
  mRNA product Design b-4 (hSL-A100) comprising derived and/or modified sequence from LASV(KAK-428;Clade n.d. (VII))__ANH09740__GPCmut10 (opt1)
aggagagucccgcagucggcguccagcggcucugcuuguucgugugugugucguugcaggccuuauucaagcuuaccaugggccagaucgugaccuucuuccaggaggucccccacgugaucgaggaggugaugaacaucguccugaucgcccucagccugcuggccauccucaaggggcuguacaacuucgcgaccugcggcgugaucgggcugaucacguuccuccugcugugcggccgcuccugcagcgccaccuacaaggggcaguacgagcuccagacccuggagcugaacauggagucccucaacaugugcaugccgcugagcugcacgaagaacaacucccaccacuacauccgggccggcaacaacaccggccuggagcucacccugaccaacacgagcaucaucucccacaaguucugcaaccugagcgacgcccacaagaagaaccucuacgaccacacccugauguccaucaucaccaccuuccaccugagcauccccaacuucaaccaguacgaggccauguccugcgacuucaacgggggcaagaucagcauccaguacaaccucucccacagcuacgcgggggacgccgcccagcacugcggcacgguggccaacgggguccugcagaccuucaugcgcauggcguggggcggcuccuaccuggcccucgacagcgggcggcgcggcugggacugcaucaucuccagcuaccaguaccugaucauccagaacaccaccugggacgaccacugccaguucucccggcccagccccaucggguaccugggcuucgugagccagaagacgcgcgacaucuacaucucccggcgccuccugggcaccuucaccuggacccugagcgacuccgaggggcacgacaugccgggcggguacugccucacgcgguggaugcugaucgaggccgaccugaagugcuucggcaacaccgccguggccaagugcaacgagaagcacgacgaggaguucugcgacauguggcgccucuucgacuucugcaagcaggcgauccagcggcugaaggccgaggcccagaugaacauccagcugaucaacaaggccgucaacgcccucaucaacgaccagcugaugaugaagaaccaccuccgcgacaucauggggauccccuacugcaacuacagcaaguucugguaccugaacaacaccaccacgggccggaccucccugccccgcugcuggcugaucagcaacggcuccuaccucaacgagacccacuucagcgacgacaucgagcagcaggcggacaacaugaucaccgagaugcugcagaaggaguacauggaccggcaggggaagacgccccugggccucguggaccuguucguguucuccaccagcuucuaccugaucaccaucuuccuccaccuggucaagaucccgacccaccgccacaucguggggaagcccugccccaagccccaccggcugaaccacaugggcaucugcuccugcgggcuguacaagcagccgggcgugcccguccgcuggaagcggugaggacuaguaauaaggaaacuguaugaaugucugugggcaggaagugaagagauccuucuguaaagguuuuuggaauuaugucugcugaauaauaaacuuuuuugaaauaauaaaucugguagaaaaaugagaucucaaaggcucuuuucagagccaccaaaaaaaaaaaaaaaaaaaaaaaaaaaaaaaaaaaaaaaaaaaaaaaaaaaaaaaaaaaaaaaaaaaaaaaaaaaaaaaaaaaaaaaaaaaaaaaaaaaaa

SEQ ID NO: 37580 - RNA, 1809 nt, Artificial Sequence; identical to SEQ ID NO: 37574
  mRNA product Design b-4 (hSL-A100) comprising derived and/or modified sequence from LASV(Pinneo-NIG-1969;Clade I)__AIT17836__GPCmut10 (opt1)

SEQ ID NO: 37581 - RNA, 1809 nt, Artificial Sequence
  mRNA product Design b-4 (hSL-A100) comprising derived and/or modified sequence from LASV(ISTH0009-NIG-2011;Clade II)__AIT17404__GPCmut10 (opt1)
aggagagucccgcagucggcguccagcggcucugcuuguucgugugugugucguugcaggccuuauucaagcuuaccaugggccagaucaucaccuucuuccaggaggugccccacgucaucgaggaggugaugaacaucgugcugaucgcccucagccugcuggccauccucaaggggaucuacaacgucgcgaccugcggccuguucgggcugguguccuuccuccugcugugcggccgcagcugcuccacgaccuacaaggggguguacgagcuccagacccuggagcuggacauggccagccucaacaugugcaugccgcuguccugcacgaagaacaacagccaccacuacaucauggucggcaacgagaccggccuggagcucacccugaccaacacguccaucaucaaccacaaguucugcaaccugagcgacgcccacaagaagaaccucuacgaccacgcccugauguccaucaucagcaccuuccaccuguccauccccaacuucaaccaguacgaggccaugagcugcgacuucaacgggggcaagaucuccgugcaguacaaccucagccacgcguacgccguggacgccgccaaccacugcgggaccaucgcgaacggcguccugcagaccuucaugcggauggccuggggcggguccuacaucgcccuggacagcggcaagggguccugggacugcaucaugacgagcuaccaguaccucaucauccagaacaccaccugggaggaccacugccaguucucccgccccagccccaucggcuaccuggggcugcucagccagcggacccgcgacaucuacaucucccggcgccugcugggcacguucaccuggacccucagcgacuccgagggcaacgagacccccgggggcuacugccugacgcgguggaugcugaucgaggccgagcucaagugcuucgggaacaccgccguggcgaagugcaacgagaagcacgacgaggaguucugcgacaugcugcgccuguucgacuucugcaagcaggccauccggcgccucaagaccgaggcccagaugagcauccagcugaucaacaaggccgugaacgcccugaucaacgaccagcucaucaugaagaaccaccuccgggacaucaugggcaucccguacugcaacuacuccaaguacugguaccugaaccacaccgucacggggaagaccagccugccccgcugcuggcugguguccaacggcagcuaccugaacgagacccacuucuccgacgacaucgagcagcaggcggacaacaugaucaccgagcuccugcagaaggaguacauggaccggcagggcaagacgccccuggggcucguggaccuguucgucuucagcaccuccuucuaccugaucagcaucuuccugcaccucaucaagaucccgacccaccgccacaucaccggcaagcccugccccaagccccaccggcugaaccacauggggaucugcuccugcggccuguacaagcacccgggggugcccgugaaguggaagcgcugaggacuaguaauaaggaaacuguaugaaugucugugggcaggaagugaagagauccuucuguaaagguuuuuggaauuaugucugcugaauaauaaacuuuuuugaaauaauaaaucugguagaaaaaugagaucucaaaggcucuuuucagagccaccaaaaaaaaaaaaaaaaaaaaaaaaaaaaaaaaaaaaaaaaaaaaaaaaaaaaaaaaaaaaaaaaaaaaaaaaaaaaaaaaaaaaaaaaaaaaaaaaaaaaa

SEQ ID NO: 37582 - RNA, 1809 nt, Artificial Sequence
  mRNA product Design b-4 (hSL-A100) comprising derived and/or modified sequence from LASV(ISTH2010-NIG-2012;Clade II)__AIT17482__GPCmut10 (opt1)
aggagagucccgcagucggcguccagcggcucugcuuguucgugugugugucguugcaggccuuauucaagcuuaccaugggccagaucaucaccuucuuccaggaggugccccacgucaucgaggaggugaugaacaucgugcugaucgcccucagccugcuggccauccucaaggggaucuacaacgucgcgaccugcggccuguucgggcugguguccuuccuccugcugugcggccgcagcugcuccacgaccuacaaggggguguacgagcuccagacccuggagcuggacauggccagccucaacaugugcaugccgcuguccugcacgaagaacaacagccaccacuacaucauggucggcaacgagaccggccuggagcucacccugaccaacacguccaucaucaaccacaaguucugcaaccugagcgacgcccacaagaagaaccucuacgaccacgcccugauguccaucaucagcaccuuccaccuguccauccccaacuucaaccaguacgaggccaugagcugcgacuucaacgggggcaagaucuccgugcaguacaaccucagccacgcguacgccguggacgccgccaaccacugcgggaccaucgcgaacggcguccugcagaccuucaugcggauggccuggggcggguccuacaucgcccuggacagcggcaagggguccugggacugcaucaugacgagcuaccaguaccucaucauccagaacaucaccugggaggaccacugccaguucucccgccccagccccaucggcuaccuggggcugcucagccagcggacccgcgacaucuacaucucccggcgccugcugggcaccuucacguggacccucagcgacuccgagggcaacgagacccccgggggcuacugccugacccgguggaugcugaucgaggccgagcucaagugcuucgggaacacggccguggcgaagugcaacgagaagcacgacgaggaguucugcgacaugcugcgccuguucgacuucugcaagcaggccauccggcgccucaagaccgaggcccagaugagcauccagcugaucaacaaggccgugaacgcccugaucaacgaccagcucaucaugaagaaccaccuccgggacaucaugggcauccccuacugcaacuacuccaaguacugguaccugaaccacaccgucaccgggaagacgagccugccccgcugcuggcugguguccaacggcagcuaccugaacgagacccacuucuccgacgacaucgagcagcaggcggacaacaugaucaccgagcuccugcagaaggaguacaucgaccggcagggcaagaccccgcuggggcucguggaccuguucgucuucagcacguccuucuaccugaucagcaucuuccugcaccucgugaagaucccgacccaccgccacguggucggcaagcccugccccaagccccaccggcugaaccacauggggaucugcuccugcggccuguacaagcacccgggggugcccgugaaguggaagcgcugaggacuaguaauaaggaaacuguaugaaugucugugggcaggaagugaagagauccuucuguaaagguuuuuggaauuaugucugcugaauaauaaacuuuuuugaaauaauaaaucugguagaaaaaugagaucucaaaggcucuuuucagagccaccaaaaaaaaaaaaaaaaaaaaaaaaaaaaaaaaaaaaaaaaaaaaaaaaaaaaaaaaaaaaaaaaaaaaaaaaaaaaaaaaaaaaaaaaaaaaaaaaaaaaa

SEQ ID NO: 37583 - RNA, 1809 nt, Artificial Sequence
  mRNA product Design b-4 (hSL-A100) comprising derived and/or modified sequence from LASV(Lassa virus/H.sapiens-wt/NGA/2015/ISTH_0543;Clade II)__AVO03639__GPCmut10 (opt1)
aggagagucccgcagucggcguccagcggcucugcuuguucgugugugugucguugcaggccuuauucaagcuuaccaugggccagaucaucaccuucuuccaggaggugccccacgucaucgaggaggugaugaacaucgugcugaucgcccucagccugcuggccauccucaaggggaucuacaacgucgcgaccugcggccuguucgggcugguguccuuccuccugcugugcggccgcagcugcuccacgaccuacaaggggguguacgagcuccagacccuggagcuggacauggccaaccucaacaugugcaugccgcugagcugcacgaagaacaacucccaccacuacaucauggucggcaacgagaccggccuggagcucacccugaccaacacgagcaucaucaaccacaaguucugcaaccuguccgacgcccacaagaagaaccucuacgaccacgcccugaugagcaucaucuccaccuuccaccugagcauccccaacuucaaccaguacgaggccauguccugcgacuucaacgggggcaagaucagcgugcaguacaaccucucccacaccuacgcgguggacgccgccaaccacugcgggaccaucgccaacggcguccugcagacguucaugcggauggcguggggcgggagcuacaucgcccuggacuccggcaaggggagcugggacugcaucaugaccuccuaccaguaccucgugauccagaacaccaccugggaggaccacugccaguucagccgccccucccccaucggcuaccuggggcugcucagccagcggacgcgcgacaucuacaucagccggcgccugcugggcaccuucaccuggacccucuccgacagcgagggcaacgagacgcccgggggcuacugccugacccgguggaugcugaucgaggccgagcucaagugcuucgggaacaccgccguggccaagugcaacgagaagcacgacgaggaguucugcgacaugcugcgccuguucgacuucugcaagcaggcgauccggcgccucaagaccgaggcccagauguccauccagcugaucaacaaggccgucaacgcccugaucaacgaccagcucaucaugaagaaccaccuccgggacaucaugggcauccccuacugcaacuacagcaaguacugguaccugaaccacacggugaccgggaagaccucccugccccgcugcuggcuggugagcaacggcuccuaccugaacgagacccacuucagcgacgacaucgagcagcaggccgacaacaugaucacggagcuccugcagaaggaguacaucgaccggcagggcaagaccccgcuggggcucgucgaccuguucguguucuccaccagcuucuaccugaucuccaucuuccugcaccucgugaagaucccgacccaccgccacaucacgggcaagcccugccccaagccccaccggcugaaccacauggggaucugcagcugcggccuguacaagcacccggggguccccgugaaguggaagcgcugaggacuaguaauaaggaaacuguaugaaugucugugggcaggaagugaagagauccuucuguaaagguuuuuggaauuaugucugcugaauaauaaacuuuuuugaaauaauaaaucugguagaaaaaugagaucucaaaggcucuuuucagagccaccaaaaaaaaaaaaaaaaaaaaaaaaaaaaaaaaaaaaaaaaaaaaaaaaaaaaaaaaaaaaaaaaaaaaaaaaaaaaaaaaaaaaaaaaaaaaaaaaaaaaa

SEQ ID NO: 37584 - RNA, 1809 nt, Artificial Sequence
  mRNA product Design b-4 (hSL-A100) comprising derived and/or modified sequence from LASV(Lassa virus/H.sapiens-wt/NGA/2016/ISTH_0009;Clade II)__AVO03571__GPCmut10 (opt1)
aggagagucccgcagucggcguccagcggcucugcuuguucgugugugugucguugcaggccuuauucaagcuuaccaugggccagaucaucaccuucuuccaggaggugccccacgucaucgaggaggugaugaacaucgugcugaucgcccucagccugcuggccauccucaaggggaucuacaacgucgcgaccugcggccugcuggggcucguguccuuccugcugcucugcggccgcagcugcuccacgaccuacaaggggguguacgagcugcagacccuggagcucgacauggccagccugaacaugugcaugccgcuguccugcacgaagaacaacagccaccacuacaucauggucggcaacgagaccggccucgagcugacccugaccaacacguccaucaucaaccacaaguucugcaaccucagcgacgcccacaagaagaaccuguacgaccacgcccugauguccaucaucagcaccuuccaccucuccauccccaacuucaaccaguacgaggccaugagcugcgacuucaacgggggccggaucuccgugcaguacaaccugagccacuccuacgcgguggacgccgccaaccacugcgggaccaucgccaacggcguccugcagaccuucaugcgcauggcguggggcgggagcuacaucgcccucgacuccggcaaggggagcugggacugcaucaugacguccuaccaguaccugaucauccagaacaccaccugggaggaccacugccaguucagccggcccagccccaucggcuaccuggggcuccugucccagcgcacccgggacaucuacaucagccgccggcugcucggcacguucaccuggacccuguccgacagcgagggcaacgagacccccgggggcuacugccugacgcgcuggaugcucaucgaggccgagcugaagugcuucgggaacaccgccguggccaagugcaacgagaagcacgacgaggaguucugcgacaugcugcggcuguucgacuucugcaagcaggcgauccgccggcugaagaccgaggcccagauguccauccagcugaucaacaaggccgugaacgcccucaucaacgaccagcugaucaugaagaaccaccuccgcgacaucaugggcaucccguacugcaacuacagcaaguacugguaccucaaccacaccgucacggggaagaccucccugccccggugcuggcuggugagcaacggcuccuaccucaacgagacccacuucagcgacgacaucgagcagcaggccgacaacaugaucaccgagcugcugcagaaggaguacaucgaccgccagggcaagacgccccucgggcugguggaccuguucgucuucuccaccagcuucuaccugaucuccaucuuccuccaccuggugaagaucccgacccaccggcacaucaccggcaagcccugccccaagccccaccgccugaaccacauggggaucugcagcugcggccucuacaaccacccgggggugcccgucaaguggaagcggugaggacuaguaauaaggaaacuguaugaaugucugugggcaggaagugaagagauccuucuguaaagguuuuuggaauuaugucugcugaauaauaaacuuuuuugaaauaauaaaucugguagaaaaaugagaucucaaaggcucuuuucagagccaccaaaaaaaaaaaaaaaaaaaaaaaaaaaaaaaaaaaaaaaaaaaaaaaaaaaaaaaaaaaaaaaaaaaaaaaaaaaaaaaaaaaaaaaaaaaaaaaaaaaaa

SEQ ID NO: 37585 - RNA, 1809 nt, Artificial Sequence
  mRNA product Design b-4 (hSL-A100) comprising derived and/or modified sequence from LASV(Lassa virus/H.sapiens-wt/NGA/2016/ISTH_0017;Clade II)__AVO03567__GPCmut10 (opt1)
aggagagucccgcagucggcguccagcggcucugcuuguucgugugugugucguugcaggccuuauucaagcuuaccaugggccagaucaucaccuucuuccaggaggugccccacgucaucgaggaggugaugaacaucgugcugaucgcccucagccugcuggccauccucaaggggaucuacaacgucgcgaccugcggccuguucgggcugguguccuuccuccugcugugcggccgcagcugcuccacgaccuacaaggggguguacgagcuccagacccuggagcuggacauggccagccucaacaugugcaugccgcuguccugcacgaagaacaacagccaccacuacaucauggucggcaacgagaccggccuggagcucacccugaccaacacguccaucaucaaccacaaguucugcaaccugagcgacgcccacaagaagaaccucuacgaccacgcccugauguccaucaucagcaccuuccaccuguccauccccaacuucaaccaguacgaggccaugagcugcgacuucaacgggggcaagaucuccgugcaguacaaccucagccacaccuacgcgaucgacgccgccaaccacugcgggaccaucgccaacggcgugcugcagacguucaugcggauggcguggggcggguccuacaucgcccuggacagcggcaagggguccugggacugcaucaugaccagcuaccaguaccucaucauccagaacaccaccugggaggaccacugccaguucucccgccccagccccaucggcuaccuggggcugcucagccagcggacgcgcgacaucuacaucucccggcgccugcugggcaccuucaccuggacccucagcgacuccgagggcaacgagacgcccgggggcuacugccugacccgguggaugcugaucgaggccgagcucaagugcuucgggaacaccgccgucgccaagugcaacgagaagcacgacgaggaguucugcgacaugcugcgccuguucgacuucugcaagcaggcgauccggcgccucaagaccgaggcccagaugagcauccagcugaucaacaaggccgugaacgcccugaucaacgaccagcucaucaugaagaaccaccuccgggacaucaugggcauccccuacugcaacuacuccaaguacugguaccugaaccacacggugaccgggaagaccagccugccccgcugcuggcuggucuccaacggcagcuaccugaacgagacccacuucuccgacgacaucgagcagcaggccgacaacaugaucacggagcuccugcagaaggaguacauggaccggcagggcaagaccccgcuggggcucguggaccuguucguguucagcaccuccuucuaccugaucagcaucuuccugcaccucguccgcaucccgacccaccggcacgugaucggcaagcccugccccaagccccaccgccugaaccacauggggaucugcuccugcggccuguacaagcacccgggggugcccgucaaguggaagcggugaggacuaguaauaaggaaacuguaugaaugucugugggcaggaagugaagagauccuucuguaaagguuuuuggaauuaugucugcugaauaauaaacuuuuuugaaauaauaaaucugguagaaaaaugagaucucaaaggcucuuuucagagccaccaaaaaaaaaaaaaaaaaaaaaaaaaaaaaaaaaaaaaaaaaaaaaaaaaaaaaaaaaaaaaaaaaaaaaaaaaaaaaaaaaaaaaaaaaaaaaaaaaaaaa

SEQ ID NO: 37586 - RNA, 1809 nt, Artificial Sequence
  mRNA product Design b-4 (hSL-A100) comprising derived and/or modified sequence from LASV(Lassa virus/H.sapiens-wt/NGA/2018/ISTH_0959;Clade II)__AVV65099__GPCmut10 (opt1)
aggagagucccgcagucggcguccagcggcucugcuuguucgugugugugucguugcaggccuuauucaagcuuaccaugggccagaucaucaccuucuuccaggaggugccccacgucaucgaggaggugaugaacaucgugcugaucgcccucagccugcuggccauccucaaggggaucuacaacgucgugaccugcggccuguucgggcugguguccuuccuccugcugugcggccgcagcugcuccacgaccuacaagggggucuacgagcuccagacccuggagcuggacauggcgagccucaacaugugcaugccgcuguccugcacgaagaacaacagccaccacuacaucauggugggcaacgagaccggccuggagcucacccugaccaacacguccaucaucaaccacaaguucugcaaccugagcgacgcccacaagaagaaccucuacgaccacgcccugauguccaucaucagcaccuuccaccuguccauccccaacuucaaccaguacgaggccaugagcugcgacuucaacgggggcaagaucuccgugcaguacaaccucagccacgccuacgcgaucgacgccgccaaccacugcgggaccaucgccaacggcguccugcagaccuucaugcggauggcguggggcggguccuacaucgcccuggacagcggcaagggguccugggacugcaucaugacgagcuaccaguaccucaucauccagaacaccaccugggaggaccacugccaguucucccgccccagccccaucggcuaccuggggcugcucagccagcggacccgcgacaucuacaucucccggcgccugcugggcacguucaccuggacccucagcgacuccgagggcaacgagacccccgggggcuacugccugacgcgguggaugcugaucgaggccgagcucaagugcuucgggaacaccgccguggccaagugcaacgagaagcacgacgaggaguucugcgacaugcugcgccuguucgacuucugcaagcaggcgauccggcgccucaagaccgaggcccagaugagcauccagcugaucaacaaggccgugaacgcccugaucaacgaccagcucaucaugaagaaccaccuccgggacaucaugggcaucccguacugcaacuacuccaaguacugguaccugaaccacaccgucacggggaagaccagccugccccgcugcuggcugguguccaacggcagcuaccugaacgagacccacuucuccgacgacaucgagcagcaggccgacaacaugaucaccgagcuccugcagaaggaguacaucgaccggcagggcaagacgccccuggggcucguggaccuguucgucuucagcaccuccuucuaccugaucagcaucuuccugcaccucgugaagaucccgacccaccgccacgugaucggcaagcccugccccaagccccaccggcugaaccacauggggaucugcuccugcggccuguacaagcacccggggguccccgugaaguggaagcgcugaggacuaguaauaaggaaacuguaugaaugucugugggcaggaagugaagagauccuucuguaaagguuuuuggaauuaugucugcugaauaauaaacuuuuuugaaauaauaaaucugguagaaaaaugagaucucaaaggcucuuuucagagccaccaaaaaaaaaaaaaaaaaaaaaaaaaaaaaaaaaaaaaaaaaaaaaaaaaaaaaaaaaaaaaaaaaaaaaaaaaaaaaaaaaaaaaaaaaaaaaaaaaaaaa

SEQ ID NO: 37587 - RNA, 1809 nt, Artificial Sequence
  mRNA product Design b-4 (hSL-A100) comprising derived and/or modified sequence from LASV(LASV003-NIG-2008;Clade II)__AIT17580__GPCmut10 (opt1)
aggagagucccgcagucggcguccagcggcucugcuuguucgugugugugucguugcaggccuuauucaagcuuaccaugggccagaucaucaccuucuuccaggaggugccccacgucaucgaggaggugaugaacaucgugcugaucgcccucagccugcuggccauccucaaggggaucuacaacgucgcgaccugcggccuguucgggcugguguccuuccuccugcugugcggccgcagcugcuccacgaccuacaaggggguguacgagcuccagacccuggagcuggacauggccagccucaacaugugcaugccgcuguccugcacgaagaacaacagccaccacuacaucauggucggcaacgagaccggccuggagcucacccugaccaacacguccaucaucaaccacaaguucugcaaccugagcgacgcccacaagaagaaccucuacgaccacgcccugauguccaucaucagcaccuuccaccuguccauccccaacuucaaccaguacgaggccaugagcugcgacuucaacgggggcaagaucuccgugcaguacaaccucagccacaccuacgcgguggacgccgccaaccacugcgggaccaucgccaacggcguccugcagacguucaugcggauggcguggggcggguccuacaucgcccuggacagcggcaagggguccugggacugcaucaugaccagcuaccaguaccucaucauccagaacaccaccugggaggaccacugccaguucucccgccccagccccaucggcuaccuggggcugcucagccagcggacgcgcgacaucuacaucucccggcgccugcugggcaccuucaccuggacccucagcgacuccgagagcaacgagacgccgggcggguacugccugacccgguggaugcugaucgaggccgagcucaagugcuucggcaacaccgccguggccaagugcaacgagaagcacgacgaggaguucugcgacaugcugcgccuguucgacuucugcaagcaggcgauccggcgccucaaggccgaggcccagauguccauccagcugaucaacaaggccgugaacgcccugaucaacgaccagcucaucaugaagaaccaccuccgggacaucauggggauccccuacugcaacuacagcaaguacugguaccugaaccacaccgucacgggccgcaccucccugccccggugcuggcuggugagcaacggguccuaccugaacgagacccacuucagcgacgacaucgagcagcaggcggacaacaugaucaccgagcuccugcagaaggaguacauggaccgccagggcaagacgccccugggccucguggaccuguucgucuucuccaccagcuucuaccugaucuccaucuuccugcaccucgugaagaucccgacccaccggcacgugaucgggaagcccugccccaagccccaccgccugaaccacaugggcaucugcagcugcgggcuguacaagcacccgggcguccccgugaaguggaagcggugaggacuaguaauaaggaaacuguaugaaugucugugggcaggaagugaagagauccuucuguaaagguuuuuggaauuaugucugcugaauaauaaacuuuuuugaaauaauaaaucugguagaaaaaugagaucucaaaggcucuuuucagagccaccaaaaaaaaaaaaaaaaaaaaaaaaaaaaaaaaaaaaaaaaaaaaaaaaaaaaaaaaaaaaaaaaaaaaaaaaaaaaaaaaaaaaaaaaaaaaaaaaaaaaa

SEQ ID NO: 37588 - RNA, 1809 nt, Artificial Sequence
  mRNA product Design b-4 (hSL-A100) comprising derived and/or modified sequence from LASV(LASV035-NIG-2009;Clade II)__AIT17588__GPCmut10 (opt1)
aggagagucccgcagucggcguccagcggcucugcuuguucgugugugugucguugcaggccuuauucaagcuuaccaugggccagaucaucaccuucuuccaggaggugccccacgucaucgaggaggugaugaacaucgugcugaucgcccucagccugcuggccauccucaaggggaucuacaacgucgcgaccugcggccuguucgggcugguguccuuccuccugcugugcggccgcagcugcuccacgaccuacaaggggguguacgagcuccagacccuggagcuggacauggccagccucaacaugugcaugccgcuguccugcacgaagaacaacagccaccacuacaucauggucggcaacgagaccggccuggagcucacccugaccaacacguccaucaucaaccacaaguucugcaaccugagcgacgcccacaagaagaaccucuacgaccacgcccugauguccaucaucagcaccuuccaccuguccauccccaacuucaaccaguacgaggccaugagcugcgacuucaacgggggcaagaucuccgugcaguacaaccucagccacgcguacgccguggacgccgccaaccacugcgggaccaucgcgaacggcguccugcagaccuucaugcggauggccuggggcggguccuacaucgcccuggacagcggcaagggguccugggacugcaucaugacgagcuaccaguaccucaucauccagaacaccaccugggaggaccacugccaguucucccgccccagccccaucggcuaccuggggcugcucagccagcggacccgcgacaucuacaucucccggcgccugcugggcacguucaccuggacccucagcgacuccgagggcaacgagacccccgggggcuacugccugacgcgguggaugcugaucgaggccgagcucaagugcuucgggaacaccgccguggcgaagugcaacgagaagcacgacgaggaguucugcgacaugcugcgccuguucgacuucugcaagcaggccauccggcgccucaaggccgaggcccagaugagcauccagcugaucaacaaggccgugaacgcgcugaucaacgaccagcucaucaugaagaaccaccuccgggacaucaugggcauccccuacugcaacuacuccaaguacugguaccugaaccacaccgucaccgggaagacgagccugccccgcugcuggcugguguccaacggcagcuaccugaacgagacccacuucuccgacgacaucgagcagcaggccgacaacaugaucaccgagcuccugcagaaggaguacaucgaccggcagggcaagaccccgcuggggcucguggaccuguucgucuucagcacguccuucuaccugaucagcaucuuccugcaccucgugaagaucccgacccaccgccacgugaucggcaagcccugccccaagccccaccggcugaaccacauggggaucugcuccugcggccuguacaagcacccggggguccccgugaaguggaagcgcugaggacuaguaauaaggaaacuguaugaaugucugugggcaggaagugaagagauccuucuguaaagguuuuuggaauuaugucugcugaauaauaaacuuuuuugaaauaauaaaucugguagaaaaaugagaucucaaaggcucuuuucagagccaccaaaaaaaaaaaaaaaaaaaaaaaaaaaaaaaaaaaaaaaaaaaaaaaaaaaaaaaaaaaaaaaaaaaaaaaaaaaaaaaaaaaaaaaaaaaaaaaaaaaaa

SEQ ID NO: 37589 - RNA, 1809 nt, Artificial Sequence
  mRNA product Design b-4 (hSL-A100) comprising derived and/or modified sequence from LASV(LASV1000-NIG-2009;Clade II)__AIT17782__GPCmut10 (opt1)
aggagagucccgcagucggcguccagcggcucugcuuguucgugugugugucguugcaggccuuauucaagcuuaccaugggccagaucaucaccuucuuccaggaggugccccacgucaucgaggaggugaugaacaucgugcugaucgcccucagccugcuggccauccucaaggggaucuacaacgucgcgaccugcggccuguucgggcugguguccuuccuccugcugugcggccgcagcugcuccacgaccuacaaggggguguacgagcuccagacccuggagcuggacauggccagccucaacaugugcaugccgcuguccugcacgaagaacaacagccaccacuacaucauggucggcaacgagaccggccuggagcucacccugaccaacacguccaucaucaaccacaaguucugcaaccugagcgacgcccacaagaagaaccucuacgaccacgcccugauguccaucaucagcaccuuccaccuguccauccccaacuucaaccaguacgaggccaugagcugcgacuucaacgggggcaagaucuccgugcaguacaaccucagccacaccuacgcgguggacgccgccaaccacugcgggaccaucgccaacggcguccugcagacguucaugcggauggcguggggcggguccuacaucgcccuggacagcggcaagggguccugggacugcaucaugaccagcuaccaguaccucaucauccagaacaccaccugggaggaccacugccaguucucccgccccagccccaucggcuaccuggggcugcucagccagcggacgcgcgacaucuacaucucccggcgccugcugggcaccuucaccuggacccucagcgacuccgagggcaacgagacgcccgggggcuacugccugacccgguggaugcugaucgaggccgagcucaagugcuucgggaacaccgccguggccaagugcaacgagaagcacgacgaggaguucugcgacaugcugcgccuguucgacuucugcaagcaggcgaucaagcggcucaagaccgaggcccagaugagcauccagcugaucaacaaggccgugaacgcccugaucaacgaccagcucaucaugaagaaccaccuccgcgacaucaugggcauccccuacugcaacuacuccaaguacugguaccugaaccacacggucaccgggaagaccagccugccccggugcuggcugguguccaacggcagcuaccugaacgagacccacuucuccgacgacaucgagcagcaggccgacaacaugaucacggagcuccugcagaaggaguacaucgaccgccagggcaagaccccgcuggggcucguggaccuguucgucuucagcaccuccuucuaccugaucagcaucuuccugcaccucgugaagaucccgacccaccggcacguggucggcaagcccugccccaagccccaccgccugaaccacauggggaucugcuccugcggccuguacaagcacccgggggugcccgugaaguggaagcggugaggacuaguaauaaggaaacuguaugaaugucugugggcaggaagugaagagauccuucuguaaagguuuuuggaauuaugucugcugaauaauaaacuuuuuugaaauaauaaaucugguagaaaaaugagaucucaaaggcucuuuucagagccaccaaaaaaaaaaaaaaaaaaaaaaaaaaaaaaaaaaaaaaaaaaaaaaaaaaaaaaaaaaaaaaaaaaaaaaaaaaaaaaaaaaaaaaaaaaaaaaaaaaaaa

SEQ ID NO: 37590 - RNA, 1809 nt, Artificial Sequence
  mRNA product Design b-4 (hSL-A100) comprising derived and/or modified sequence from LASV(LASV221-NIG-2010;Clade II)__AIT17624__GPCmut10 (opt1)
aggagagucccgcagucggcguccagcggcucugcuuguucgugugugugucguugcaggccuuauucaagcuuaccaugggccagaucaucaccuucuuccaggaggugccccacgucaucgaggaggugaugaacaucgugcugaucgcccucagccugcuggccauccucaaggggaucuacaacgucgcgaccugcggccuguucgggcugguguccuuccuccugcugugcggccgcagcugcuccacgaccuacaaggggguguacgagcuccagacccuggagcuggacauggccagccucaacaugugcaugccgcuguccugcacgaagaacaacagccaccacuacaucauggucggcaacgagaccggccuggagcucacccugaccaacacguccaucaucaaccacaaguucugcaaccugagcgacgcccacaagaagaaccucuacgaccacgcccugauguccaucaucagcaccuuccaccuguccauccccaacuucaaccaguacgaggccaugagcugcgacuucaacgggggcaagaucuccgugcaguacaaccucagccacaccuacgcgaucgacgccgccaaccacugcgggaccaucgccaacggcgugcugcagacguucaugcggauggcguggggcggguccuacaucgcccuggacagcggcaagggguccugggacugcaucaugaccagcuaccaguaccucaucauccagaacaccaccugggaggaccacugccaguucucccgccccagccccaucggcuaccuggggcugcucagccagcggacgcgcgacaucuacaucucccggcgccugcugggcaccuucaccuggacccucagcgacuccgagggcaacgagacgcccgggggcuacugccugacccgguggaugcugaucgaggccgagcucaagugcuucgggaacaccgccgucgccaagugcaacgagaagcacgacgaggaguucugcgacaugcugcgccuguucgacuucugcaagcaggcgauccggcgccucaagaccgaggcccagaugagcauccagcugaucaacaaggccgugaacgcccugaucaacgaccagcucaucaugaagaaccaccuccgggacaucaugggcauccccuacugcaacuacuccaaguacugguaccugaaccacacggugaccgggaagaccagccugccccgcugcuggcuggucuccaacggcagcuaccugaacgagacccacuucuccgacgacaucgagcagcaggccgacaacaugaucacggagaugcuccagaaggaguacauggaccggcagggcaagaccccgcuggggcugguggaccucuucguguucagcaccuccuucuaccugaucagcaucuuccugcaccuggucaagaucccgacccaccgccacgugaucggcaagcccugccccaagccccaccggcucaaccacauggggaucugcuccugcggccuguacaagcacccgggggugcccgucaaguggaagcgcugaggacuaguaauaaggaaacuguaugaaugucugugggcaggaagugaagagauccuucuguaaagguuuuuggaauuaugucugcugaauaauaaacuuuuuugaaauaauaaaucugguagaaaaaugagaucucaaaggcucuuuucagagccaccaaaaaaaaaaaaaaaaaaaaaaaaaaaaaaaaaaaaaaaaaaaaaaaaaaaaaaaaaaaaaaaaaaaaaaaaaaaaaaaaaaaaaaaaaaaaaaaaaaaaa

SEQ ID NO: 37591 - RNA, 1809 nt, Artificial Sequence
  mRNA product Design b-4 (hSL-A100) comprising derived and/or modified sequence from LASV(LASV237-NIG-2010;Clade II)__AIT17638__GPCmut10 (opt1)
aggagagucccgcagucggcguccagcggcucugcuuguucgugugugugucguugcaggccuuauucaagcuuaccaugggccagaucaucaccuucuuccaggaggugccccacgucaucgaggaggugaugaacaucgugcugaucgcccucagccugcuggccauccucaaggggaucuacaacgucgcgaccugcggccuguucgggcugguguccuuccuccugcugugcggccgcagcugcuccacgaccuacaaggggguguacgagcuccagacccuggagcuggacauggccagccucaacaugugcaugccgcuguccugcacgaagaacaacagccaccacuacaucauggucggcaacgagaccggccuggagcucacccugaccaacacguccaucaucaaccacaaguucugcaaccugagcgacgcccacaagaaggaccucuacgaccacgcccugauguccaucaucagcaccuuccaccuguccauccccaacuucaaccaguacgaggccaugagcugcgacuucaacgggggcaagaucuccgugcaguacaaccucagccacaccuacgcgguggacgccgccaaccacugcgggaccaucgccaacggcguccugcagacguucaugcggauggcguggggcggguccuacaucgcccuggacagcggcaagggguccugggacugcaucaugaccagcuaccaguaccucaucauccagaacaccaccugggaggaccacugccaguucucccgccccagccccaucggcuaccuggggcugcucagccagcggacgcgcgacaucuacaucucccggcgccugcugggcaccuucaccuggacccucagcgacuccgagggcaacgagacgcccgggggcuacugccugacccgguggaugcugaucgaggccgagcucaagugcuucgggaacaccgccguggccaagugcaacgagaagcacgacgaggaguucugcgacaugcugcgccuguucgacuucugcaagcaggcgauccggcgccucaagaccgaggcccagaugagcauccagcugaucaacaaggccgugaacgcccugaucaacgaccagcucaucaugaagaaccaccuccgggacaucaugggcauccccuacugcaacuacuccaaguacugguaccugaaccacacggucaccgggaagaccagccugccccgcugcuggcugguguccaacggcagcuaccugaacgagacccacuucuccgacgacaucgagcagcaggccgacaacaugaucacggagcuccugcagaaggaguacauggaccggcagggcaagaccccgcuggggcucguggaccuguucgucuucagcaccuccuucuaccugaucagcaucuuccugcaccucaucaagaucccgacccaccgccacaucacgggcaagcccugccccaagccccaccggcugaaccacauggggaucugcuccugcggccuguacaagcacccgggggugcccgugaaguggaagcgcugaggacuaguaauaaggaaacuguaugaaugucugugggcaggaagugaagagauccuucuguaaagguuuuuggaauuaugucugcugaauaauaaacuuuuuugaaauaauaaaucugguagaaaaaugagaucucaaaggcucuuuucagagccaccaaaaaaaaaaaaaaaaaaaaaaaaaaaaaaaaaaaaaaaaaaaaaaaaaaaaaaaaaaaaaaaaaaaaaaaaaaaaaaaaaaaaaaaaaaaaaaaaaaaaa

SEQ ID NO: 37592 - RNA, 1809 nt, Artificial Sequence
  mRNA product Design b-4 (hSL-A100) comprising derived and/or modified sequence from LASV(LASV253-NIG-2011;Clade II)__AIT17670__GPCmut10 (opt1)
aggagagucccgcagucggcguccagcggcucugcuuguucgugugugugucguugcaggccuuauucaagcuuaccaugggccagaucaucaccuucuuccaggaggugccccacgucaucgaggaggugaugaacaucgugcugaucgcccucagccugcuggccauccucaaggggaucuacaacgucgcgaccugcggccuguucgggcugguguccuuccuccugcugugcggccgcagcugcuccacgaccuacaaggggguguacgagcuccagacccuggagcuggacauggccagccucaacaugugcaugccgcuguccugcacgaagaacaacagccaccacuacaucauggucggcaacgagaccggccuggagcucacccugaccaacacguccaucaucaaccacaaguucugcaaccugagcgacgcccacaagaagaaccucuacgaccacgcccugauguccaucaucagcaccuuccaccuguccauccccaacuucaaccaguacgaggccaugagcugcgacuucaacgggggcaagaucuccgugcaguacaaccucagccacaccuacgcgguggacgccgccaaccacugcgggaccaucgccaacggcguccugcagacguucaugcggauggcguggggcggguccuacaucgcccuggacagcggcaagggguccugggacugcaucaugaccagcuaccaguaccucaucauccagaacaccaccugggaggaccacugccaguucucccgccccagccccaucggcuaccuggggcugcucagccagcggacgcgcgacaucuacaucucccggcgccugcugggcaccuucaccuggacccucagcgacuccgagggcaacgagacgcccgggggcuacugccugacccgguggaugcugaucgaggccgagcucaagugcuucgggaacaccgccguggccaagugcaacgagaagcacgacgaggaguucugcgacaugcugcgccuguucgacuucugcaagcaggcgauccggcgccucaaggccgaggcccagaugagcauccagcugaucaacaaggccgugaacgcccugaucaacgaccagcucaucaugaagaaccaccuccgggacaucaugggcaucccguacugcaacuacuccaaguacugguaccugaaccacaccgucacggggcgcaccagccugccccggugcuggcugguguccaacggcagcuaccugaacgagacccacuucuccgacgacaucgagcagcaggcggacaacaugaucaccgagcuccugcagaaggaguacaucgaccgccagggcaagacgccccuggggcucguggaccuguucgucuucagcaccuccuucuaccugaucagcaucuuccugcaccucgugaagaucccgacccaccggcacaucaucggcaagcccugccccaagccccaccgccugaaccacauggggaucugcuccugcggccuguacaagcacccgggggugcccgucaaguggaagcggugaggacuaguaauaaggaaacuguaugaaugucugugggcaggaagugaagagauccuucuguaaagguuuuuggaauuaugucugcugaauaauaaacuuuuuugaaauaauaaaucugguagaaaaaugagaucucaaaggcucuuuucagagccaccaaaaaaaaaaaaaaaaaaaaaaaaaaaaaaaaaaaaaaaaaaaaaaaaaaaaaaaaaaaaaaaaaaaaaaaaaaaaaaaaaaaaaaaaaaaaaaaaaaaaa

SEQ ID NO: 37593 - RNA, 1809 nt, Artificial Sequence
  mRNA product Design b-4 (hSL-A100) comprising derived and/or modified sequence from LASV(LASV254-NIG-2011;Clade II)__AIT17674__GPCmut10 (opt1)
aggagagucccgcagucggcguccagcggcucugcuuguucgugugugugucguugcaggccuuauucaagcuuaccaugggccagaucaucaccuucuuccaggaggugccccacgucaucgaggaggugaugaacaucgugcugaucgcccucagccugcuggccauccucaaggggaucuacaacgucgcgaccugcggccuguucgggcugguguccuuccuccugcugugcggccgcagcugcuccacgaccuacaaggggguguacgagcuccagacccuggagcuggacaugaccaaccucaacaugugcaugccgcugagcugcaccaagaacaacucccaccacuacaucauggucggcaacgagaccggccuggagcucacccugacgaacaccagcaucaucaaccacaaguucugcaaccuguccgacgcccacaagaagaaccucuacaaccacgcccugaugagcaucaucuccaccuuccaccugagcauccccaacuucaaccaguacgaggccauguccugcgacuucaacgggggcaagaucagcgugcaguacaaccucucccacagcuacgccguggacgcggccaaccacugcgggaccaucgccaacggcguccugcagacguucaugcggauggccuggggcggguccuacaucgcgcuggacagcggcaaggggaacugggacugcaucaugaccuccuaccaguaccucaucauccagaacaccaccugggaggaccacugccaguucagccgccccucccccaucggcuaccuggggcugcucagccagcggacgcgcgacaucuacaucagccggcgccugcugggcaccuucaccuggacccucuccgacagcgagggcaacgagacgcccgggggcuacugccugacccgguggaugcugaucgaggccgagcucaagugcuucgggaacaccgccguggccaagugcaacgagaagcacgacgaggaguucugcgacaugcugcgccuguucgacuucugcaagcaggccauccggcgccucaagaccgaggcgcaggccaacauccagcugaucaacaaggccgugaacgcccugaucaacgaccagcucaucaugaagaaccaccuccgggacaucaugggcauccccuacugcaacuacuccaaguacugguaccugaaccacacggucaccgggaagaccagccugccccgcugcuggcugguguccaacggcagcuaccugaacgagacccacuucuccgacgacaucgagcagcaggccgacaacaugaucacggagcuccugcagaaggaguacauggaccggcagggcaagaccccgcuggggcucguggaccuguucgucuucagcaccuccuucuaccugaucagcaucuuccugcaccucgugaagaucccgacccaccgccacgugaucggcaagcccugccccaagccccaccggcugaaccacauggggaucugcuccugcggccuguacaagcacccggggguccccgugaaguggaagcgcugaggacuaguaauaaggaaacuguaugaaugucugugggcaggaagugaagagauccuucuguaaagguuuuuggaauuaugucugcugaauaauaaacuuuuuugaaauaauaaaucugguagaaaaaugagaucucaaaggcucuuuucagagccaccaaaaaaaaaaaaaaaaaaaaaaaaaaaaaaaaaaaaaaaaaaaaaaaaaaaaaaaaaaaaaaaaaaaaaaaaaaaaaaaaaaaaaaaaaaaaaaaaaaaaa

SEQ ID NO: 37594 - RNA, 1809 nt, Artificial Sequence
  mRNA product Design b-4 (hSL-A100) comprising derived and/or modified sequence from LASV(Nig08-A19;Clade III)__ADU56618__GPCmut10 (opt1)
aggagagucccgcagucggcguccagcggcucugcuuguucgugugugugucguugcaggccuuauucaagcuuaccaugggccagaucgugaccuucuuccaggaggucccccacgugaucgaggaggugaugaacaucguccugaucgcccucagcauccuggccauccugaaggggcucuacaacaucgcgaccugcggccugaucgggcuggugacguuccuccugcuguccggccgcagcugcuccaugaccuacaaggggguguacgagcuccagacccuggagcugaacaugaacacccucaacaugugcaugccgcugagcugcaccaagaacaacucccaccacuacaucauggucggcaacgagaccggccuggagcucacccugacgaacaccagccugcuccaccacaaguucugcaaccuguccgacgcccacaagaagaaccuguacgaccacacccucaugagcaucaucuccaccuuccaccugagcauccccaacuucaaccaguacgaggccauguccugcgacuucaacgggggcaagaucacggugcaguacaaccugagccacuccuacgccaucgacgccgcgaaccacugcgggaccguggccaacggcguccuccagaccuucaugcggauggccuggggcgggagcuacaucgcccuggacuccggccgcgggaagugggacugcaucaugaccagcuaccaguaccugaucauccagaacacgaccugggaggaccacugccaguucucccggcccagccccaucggcuaccucgggcugcugucccagcgcacccgggacaucuacaucagccgccggcuccugggcaccuucacguggacccugagcgacuccgagggcaacgagacccccgggggcuacugccucacccgcuggaugcugaucgaggcggagcugaagugcuucgggaacacggccguggccaagugcaacgagaagcacgacgaggaguucugcgacaugcuccggcuguucgacuucugcaagcaggccauccgccggcugaaggccgaggcgcagaugagcauccagcucaucaacaaggccgugaacgcccugaucaacgaccagcugaucaugaagaaccaccuccgcgacaucaugggcauccccuacugcaacuacuccaaguacugguaccugaaccacaccagcaccgggcggaccucccugccccgcugcuggcucgucagcaacggcuccuaccugaacgagacgcacuucagcgacgacaucgagcagcaggccgacaacaugaucaccgagaugcugcagaaggaguaccucgaccggcagggcaagaccccgcuggggcugguggaccuguucguguucuccaccagcuucuaccucaucuccaucuuccugcaccuggucaagaucccgacgcaccgccacaucgugggcaagcccugccccaagccccaccggcucaaccacauggggaucugcagcugcggccuguacaagcagccgggggugcccguccgcuggaagcggugaggacuaguaauaaggaaacuguaugaaugucugugggcaggaagugaagagauccuucuguaaagguuuuuggaauuaugucugcugaauaauaaacuuuuuugaaauaauaaaucugguagaaaaaugagaucucaaaggcucuuuucagagccaccaaaaaaaaaaaaaaaaaaaaaaaaaaaaaaaaaaaaaaaaaaaaaaaaaaaaaaaaaaaaaaaaaaaaaaaaaaaaaaaaaaaaaaaaaaaaaaaaaaaaa

SEQ ID NO: 37595 - RNA, 1812 nt, Artificial Sequence
  mRNA product Design b-4 (hSL-A100) comprising derived and/or modified sequence from LASV(G1180-SLE-2010;Clade IV)__AIT17168__GPCmut10 (opt1)
aggagagucccgcagucggcguccagcggcucugcuuguucgugugugugucguugcaggccuuauucaagcuuaccaugggccagaucgugaccuucuuccaggaggucccccacgugaucgaggaggugaugaacaucguccugaucgcccucagcauccuggccgugcugaaggggcucuacaacuucgcgaccugcggccugguggggcugcucaccuuccugcugcucugcggccgcuccugcaccgccagccgguacaagggggucuacgagcugcagacccuggagcucaacauggagacccugaacaugugcaugccgcuguccugcaccaagaacaacagccaccacuacaucauggugggcaacgagaccggccucgagcugacccugacgaacaccuccaucaucaaccacaaguucugcaaccucagcgacgcccacaagaagaaccuguacgaccacgcccugauguccaucaucagcaccuuccaccucuccauccccaacuucaaccaguacgaggccaugagcugcgacuucaacgggggcaagaucuccgugcaguacaaccugagccacuccuacgcgggggacgccgccaaccacugcggcaccgucgccaacggggugcugcagacguucaugcgcauggcguggggcggcagcuacaucgcccucgacuccgggcacggcagcugggacugcaucaugaccuccuaccaguaccugaucauccagaacaccaccugggaggaccacugccaguucagccggcccucccccaucggguaccugggccuccugagccagcgcacgcgggacaucuacaucagccgccggcugcucggcaccuucaccuggacccuguccgacagcgaggggaaggacacgccgggcggguacugccugacccgcuggaugcucaucgaggccgagcugaagugcuucggcaacaccgccguggccaagugcaacgagaagcacgacgaggaguucugcgacaugcugcggcuguucgacuucugcaagcaggcgauccagcgccugaaggccgaggcccagauguccauccagcugaucaacaaggccgucaacgcccucaucaacgaccagcugaucaugaagaaccaccuccgggacaucauggggauccccuacugcaacuacagcaaguacugguaccucaaccacaccacgaccggcaagaccucccugcccaagugcuggcuggugagcaacggcuccuaccucaacgagacccacuucagcgacgacaucgagcagcaggcggacaacaugaucacggagaugcugcagaaggaguacauggagcgccaggggaagacgccccugggccucguggaccuguucgucuucuccaccagcuucuaccugaucuccaucuuccugcaccucgugaagaucccgacccaccggcacaucgugggcaagagcugccccaagccccaccgccugaaccacauggggaucugcuccugcgggcuguacaagcagcccggcgucccggugaaguggaagcggugaggacuaguaauaaggaaacuguaugaaugucugugggcaggaagugaagagauccuucuguaaagguuuuuggaauuaugucugcugaauaauaaacuuuuuugaaauaauaaaucugguagaaaaaugagaucucaaaggcucuuuucagagccaccaaaaaaaaaaaaaaaaaaaaaaaaaaaaaaaaaaaaaaaaaaaaaaaaaaaaaaaaaaaaaaaaaaaaaaaaaaaaaaaaaaaaaaaaaaaaaaaaaaaaa

SEQ ID NO: 37596 - RNA, 1812 nt, Artificial Sequence
  mRNA product Design b-4 (hSL-A100) comprising derived and/or modified sequence from LASV(G1442-SLE-2011;Clade IV)__AIT17180__GPCmut10 (opt1)
aggagagucccgcagucggcguccagcggcucugcuuguucgugugugugucguugcaggccuuauucaagcuuaccaugggccagaucgugaccuucuuccaggaggucccccacgugaucgaggaggugaugaacaucguccugaucgcccucagcauccuggccgugcugaaggggcucuacaacguggcgaccugcggccugaucgggcuggucacguuccuccugcugugcggccgcuccugcaccaccacccucuacaaggggguguacgagcugcagacgcuggagcucaacauggagacccugaacaugugcaugccgcugagcugcaccaagaacaacucccaccacuacauccgggugggcaacgagacgggccucgagcugacccugaccaacaccagcaucaucaaccacaaguucugcaaccucuccgacgcccacaagaagaaccuguacgaccacgcccugaugagcaucaucuccacguuccaccucagcauccccaacuucaaccaguacgaggccauguccugcgacuucaacgggggcaagaucagcguccaguacaaccugucccacagcuacgccggggacgcggccaaccacugcggcaccguggccaacggggugcugcagaccuucaugcgcauggccuggggcggcuccuacaucgcgcucgacagcgggcggggcaacugggacugcaucaugaccuccuaccaguaccugaucauccagaacacgaccugggacgaccacugccaguucagccgccccucccccaucggguaccugggccuccugagccagcggacccgcgacgucuacaucucccggcgccugcucggcaccuucacguggacccugagcgacagcgaggggaaggacaccccgggcggguacugccugacccgguggaugcucaucgaggccgagcugaagugcuucggcaacacggccguggccaagugcaacgagaagcacgacgaggaguucugcgacaugcugcgccucuucgacuucugcaagcaggccauccagcggcugaaggcggaggcccagauguccauccagcugaucaacaaggccgugaacgcccucaucaacgaccagcugaucaugaagaaccaccuccgcgacaucauggggauccccuacugcaacuacagcaaguacugguaccugaacaacaccgccaccggcaagaccucccugcccaagugcuggcugaucagcaacggcuccuaccucaacgagacgcacuucagcgacgacaucgagcaggaggcggacaacaugaucaccgagaugcugcagaaggaguacauggagcggcaggggaagacgccccugggccucgucgaccuguucguguucuccaccagcuucuaccugaucuccaucuuccugcaccucgugaagaucccgacccaccgccacaucgucggcaagagcugccccaagccccaccggcugaaccacauggggaucugcuccugcgggcuguacaagcagcccggcgugccggugcgcuggaagcggugaggacuaguaauaaggaaacuguaugaaugucugugggcaggaagugaagagauccuucuguaaagguuuuuggaauuaugucugcugaauaauaaacuuuuuugaaauaauaaaucugguagaaaaaugagaucucaaaggcucuuuucagagccaccaaaaaaaaaaaaaaaaaaaaaaaaaaaaaaaaaaaaaaaaaaaaaaaaaaaaaaaaaaaaaaaaaaaaaaaaaaaaaaaaaaaaaaaaaaaaaaaaaaaaa

SEQ ID NO: 37597 - RNA, 1812 nt, Artificial Sequence
  mRNA product Design b-4 (hSL-A100) comprising derived and/or modified sequence from LASV(G3010-SLE-2013;Clade IV)__AIT17344__GPCmut10 (opt1)
aggagagucccgcagucggcguccagcggcucugcuuguucgugugugugucguugcaggccuuauucaagcuuaccaugggccagaucgugaccuucuuccaggaggucccccacgugaucgaggaggugaugaacaucguccugaucgcccucagcauccuggccgugcugaaggggcucuacaacuucgcgaccugcggccugguggggcuggucacguuccuccugcugugcggccgcuccugcaccaccagccucuacaaggggguguacgagcugcagacccuggagcucaacauggagacgcugaacaugugcaugccgcuguccugcaccaagaacaacagccaccacuacaucauggugggcaacgagaccggccucgagcugacgcugaccaacaccuccaucaucaaccacaaguucugcaaccucagcgacgcccacaagaagaaccuguacaaccacgcccugauguccaucaucagcaccuuccaccucuccauccccaacuucaaccaguacgaggccaugagcugcgacuucaacgggggcaagaucuccguccaguacaaccugagccacuccuacgccggggacgcggccagccacugcggcacgguggccaacggggugcugcagaccuucaugcggauggccuggggcggcuccuacaucgcgcucgacagcggguacggcaagugggacugcaucaugaccuccuaccaguaccugaucauccagaacaccacgugggaggaccacugccaguucagccgccccucccccaucggguaccugggccuccugagccagcggacccgcgacaucuacaucagccggcgccugcucggcaccuucaccuggacgcuguccgacagcgaggggaaggacaccccgggcggguacugccugacccgguggaugcucaucgaggccgagcugaagugcuucggcaacaccgccgucgccaagugcaacgagaagcacgacgaggaguucugcgacaugcugcgccucuucgacuucugcaagcaggccauccagcggcugaagacggaggcgcagauguccauccagcugaucaacaaggccgugaacgcccucaucaacgaccagcugaucaugaagaaccaccuccgcgacaucauggggauccccuacugcaacuacagcaaguacugguaccugaaccacaccaccaccggcaagacgucccugcccaagugcuggcuggugagcaacggcuccuaccucaacgagacccacuucagcgacgacaucgagcagcaggccgacaacaugaucaccgagaugcugcagaaggaguacauggagcggcaggggaagacgccccugggccucgucgaccuguucguguucuccaccagcuucuaccugaucuccaucuuccugcaccucgugaagaucccgacccaccgccacaucgucggcaagagcugccccaagccccaccggcugaaccacauggggaucugcuccugcgggcuguacaagcagcccggcgugccggugcgcuggaagcggugaggacuaguaauaaggaaacuguaugaaugucugugggcaggaagugaagagauccuucuguaaagguuuuuggaauuaugucugcugaauaauaaacuuuuuugaaauaauaaaucugguagaaaaaugagaucucaaaggcucuuuucagagccaccaaaaaaaaaaaaaaaaaaaaaaaaaaaaaaaaaaaaaaaaaaaaaaaaaaaaaaaaaaaaaaaaaaaaaaaaaaaaaaaaaaaaaaaaaaaaaaaaaaaaa

SEQ ID NO: 37598 - RNA, 1812 nt, Artificial Sequence
  mRNA product Design b-4 (hSL-A100) comprising derived and/or modified sequence from LASV(G502-SLE-2009;Clade IV)__AIT17126__GPCmut10 (opt1)
aggagagucccgcagucggcguccagcggcucugcuuguucgugugugugucguugcaggccuuauucaagcuuaccaugggccagaucgugaccuucuuccaggaggucccccacgugaucgaggaggugaugaacaucguccugaucgcccucagcauccuggccgugcugaaggggcucuacaacuucgcgaccugcggccugguggggcugcucacguuccugcugcucugcggccgcuccugcaccaccgggcuguacaagggcgucuacgagcugcagacccucgagcugaacauggagacgcugaacaugugcaugccgcucagcugcaccaagaacaacucccaccacuacaucauggugggcaacgagaccgggcuggagcugacgcucaccaacaccagcaucaucaaccacaaguucugcaaccuguccgacgcccacaagaagaaccuguacgaccacgcccucaugagcaucaucuccaccuuccaccugagcauccccaacuucaaccaguacgaggccauguccugcgacuucaacggcgggaagaucagcgugcaguacaaccugucccacagcuacgccggcgacgcggccgaccacugcgggacggucgccaacggcgugcuccagaccuucaugcggauggccuggggcggguccuacaucgcgcuggacagcggccgcgggcggugggacugcaucaugaccuccuaccaguaccugaucauccagaacaccacgugggaggaccacugccaguucagccgccccucccccaucggcuaccucggccugcugagccagcggacccgcgacaucuacaucucccggcgccuccuggggaccuucaccuggacgcugagcgacagcgagggcaaggacacccccgggggcuacugccucacccgguggaugcugaucgaggccgagcugaagugcuucgggaacaccgccguggccaagugcaacgagaagcacgacgaggaguucugcgacaugcuccgccuguucgacuucugcaagcaggccauccagcggcugaaggcggaggcccagauguccauccagcucaucaacaaggccgucaacgcccugaucaacgaccagcuggugaugaagaaccaccuccgcgacaucaugggcauccccuacugcaacuacagccgguacugguaccugaaccacacgaccaccggccgcaccucccugcccaagugcuggcucgugagcaacggguccuaccugaacgagacgcacuucagcgacgacaucgagcagcaggccgacaacaugaucaccgagaugcugcagaaggaguacauggagcggcagggcaagaccccgcucgggcuggucgaccuguucguguucuccaccagcuucuaccugaucuccaucuuccuccaccuggugaagaucccgacgcaccgccacaucgucggcaagagcugccccaagccccaccggcugaaccacauggggaucugcuccugcggccucuacaagcagcccggcgugccggugaaguggaagcgcugaggacuaguaauaaggaaacuguaugaaugucugugggcaggaagugaagagauccuucuguaaagguuuuuggaauuaugucugcugaauaauaaacuuuuuugaaauaauaaaucugguagaaaaaugagaucucaaaggcucuuuucagagccaccaaaaaaaaaaaaaaaaaaaaaaaaaaaaaaaaaaaaaaaaaaaaaaaaaaaaaaaaaaaaaaaaaaaaaaaaaaaaaaaaaaaaaaaaaaaaaaaaaaaaa

SEQ ID NO: 37599 - RNA, 1812 nt, Artificial Sequence
  mRNA product Design b-4 (hSL-A100) comprising derived and/or modified sequence from LASV(G733-SLE-2010;Clade IV)__AIT17154__GPCmut10 (opt1)
aggagagucccgcagucggcguccagcggcucugcuuguucgugugugugucguugcaggccuuauucaagcuuaccaugggccagaucgugaccuucuuccaggaggucccccacgugaucgaggaggugaugaacaucguccugaucgcccucagcauccuggccgugcugaaggggcucuacaacuucgcgaccugcggcaucguggggcuggucuccuuccugcuccugugcggccgcagcugcacgaccucccuguacaaggggguguacgagcuccagacccuggagcugaacauggagacccucaacaugugcaugccgcugagcugcaccaagaacaacucccaccacuacaucauggugggcaacgagaccggccuggagcucacccugacgaacaccagcaucaucaaccacaaguucugcaaccuguccgacgcccacaagaagaaccucuacgaccacgcccugaugagcaucaucuccaccuuccaccugagcauccccaacuucaaccaguacgaggccauguccugcgacuucaacgggggcaagaucagcguccaguacaaccucucccacagcuacgccggggacgcggccaaccacugcggcaccaucgccaacggggugcugcagacguucaugcggauggccuggggcggcuccuacaucgcgcuggacagcgggcgcgaccggugggacugcaucaugaccuccuaccaguaccucaucauccagaacaccaccugggaggaccacugccaguucagccgccccucccccaucggcuaccuggggcugcucagccagcggacgcgcgacaucuacaucagccggcgccugcugggcaccuucaccuggacccucuccgacagcgagggcaaggacacgcccgggggcuacugccugacccgguggaugcugaucgaggccgagcucaagugcuucgggaacaccgccguggccaagugcaacgagaagcacgacgaggaguucugcgacaugcugcgccuguucgacuucugcaagcaggccauccagcggcucaaggcggaggcccagauguccauccagcugaucaacaaggccgucaacgcccugaucaacgaccagcucaucaugaagaaccaccuccgcgacaucaugggcauccccuacugcaacuacagcaaguacugguaccugaaccacaccacgaccgggaagaccucccugcccaagugcuggcuggugagcaacggcuccuaccugaacgagacccacuucagcgacgacaucgagcagcaggccgacaacaugaucacggagaugcuccagaaggaguacauggagcggcagggcaagaccccgcuggggcugguggaccucuucgucuucuccaccagcuucuaccugaucuccaucuuccugcaccuggugaagaucccgacccaccgccacguggucggcaagagcugccccaagccccaccggcucaaccacauggggaucugcuccugcggccuguacgggcagcccggcgugccggugaaguggaagcgcugaggacuaguaauaaggaaacuguaugaaugucugugggcaggaagugaagagauccuucuguaaagguuuuuggaauuaugucugcugaauaauaaacuuuuuugaaauaauaaaucugguagaaaaaugagaucucaaaggcucuuuucagagccaccaaaaaaaaaaaaaaaaaaaaaaaaaaaaaaaaaaaaaaaaaaaaaaaaaaaaaaaaaaaaaaaaaaaaaaaaaaaaaaaaaaaaaaaaaaaaaaaaaaaaa

SEQ ID NO: 37600 - RNA, 1812 nt, Artificial Sequence
  mRNA product Design b-4 (hSL-A100) comprising derived and/or modified sequence from MOPV/LASV reassortant(IGS-1;Clade IV)__AFY05576__GPCmut10 (opt1)
aggagagucccgcagucggcguccagcggcucugcuuguucgugugugugucguugcaggccuuauucaagcuuaccaugggccagaucgugaccuucuuccaggaggucccccacgugaucgaggaggugaugaacaucguccugaucgcccucagcgugcuggccgugcugaaggggcucuacaacuucgcgaccugcggccuggucgggcuggugacguuccuccugcugugcggccgcuccugcaccaccagccucuacaaggggguguacgagcugcagacccuggagcucaacauggagacgcugaacaugugcaugccgcuguccugcaccaagaacaacagccaccacuacaucauggucggcaacgagaccggccucgagcugacgcugaccaacaccuccaucaucaaccacaaguucugcaaccucagcgacgcccacaagaagaaccuguacgaccacgcccugauguccaucaucagcaccuuccaccucuccauccccaacuucaaccaguacgaggccaugagcugcgacuucaacgggggcaagaucuccgugcaguacaaccugagccacuccuacgccggggacgcggccaaccacugcggcacgguggccaacgggguccugcagaccuucaugcggauggccuggggcggcagcuacaucgcgcucgacuccgggcgcggcaacugggacugcaucaugaccagcuaccaguaccugaucauccagaacaccacgugggaggaccacugccaguucucccggcccagccccaucggguaccugggccuccugucccagcgcacccgggacaucuacaucagccgccggcugcucggcaccuucaccuggacgcugagcgacuccgagggggaggacaccccgggcggguacugccugacccgcuggaugcucaucgaggccgagcugaagugcuucggcaacaccgccguggccaagugcaacgagaagcacgacgaggaguucugcgacaugcugcggcuguucgacuucugcaagcaggccauccagcgccugaaggcggaggcccagaugagcauccagcugaucaacaaggccgugaacgcccucaucaacgaccagcugaucaugaagaaccaccuccgggacaucauggggauccccuacugcaacuacuccaaguacugguaccucaaccacacgaccaccggccgcaccagccugcccaagugcuggcuggucuccaacggcagcuaccucaacgagacgcacuucuccgacgacaucgagcagcaggccgacaacaugaucaccgagaugcugcagaaggaguacauggagcggcaggggaagacgccccugggccucguggaccuguucguguucagcaccuccuucuaccugaucagcaucuuccugcaccucgucaagaucccgacccaccgccacaucguggggaaguccugccccaagccccaccggcugaaccacaugggcaucugcagcugcgggcuguacaagcagcccggcgugccggucaaguggaagcgcugaggacuaguaauaaggaaacuguaugaaugucugugggcaggaagugaagagauccuucuguaaagguuuuuggaauuaugucugcugaauaauaaacuuuuuugaaauaauaaaucugguagaaaaaugagaucucaaaggcucuuuucagagccaccaaaaaaaaaaaaaaaaaaaaaaaaaaaaaaaaaaaaaaaaaaaaaaaaaaaaaaaaaaaaaaaaaaaaaaaaaaaaaaaaaaaaaaaaaaaaaaaaaaaaa

SEQ ID NO: 37601 - RNA, 1812 nt, Artificial Sequence
  mRNA product Design b-4 (hSL-A100) comprising derived and/or modified sequence from LASV(LM765-SLE-2012;Clade IV)__AIT17814__GPCmut10 (opt1)
aggagagucccgcagucggcguccagcggcucugcuuguucgugugugugucguugcaggccuuauucaagcuuaccaugggccagaucgugaccuucuuccaggaggucccccacgugaucgaggaggugaugaacaucguccugaucgcccucagcauccuggccgugcugaaggggcucuacaacuucgcgaccugcggccugguggggcuggucacguuccuccugcugugcggccgcuccugcaccaccagccucuacaaggggguguacgagcugcagacccuggagcucaacauggagacgcugaacaugugcaugccgcuguccugcaccaagaacaacagccaccacuacaucauggugggcaacgagaccggccucgagcugacgcugaccaacaccuccaucaucgaccacaaguucugcaaccucagcgacgcccaccggaagaaccuguacgaccacgcccugauguccaucaucagcaccuuccaccucuccauccccaacuucaaccaguacgaggccaugagcugcgacuucaacgggggcaagaucuccguccaguacaaccugagccacuccuacgccaaggacgcggccgaccacugcgggacgguggccaacggcgugcugcagaccuucaugcgcauggccuggggcgggagcuacaucgcgcucgacuccggccgggggcgcugggacugcaucaugaccagcuaccaguaccugaucauccagaacaccacgugggaggaccacugccaguucucccggcccagccccaucggcuaccuggggcuccugucccagcgcacccgggacaucuacaucagccgccggcugcucggcaccuucaccuggacgcugagcgacuccgagggcaaggacacccccgggggcuacugccugacccgcuggaugcucaucgaggccgagcugaagugcuucgggaacaccgccgucgccaagugcaacgagaagcacgacgaggaguucugcgacaugcugcggcuguucgacuucugcaagcaggccauccagcgccugaaggcggaggcccagaugagcauccagcugaucaacaaggccgugaacgcccucaucaacgaccagcugaucaugaagaaccaccuccgggacaucaugggcauccccuacugcaacuacuccaaguacugguaccucaaccacacgaccaccgggaagaccagccugcccaagugcuggcugguguccaacggcagcuaccucaacgagacgcacuucuccgacgacaucgagcagcaggccgacaacaugaucaccgagaugcugcagaaggaguacauggagcgccagggcaagaccccgcuggggcucgucgaccuguucguguucagcaccuccuucuaccugaucagcaucuuccugcaccucgugaagaucccgacgcaccggcacaucgucggcaagcccugccccaagccccaccgccugaaccacauggggaucugcuccugcggccuguacaagcagccgggggugcccgugaaguggaagcggugaggacuaguaauaaggaaacuguaugaaugucugugggcaggaagugaagagauccuucuguaaagguuuuuggaauuaugucugcugaauaauaaacuuuuuugaaauaauaaaucugguagaaaaaugagaucucaaaggcucuuuucagagccaccaaaaaaaaaaaaaaaaaaaaaaaaaaaaaaaaaaaaaaaaaaaaaaaaaaaaaaaaaaaaaaaaaaaaaaaaaaaaaaaaaaaaaaaaaaaaaaaaaaaaa

SEQ ID NO: 37602 - RNA, 1812 nt, Artificial Sequence
  mRNA product Design b-4 (hSL-A100) comprising derived and/or modified sequence from LASV(LM776-SLE-2012;Clade IV)__AIT17824__GPCmut10 (opt1)
aggagagucccgcagucggcguccagcggcucugcuuguucgugugugugucguugcaggccuuauucaagcuuaccaugggccagaucgugaccuucuuccaggaggucccccacgugaucgaggaggugaugaacaucguccugaucgcccucagcauccuggccgugcugaaggggcucuacaacuucgcgaccugcggccugguggggcuggucacguuccuccugcugugcggccgcuccugcaccaccagcguguacaaggggguguacgagcuccagacccuggagcugaacauggagacgcucaacaugugcaugccgcuguccugcaccaagaacaacagccaccacuacaucauggucggcaacgagaccggccuggagcucacgcugaccaacaccuccaucaucaaccacaaguucugcaaccugagcgacgcccacaagaagaaccucuacgaccacgcccugauguccaucaucagcaccuuccaccuguccauccccaacuucaaccaguacgaggccaugagcugcgacuucaacgggggcaagaucuccgugcaguacaaccucagccacuccuacgccggggacgcggccaaccacugcggcacgguggccaacgggguccugcagaccuucaugcggauggccuggggcggcagcuacaucgcgcuggacuccgggcacggcaagugggacugcaucaugaccagcuaccaguaccucaucauccagaacaccacgugggaggaccacugccaguucucccgccccagccccaucggguaccugggccugcucucccagcggacccgcgacaucuacaucagccggcgccugcugggcaccuucaccuggacgcucagcgacuccgaggggaaggacaccccgggcggguacugccugacccgguggaugcugaucgaggccgagcucaagugcuucggcaacaccgccguggccaagugcaacgagaagcacgacgaggaguucugcgacaugcugcgccuguucgacuucugcaagcaggccauccagcggcucaaggcggaggcccagaugagcauccagcugaucaacaaggccgugaacgcccugaucaacgaccagcucaucaugaagaaccaccuccgcgacaucauggggauccccuacugcaacuacuccaaguacugguaccugaaccacacgaccaccggcaagaccagccugcccaagugcuggcuggucuccaacggcagcuaccugaacgagacgcacuucuccgacgacaucgagcagcaggccgacaacaugaucaccgagaugcuccagaaggaguacauggagcggcaggggaagacgccccugggccugguggaccucuucguguucagcaccuccuucuaccugaucagcaucuuccugcaccuggucaagaucccgacccaccgccacaucguggggaaguccugccccaagccccaccggcucaaccacaugggcaucugcagcugcgggcuguacaagcagcccggcgugccgguccgcuggaagcggugaggacuaguaauaaggaaacuguaugaaugucugugggcaggaagugaagagauccuucuguaaagguuuuuggaauuaugucugcugaauaauaaacuuuuuugaaauaauaaaucugguagaaaaaugagaucucaaaggcucuuuucagagccaccaaaaaaaaaaaaaaaaaaaaaaaaaaaaaaaaaaaaaaaaaaaaaaaaaaaaaaaaaaaaaaaaaaaaaaaaaaaaaaaaaaaaaaaaaaaaaaaaaaaaa

SEQ ID NO: 37603 - RNA, 1812 nt, Artificial Sequence
  mRNA product Design b-4 (hSL-A100) comprising derived and/or modified sequence from LASV(Mad39;Clade IV)__ANH09722__GPCmut10 (opt1)
aggagagucccgcagucggcguccagcggcucugcuuguucgugugugugucguugcaggccuuauucaagcuuaccaugggccagaucgugaccuucuuccaggaggucccccacgugaucgaggaggugaugaacaucguccugaucgcccucagcauccuggccgugcugaaggggcucuacaacguggcgaccugcggccugaucgggcuggucacguuccuccugcugugcggccgcuccugcaccaccacccucuacaaggggguguacgagcugcaggcccuggagcucaacauggagacgcugaacaugugcaugccgcugagcugcaccaagaacaacucccaccacuacauccgggugggcaacgagaccggccucgagcugacgcugaccaacaccagccucaucaaccacaaguucugcaaccuguccgacgcccacaagaagaaccuguacgaccacgcccucaugagcaucaucuccaccuuccaccugagcauccccaacuucaaccaguacgaggccauguccugcgacuucaacgacgggaagaucagcguccaguacaaccugucccacacguacgcgggcgacaccgccaaccacugcgggaccguggccaacggcgugcuccagaccuucaugcgcauggccuggggcgggagcuacaucgcgcuggacuccggccgcgggggcugggacugcaucaugacgagcuaccaguaccugaucauccagaacaccaccugggaggaccacugccaguucucccggcccagccccaucggguaccucggccugcugucccagcggacccgcgacaucuacaucagccggcgccuccugggcacguucaccuggacccuguccgacagcgaggggaaggacaccccgggcggguacugccucacgcgguggaugcugaucgaggccgagcugaagugcuucggcaacaccgccgucgccaagugcaacgagaagcacgacgaggaguucugcgacaugcuccgccuguucgacuucugcaagcaggccauccagcggcugaaggcggaggcccagaugagcauccagcucaucaacaaggccgugaacgcccugaucaacgaccagcugaucaugaagaaccaccuccgcgacaucauggggauccccuacugcaacuacuccaaguacugguaccugaaccacaccgugaccggcaagacgagccugcccaagugcuggcucgucuccaacggcagcuaccugaacgagacccacuucuccgacgacaucgagcagcaggccgacaacaugaucaccgagaugcugcagaaggaguacauggagcggcaggggaagacgccccucggccugguggaccuguucguguucagcaccuccuucuaccugaucagcaucuuccuccaccuggucaagaucccgacccaccgccacgugguggggaagcccugccccaagccccaccggcugaaccacaugggcaucugcuccugcggguucuacaagcagccgggcguccccgugcgcuggaagcggugaggacuaguaauaaggaaacuguaugaaugucugugggcaggaagugaagagauccuucuguaaagguuuuuggaauuaugucugcugaauaauaaacuuuuuugaaauaauaaaucugguagaaaaaugagaucucaaaggcucuuuucagagccaccaaaaaaaaaaaaaaaaaaaaaaaaaaaaaaaaaaaaaaaaaaaaaaaaaaaaaaaaaaaaaaaaaaaaaaaaaaaaaaaaaaaaaaaaaaaaaaaaaaaaa

SEQ ID NO: 37604 - RNA, 1812 nt, Artificial Sequence
  mRNA product Design b-4 (hSL-A100) comprising derived and/or modified sequence from LASV(Z0947-SLE-2011;Clade IV)__AIT17840__GPCmut10 (opt1)
aggagagucccgcagucggcguccagcggcucugcuuguucgugugugugucguugcaggccuuauucaagcuuaccaugggccagaucgugaccuucuuccaggaggucccccacgugaucgaggaggugaugaacaucguccugaucgcccucagcauccuggccgugcugaaggggcucuacaacuucgcgaccugcggccugguggggcuggucacguuccuccugcugugcggccgcuccugcaccaucagccucuacaaggggguguacgagcugcagacccuggagcucaacauggagacccugaacaugugcaugccgcuguccugcaccaagaacaacagccaccacuacaucauggugggcaacgagaccggccucgagcugacccugacgaacaccuccaucaucaaccacaaguucugcaaccucagcgacgcccacaagaagaaccuguacgaccacgcccugauguccaucaucagcaccuuccaccucuccauccccaacuucaaccaguacgaggccaugagcugcgacuucaacgggggcaagaucuccguccaguacaaccugagccacuccuacgccggggacgcggccaaccacugcggcaccguggccaacggggugcugcagacguucaugcggauggccuggggcggcagcuacaucgcgcucgacuccgggcgcgaccggugggacugcaucaugaccagcuaccaguaccugaucauccagaacaccaccugggaggaccacugccaguucucccgccccagccccaucggcuaccuggggcuccugucccagcggacgcgcgacaucuacaucagccggcgccugcucggcaccuucaccuggacccugagcgacuccgagggcaaggacacgcccgggggcuacugccugacccgguggaugcucaucgaggccgagcugaagugcuucgggaacaccgccgucgccaagugcaacgagaagcacgacgaggaguucugcgacaugcugcgccucuucgacuucugcaagcaggccauccagcggcugaaggcggaggcccagaugagcauccagcugaucaacaaggccgugaacgcccucaucaacgaccagcugaucaugaagaaccaccuccgcgacaucaugggcauccccuacugcaacuacuccaaguacugguaccugaaccacaccacgaccgggaagaccagccugcccaagugcuggcugguguccaacggcagcuaccucaacgagacccacuucuccgacgacaucgagcagcaggccgacaacaugaucacggagaugcugcagaaggaguacauggagcggcagggcaagaccccgcuggggcucgucgaccuguucguguucagcaccuccuucuaccugaucagcaucuuccugcaccucgugaagaucccgacccaccgccacaucgucggcaagcccugccccaagccccaccggcugaaccacauggggaucugcuccugcggccuguacaagcagccgggggugcccgugaaguggaagcgcugaggacuaguaauaaggaaacuguaugaaugucugugggcaggaagugaagagauccuucuguaaagguuuuuggaauuaugucugcugaauaauaaacuuuuuugaaauaauaaaucugguagaaaaaugagaucucaaaggcucuuuucagagccaccaaaaaaaaaaaaaaaaaaaaaaaaaaaaaaaaaaaaaaaaaaaaaaaaaaaaaaaaaaaaaaaaaaaaaaaaaaaaaaaaaaaaaaaaaaaaaaaaaaaaa

SEQ ID NO: 37605 - RNA, 1812 nt, Artificial Sequence
  mRNA product Design b-4 (hSL-A100) comprising derived and/or modified sequence from LASV(Josiah;Clade IV)__NP_694870__GPCmut10 (opt1)
aggagagucccgcagucggcguccagcggcucugcuuguucgugugugugucguugcaggccuuauucaagcuuaccaugggccagaucgugaccuucuuccaggaggucccccacgugaucgaggaggugaugaacaucguccugaucgcccucagcgugcuggccgugcugaaggggcucuacaacuucgcgaccugcggccuggucgggcuggugaccuuccuccugcugugcggccgcuccugcaccaccagccucuacaaggggguguacgagcugcagacccuggagcucaacauggagacgcugaacaugugcaugccgcuguccugcaccaagaacaacagccaccacuacaucauggucggcaacgagaccggccucgagcugacccugacgaacaccuccaucaucaaccacaaguucugcaaccucagcgacgcccacaagaagaaccuguacgaccacgcccugauguccaucaucagcaccuuccaccucuccauccccaacuucaaccaguacgaggccaugagcugcgacuucaacgggggcaagaucuccgugcaguacaaccugagccacuccuacgccggggacgcggccaaccacugcggcaccguggccaacgggguccugcagacguucaugcggauggccuggggcggcagcuacaucgcgcucgacuccgggcgcggcaacugggacugcaucaugaccagcuaccaguaccugaucauccagaacaccaccugggaggaccacugccaguucucccggcccagccccaucggguaccugggccuccugucccagcgcacgcgggacaucuacaucagccgccggcugcucggcaccuucaccuggacccugagcgacuccgaggggaaggacacgccgggcggguacugccugacccgcuggaugcucaucgaggccgagcugaagugcuucggcaacaccgccguggccaagugcaacgagaagcacgacgaggaguucugcgacaugcugcggcuguucgacuucugcaagcaggccauccagcgccugaaggcggaggcccagaugagcauccagcugaucaacaaggccgugaacgcccucaucaacgaccagcugaucaugaagaaccaccuccgggacaucauggggauccccuacugcaacuacuccaaguacugguaccucaaccacaccacgaccggccgcaccagccugcccaagugcuggcuggucuccaacggcagcuaccucaacgagacccacuucuccgacgacaucgagcagcaggccgacaacaugaucacggagaugcugcagaaggaguacauggagcggcaggggaagacgccccugggccugguggaccucuucguguucagcaccuccuucuaccugaucagcaucuuccugcaccucgucaagaucccgacccaccgccacaucguggggaaguccugccccaagccccaccggcugaaccacaugggcaucugcagcugcgggcuguacaagcagcccggcgugccggucaaguggaagcgcugaggacuaguaauaaggaaacuguaugaaugucugugggcaggaagugaagagauccuucuguaaagguuuuuggaauuaugucugcugaauaauaaacuuuuuugaaauaauaaaucugguagaaaaaugagaucucaaaggcucuuuucagagccaccaaaaaaaaaaaaaaaaaaaaaaaaaaaaaaaaaaaaaaaaaaaaaaaaaaaaaaaaaaaaaaaaaaaaaaaaaaaaaaaaaaaaaaaaaaaaaaaaaaaaa

SEQ ID NO: 37606 - RNA, 1809 nt, Artificial Sequence
  mRNA product Design b-4 (hSL-A100) comprising derived and/or modified sequence from LASV(LP;Clade I)__AAF86701__GPCmut10 (opt1)
aggagagucccgcagucggcguccagcggcucugcuuguucgugugugugucguugcaggccuuauucaagcuuaccaugggccagaucaucaccuucuuccaggaggugccccacgucaucgaggaggugaugaacaucgugcugaucgcccucagccugcuggccauccucaaggggcuguacaacaucgcgaccugcggcaucaucgggcuggucgccuuccucuuccugugcggcaaguccugcagccugacgcucaagggcggguacgagcugcagacccuggagcucaacauggagacccugaacaugugcaugccgcuguccugcaccaagaacagcucccaccacuacauccgcgugggcaacgagacggggcucgagcugacccugaccaacaccagcaucaucaaccacaaguucugcaaccucuccgacgcccacaagaagaaccuguacgaccacgcccugaugagcaucaucuccacguuccaccucagcauccccaacuucaaccaguacgaggccauguccugcgacuucaacggcgggaagaucagcgugcaguacaaccugucccacagcuacgcgggcgacgccgccgagcacugcgggaccgucgccaacggcgugcugcagaccuucaugcggauggcguggggcgggcgcuacaucgcccucgacuccggcaaggggaacugggacugcaucaugaccagcuaccaguaccugaucauccagaacacgaccugggaggaccacugccaguucucccggcccagccccaucggcuaccugggccuccugucccagcgcacccgggacaucuacaucagccgccggcugcucgggaccuucacguggacccugagcgacuccgagggcaacgagacccccgggggcuacugccugacccgcuggaugcucaucgaggccgagcugaagugcuucgggaacacggccguggccaagugcaacgagaagcacgacgaggaguucugcgacaugcugcggcuguucgacuucugcaagcaggcgauccgccggcugaaggccgaggcccagaugagcauccagcugaucaacaaggccgucaacgcccucaucaacgaccagcugaucaugaagaaccaccuccgcgacaucaugggcauccccuacugcaacuacuccaaguacugguaccucaaccacaccagcuccggccggaccagccugcccaagugcuggcugaucuccaacgggagcuaccucaacgagacccaguucuccgacgacaucgagcagcaggcggacaacaugaucacggagaugcugcagaaggaguacaucgagcgccagggcaagaccccgcuggggcugguggacaucuucaucuucagcaccuccuucuaccucaucagcaucuuccugcaccugaucaagaucccgacccaccggcacaucgugggcaagcccugccccaagccccaccgccucaaccacaugggggucugcuccugcggccuguacaagcacccgggcgugcccacgaaguggaagcggugaggacuaguaauaaggaaacuguaugaaugucugugggcaggaagugaagagauccuucuguaaagguuuuuggaauuaugucugcugaauaauaaacuuuuuugaaauaauaaaucugguagaaaaaugagaucucaaaggcucuuuucagagccaccaaaaaaaaaaaaaaaaaaaaaaaaaaaaaaaaaaaaaaaaaaaaaaaaaaaaaaaaaaaaaaaaaaaaaaaaaaaaaaaaaaaaaaaaaaaaaaaaaaaaa

SEQ ID NO: 37607 - RNA, 1809 nt, Artificial Sequence
  mRNA product Design b-4 (hSL-A100) comprising derived and/or modified sequence from LASV(803213;Clade II)__AAF86703__GPCmut10 (opt1)
aggagagucccgcagucggcguccagcggcucugcuuguucgugugugugucguugcaggccuuauucaagcuuaccaugggccagaucaucaccuucuuccaggaggugccccacgucaucgaggaggugaugaacaucgugcugaucgcccucagccugcuggccauccucaaggggaucuacaacgucgcgaccugcggccuguucgggcugaucuccuuccuccugcugugcggccgcagcugcuccgugacguacaaggggguguacgagcuccagacccuggagcugaacauggccaaccucaacaugugcaugccgcugagcugcaccaagaacaacucccaccacuacaucauggucggcaacgagaccggccuggagcucacgcugaccaacaccagcaucaucaaccacaaguucugcaaccuguccgacgcccacaagaagaaccucuacgaccacgcccugaugagcaucaucuccaccuuccaccugagcauccccaacuucaaccaguacgaggccauguccugcgacuucaacgggggcaagaucagcgugcaguacaaccucucccacagcuucgcgguggacgccgccaaccacugcgggacgaucgccaacggcguccugcagaccuucaugcggauggcguggggcggguccuacaucgcccuggacagcggcaaggggaacugggacugcaucaugaccuccuaccaguaccucaucauccagaacaccacgugggaggaccacugccaguucagccgccccucccccaucggcuaccuggggcugcucagccagcggacccgcgacaucuacaucagccggcgccugcugggcaccuucaccuggacgcucuccgacagcgagggcaacgaggcccccgggggcuacugccugacccgguggaugcugaucgaggccgagcucaagugcuucgggaacaccgccguggcgaagugcaacgagaagcacgacgaggaguucugcgacaugcugcgccuguucgacuucugcaagcaggccaucaagcggcucaagaccgaggcccagauguccauccagcugaucaacaaggccgugaacgcccugaucaacgaccagcucaucaugaagaaccaccuccgcgacaucaugggcauccccuacugcaacuacagccgguacugguaccugaaccacacggucaccgggaagaccucccugccccgcugcuggcuggugagcaacggcuccuaccugaacgagacccacuucagcgacgacaucgagcagcaggcggacaacaugaucacggagaugcuccagaaggaguacauggaccggcagggcaagaccccgcuggggcugguggaccuguucgucuucuccaccagcuucuaccucaucuccaucuuccugcaccuggugaagaucccgacccaccgccacaucgugggcaagcccugccccaagccccaccggcucaaccacauggggaucugcagcugcggccuguacaagcacccggggguccccgugaaguggaagcgcugaggacuaguaauaaggaaacuguaugaaugucugugggcaggaagugaagagauccuucuguaaagguuuuuggaauuaugucugcugaauaauaaacuuuuuugaaauaauaaaucugguagaaaaaugagaucucaaaggcucuuuucagagccaccaaaaaaaaaaaaaaaaaaaaaaaaaaaaaaaaaaaaaaaaaaaaaaaaaaaaaaaaaaaaaaaaaaaaaaaaaaaaaaaaaaaaaaaaaaaaaaaaaaaaa

SEQ ID NO: 37608 - RNA, 1809 nt, Artificial Sequence
  mRNA product Design b-4 (hSL-A100) comprising derived and/or modified sequence from LASV(GA391;Clade III)__CAA36645__GPCmut10 (opt1)
aggagagucccgcagucggcguccagcggcucugcuuguucgugugugugucguugcaggccuuauucaagcuuaccaugggccagaucgugaccuucuuccaggaggucccccacgugaucgaggaggugaugaacaucguccugaucgcccucagcauccuggccauccugaaggggcucuacaacguggcgaccugcggccugaucgggcuggugaccuuccuccugcuguccggccgcagcugcucccucaucuacaaggggaccuacgagcugcagacccuggagcucaacauggagacccugaacaugugcaugccgcugagcugcacgaagaacaacucccaccacuacauccgggucggcaacgagaccggccucgagcugacccugaccaacacgagcauccucaaccacaaguucugcaaccuguccgacgcccacaagcgcaaccuguacgaccacagccucauguccaucaucagcaccuuccaccuguccauccccaacuucaaccaguacgaggccaugagcugcgacuucaacgggggcaagaucaccgugcaguacaaccugucccacagcuucgccguggacgccgcggggcacugcggcacccucgccaacgggguccugcagacguucaugcggauggccuggggcggcuccuacaucgcccuggacagcgggcgcggcaacugggacugcaucaugaccuccuaccaguaccucaucauccagaacaccaccugggacgaccacugccaguucagccggcccucccccaucggguaccugggccugcucagccagcgcacgcgggacaucuacaucagccgccggcugcugggcaccuucaccuggacccucuccgacagcgaggggaacgagacgccgggcggguacugccugacccgcuggaugcugaucgaggcggagcucaagugcuucggcaacaccgccguggccaagugcaacgagaagcacgacgaggaguucugcgacaugcugcggcuguucgacuucugcaagcaggccauccgccggcucaagaccgaggcccagauguccauccagcugaucaacaaggcggugaacgcccugaucaacgaccagcucaucaugaagaaccaccuccgcgacaucauggggauccccuacugcaacuacagccgguacugguaccugaaccacacguccaccggcaagaccagccugccccgcugcuggcugaucuccaacggcagcuaccugaacgagaccaaguucuccgacgacaucgagcagcaggccgacaacaugaucacggagaugcugcagaaggaguacaucgaccggcaggggaagacgccccucggccuggucgaccuguucguguucagcaccuccuucuaccucaucagcaucuuccugcaccuggugaagaucccgacccaccgccacaucgucgggaagcccugccccaagccccaccggcucaaccacaugggcaucugcuccugcgggcuguacaagcagccgggcgugcccgugcgcuggaagcggugaggacuaguaauaaggaaacuguaugaaugucugugggcaggaagugaagagauccuucuguaaagguuuuuggaauuaugucugcugaauaauaaacuuuuuugaaauaauaaaucugguagaaaaaugagaucucaaaggcucuuuucagagccaccaaaaaaaaaaaaaaaaaaaaaaaaaaaaaaaaaaaaaaaaaaaaaaaaaaaaaaaaaaaaaaaaaaaaaaaaaaaaaaaaaaaaaaaaaaaaaaaaaaaaa

SEQ ID NO: 37609 - RNA, 1812 nt, Artificial Sequence
  mRNA product Design b-4 (hSL-A100) comprising derived and/or modified sequence from LASV(AV;Clade V)__CCA30314__GPCmut10 (opt1)
aggagagucccgcagucggcguccagcggcucugcuuguucgugugugugucguugcaggccuuauucaagcuuaccaugggccagaucgugaccuucuuccaggaggucccccacgugaucgaggaggugaugaacaucguccugaucgcccucagcauccuggccgugcugaaggggcucuacaacaucgcgaccugcggccugaucgggcugaucacguuccuccugcugugcggccgcuccugcagcuccaaccucuacaaggggguguacgagcugcagagccuggaccucaacauggagacccugaacaugugcaugccgcuguccugcaccaagaacaacagccaccacuacauccgggucggcaacgacaccggccucgagcugacgcugaccaacaccuccauccucaaccacaaguucugcaaccugagcgacgcccacaagaaggaccuguacgaccacgcccucauguccaucaucagcaccuuccaccuguccauccccaacuucaaccaguacgaggccaugagcugcgacuucaacgggggcaagaucuccgugcaguacaaccugagccacuccuacgccaucgacgcggccaaccacugcgggacgguggccaacggcauccuccagaccuucaugcgcauggccuggggcgggagcuacaucgcgcuggacuccggccgggggaacugggacugcaucaugaccagcuaccaguaccugaucauccagaacaccacgugggagaaccacugccaguucucccgccccagccccaucggcuaccucgggcugcugagccagcggacccgcgacaucuacaucucccggcgccuccugggcaccuucaccuggacgcugagcgacuccgagggcaacgccacccccgggggcuacugccucacccgguggaugcugaucgaggccgagcugaagugcuucgggaacaccgccgucgccaagugcaacgagaagcacgacgaggaguucugcgacaugcuccgccuguucgacuucugcaagcaggcgaucagccggcugaaguccgaggcccagaugagcauccagcucaucaacaaggccgugaacgcccugaucaacgaccagcugaucaugaagaaccaccuccgcgacaucaugggcauccccuacugcaacuacuccaaguacugguaccugaaccacacgaucaccgggaagaccagccugcccaagugcuggcucguguccaacggcagcuaccugaacgagacccacuucuccgacgacaucgagcagcaggccgacaacaugaucacggagaugcugcagaaggaguacauggagcggcagggcaagaccccgcuggggcucgucgaccuguucguguucagcaccuccuucuaccugaucagcaucuuccuccgccuggugaagaucccgacccaccggcacaucgucggcaagcccugccccaagccccaccgccugaaccacauggggaucugcuccugcggccucuacaagcagccgggggugcccgugcgguggaagcgcugaggacuaguaauaaggaaacuguaugaaugucugugggcaggaagugaagagauccuucuguaaagguuuuuggaauuaugucugcugaauaauaaacuuuuuugaaauaauaaaucugguagaaaaaugagaucucaaaggcucuuuucagagccaccaaaaaaaaaaaaaaaaaaaaaaaaaaaaaaaaaaaaaaaaaaaaaaaaaaaaaaaaaaaaaaaaaaaaaaaaaaaaaaaaaaaaaaaaaaaaaaaaaaaaa

SEQ ID NO: 37610 - RNA, 1809 nt, Artificial Sequence
  mRNA product Design b-4 (hSL-A100) comprising derived and/or modified sequence from LASV(Togo/2016/7082;Clade VI)__AMR44577__GPCmut10 (opt1)
aggagagucccgcagucggcguccagcggcucugcuuguucgugugugugucguugcaggccuuauucaagcuuaccaugggccagaucaucaccuucuuccaggaggugccccacgucaucgaggaggugaugaacaucgugcugaucgcccucagccugcuggccauccucaagggggucuacaacguggcgaccugcggcaucaucgggcuggugacguuccuguuccucugcggccgcuccugcagccugaucuacaagggguccuacgagcugcagacccucgagcugaacauggagacccugaacaugugcaugccgcucagcugcaccaagaacuccagccaccacuacauccgggucggcaacgagacgggccuggagcugacccucaccaacaccuccaucaucaaccacaaguucugcaaccugagcgacgcccacaagcgcaaccuguacgaccacgcccucauguccauccugagcacguuccaccuguccauccccaacuucaaccaguacgaggccaugagcugcgacuucaacgggggcaagaucuccgugcaguacaaccucagccacgccuacgcgguggacgccgccgagcacugcgggaccgucgccaacggcgugcugcagaccuucaugcggauggcguggggcggguccuacaucgcccuggacagcggccgcgggaacugggacugcaucaugaccuccuaccaguaccucaucauccagaacacgaccugggaggaccacugccaguucagccggcccucccccaucggcuaccuggggcugcucagccagcgcacccgggacaucuacaucagccgccggcugcugggcaccuucacguggacccucuccgacagcgagggcaacgagacccccgggggcuacugccugacccgcuggaugcugaucgaggccgagcucaagugcuucgggaacacggccguggccaagugcaacgagaagcacgacgaggaguucugcgacaugcugcggcuguucgacuucugcaagcaggcgauccagcgccucaaguccgaggcccagaugagcauccagcugaucaacaaggccgucaacgcccugaucaacgaccagcucaucaugaagaaccaccuccgggacaugaugggcauccccuacugcaacuacuccaaguacugguaccugaaccacaccagcuccgggcgcaccagccugcccaagugcuggcugguguccaacggcagcuaccugaacgagacccacuucuccgacgacaucgagcagcaggccgacaacaugaucacggagaugcuccagaaggaguacaucgaccggcagggcaagaccccgcuggggcugguggaccuguucgucuucagcaccuccuucuaccucaucagcaucuuccugcaccugaucaagaucccgacccaccgccacaucgugggcaagcccugccccaagccccaccggcucaaccacauggggaucugcuccugcggccuguacaagcagccgggggugcccacgcgcuggaagcggugaggacuaguaauaaggaaacuguaugaaugucugugggcaggaagugaagagauccuucuguaaagguuuuuggaauuaugucugcugaauaauaaacuuuuuugaaauaauaaaucugguagaaaaaugagaucucaaaggcucuuuucagagccaccaaaaaaaaaaaaaaaaaaaaaaaaaaaaaaaaaaaaaaaaaaaaaaaaaaaaaaaaaaaaaaaaaaaaaaaaaaaaaaaaaaaaaaaaaaaaaaaaaaaaa

SEQ ID NO: 37611 - RNA, 1809 nt, Artificial Sequence
  mRNA product Design b-4 (hSL-A100) comprising derived and/or modified sequence from LASV(KAK-428;Clade n.d. (VII))__ANH09740__GPCmut10 (opt1)
aggagagucccgcagucggcguccagcggcucugcuuguucgugugugugucguugcaggccuuauucaagcuuaccaugggccagaucgugaccuucuuccaggaggucccccacgugaucgaggaggugaugaacaucguccugaucgcccucagccugcuggccauccucaaggggcuguacaacuucgcgaccugcggcgugaucgggcugaucacguuccuccugcugugcggccgcuccugcagcgccaccuacaaggggcaguacgagcuccagacccuggagcugaacauggagucccucaacaugugcaugccgcugagcugcaccaagaacaacucccaccacuacauccgggccggcaacaacacgggccuggagcucacccugaccaacaccagcaucaucucccacaaguucugcaaccugagcgacgcccacaagaagaaccucuacgaccacacgcugauguccaucaucaccaccuuccaccugagcauccccaacuucaaccaguacgaggccauguccugcgacuucaacgggggcaagaucagcauccaguacaaccucucccacagcuacgcgggggacgccgcccagcacugcggcaccguggccaacgggguccugcagacguucaugcgcauggcguggggcggcuccuaccuggcccucgacagcgggcggcgcggcugggacugcaucaucuccagcuaccaguaccugaucauccagaacaccaccugggacgaccacugccaguucucccggcccagccccaucggguaccugggcuucgugagccagaagacccgcgacaucuacaucucccggcgccuccugggcacguucaccuggacccugagcgacuccgaggggcacgacaugccgggcggguacugccucacccgguggaugcugaucgaggccgaccugaagugcuucggcaacacggccguggccaagugcaacgagaagcacgacgaggaguucugcgacauguggcgccucuucgacuucugcaagcaggcgauccagcggcugaaggccgaggcccagaugaacauccagcugaucaacaaggccgucaacgcccucaucaacgaccagcugaugaugaagaaccaccuccgcgacaucauggggauccccuacugcaacuacagcaaguucugguaccugaacaacaccaccaccggccggacgucccugccccgcugcuggcugaucagcaacggcuccuaccucaacgagacccacuucagcgacgacaucgagcagcaggcggacaacaugaucaccgagaugcugcagaaggaguacauggaccggcaggggaagacgccccugggccucguggaccuguucguguucuccaccagcuucuaccugaucaccaucuuccugcaccucgucaagaucccgacccaccgccacaucguggggaagcccugccccaagccccaccggcugaaccacaugggcaucugcuccugcgggcuguacaagcagccgggcgugcccguccgcuggaagcggugaggacuaguaauaaggaaacuguaugaaugucugugggcaggaagugaagagauccuucuguaaagguuuuuggaauuaugucugcugaauaauaaacuuuuuugaaauaauaaaucugguagaaaaaugagaucucaaaggcucuuuucagagccaccaaaaaaaaaaaaaaaaaaaaaaaaaaaaaaaaaaaaaaaaaaaaaaaaaaaaaaaaaaaaaaaaaaaaaaaaaaaaaaaaaaaaaaaaaaaaaaaaaaaaa

SEQ ID NO: 37612 - RNA, 1809 nt, Artificial Sequence; identical to SEQ ID NO: 37606
  mRNA product Design b-4 (hSL-A100) comprising derived and/or modified sequence from LASV(Pinneo-NIG-1969;Clade I)__AIT17836__GPCmut10 (opt1)

SEQ ID NO: 37613 - RNA, 1809 nt, Artificial Sequence
  mRNA product Design b-4 (hSL-A100) comprising derived and/or modified sequence from LASV(ISTH0009-NIG-2011;Clade II)__AIT17404__GPCmut10 (opt1)
aggagagucccgcagucggcguccagcggcucugcuuguucgugugugugucguugcaggccuuauucaagcuuaccaugggccagaucaucaccuucuuccaggaggugccccacgucaucgaggaggugaugaacaucgugcugaucgcccucagccugcuggccauccucaaggggaucuacaacgucgcgaccugcggccuguucgggcugguguccuuccuccugcugugcggccgcagcugcuccacgaccuacaaggggguguacgagcuccagacccuggagcuggacauggccagccucaacaugugcaugccgcuguccugcaccaagaacaacagccaccacuacaucauggucggcaacgagacgggccuggagcucacccugaccaacaccuccaucaucaaccacaaguucugcaaccugagcgacgcccacaagaagaaccucuacgaccacgcccugauguccaucaucagcacguuccaccuguccauccccaacuucaaccaguacgaggccaugagcugcgacuucaacgggggcaagaucuccgugcaguacaaccucagccacgcguacgccguggacgccgccaaccacugcgggaccaucgcgaacggcguccugcagaccuucaugcggauggccuggggcggguccuacaucgcccuggacagcggcaagggguccugggacugcaucaugaccagcuaccaguaccucaucauccagaacacgaccugggaggaccacugccaguucucccgccccagccccaucggcuaccuggggcugcucagccagcggacccgcgacaucuacaucucccggcgccugcugggcaccuucacguggacccucagcgacuccgagggcaacgagacccccgggggcuacugccugacccgguggaugcugaucgaggccgagcucaagugcuucgggaacacggccguggcgaagugcaacgagaagcacgacgaggaguucugcgacaugcugcgccuguucgacuucugcaagcaggccauccggcgccucaagaccgaggcccagaugagcauccagcugaucaacaaggccgugaacgcccugaucaacgaccagcucaucaugaagaaccaccuccgggacaucaugggcauccccuacugcaacuacuccaaguacugguaccugaaccacaccgucaccgggaagacgagccugccccgcugcuggcugguguccaacggcagcuaccugaacgagacccacuucuccgacgacaucgagcagcaggcggacaacaugaucaccgagcuccugcagaaggaguacauggaccggcagggcaagaccccgcuggggcugguggaccucuucgucuucagcacguccuucuaccugaucagcaucuuccugcaccucaucaagaucccgacccaccgccacaucaccggcaagcccugccccaagccccaccggcugaaccacauggggaucugcuccugcggccuguacaagcacccgggggugcccgugaaguggaagcgcugaggacuaguaauaaggaaacuguaugaaugucugugggcaggaagugaagagauccuucuguaaagguuuuuggaauuaugucugcugaauaauaaacuuuuuugaaauaauaaaucugguagaaaaaugagaucucaaaggcucuuuucagagccaccaaaaaaaaaaaaaaaaaaaaaaaaaaaaaaaaaaaaaaaaaaaaaaaaaaaaaaaaaaaaaaaaaaaaaaaaaaaaaaaaaaaaaaaaaaaaaaaaaaaaa

SEQ ID NO: 37614 - RNA, 1809 nt, Artificial Sequence
  mRNA product Design b-4 (hSL-A100) comprising derived and/or modified sequence from LASV(ISTH2010-NIG-2012;Clade II)__AIT17482__GPCmut10 (opt1)
aggagagucccgcagucggcguccagcggcucugcuuguucgugugugugucguugcaggccuuauucaagcuuaccaugggccagaucaucaccuucuuccaggaggugccccacgucaucgaggaggugaugaacaucgugcugaucgcccucagccugcuggccauccucaaggggaucuacaacgucgcgaccugcggccuguucgggcugguguccuuccuccugcugugcggccgcagcugcuccacgaccuacaaggggguguacgagcuccagacccuggagcuggacauggccagccucaacaugugcaugccgcuguccugcaccaagaacaacagccaccacuacaucauggucggcaacgagacgggccuggagcucacccugaccaacaccuccaucaucaaccacaaguucugcaaccugagcgacgcccacaagaagaaccucuacgaccacgcccugauguccaucaucagcacguuccaccuguccauccccaacuucaaccaguacgaggccaugagcugcgacuucaacgggggcaagaucuccgugcaguacaaccucagccacgcguacgccguggacgccgccaaccacugcgggaccaucgcgaacggcguccugcagaccuucaugcggauggccuggggcggguccuacaucgcccuggacagcggcaagggguccugggacugcaucaugaccagcuaccaguaccucaucauccagaacaucacgugggaggaccacugccaguucucccgccccagccccaucggcuaccuggggcugcucagccagcggacccgcgacaucuacaucucccggcgccugcugggcaccuucaccuggacgcucagcgacuccgagggcaacgagacccccgggggcuacugccugacccgguggaugcugaucgaggccgagcucaagugcuucgggaacaccgccguggcgaagugcaacgagaagcacgacgaggaguucugcgacaugcugcgccuguucgacuucugcaagcaggccauccggcgccucaagacggaggcccagaugagcauccagcugaucaacaaggccgugaacgcccugaucaacgaccagcucaucaugaagaaccaccuccgggacaucaugggcauccccuacugcaacuacuccaaguacugguaccugaaccacaccgucaccgggaagaccagccugccccgcugcuggcugguguccaacggcagcuaccugaacgagacgcacuucuccgacgacaucgagcagcaggcggacaacaugaucaccgagcuccugcagaaggaguacaucgaccggcagggcaagaccccgcuggggcugguggaccucuucgucuucagcaccuccuucuaccugaucagcaucuuccugcaccucgugaagaucccgacgcaccgccacguggucggcaagcccugccccaagccccaccggcugaaccacauggggaucugcuccugcggccuguacaagcacccgggggugcccgugaaguggaagcgcugaggacuaguaauaaggaaacuguaugaaugucugugggcaggaagugaagagauccuucuguaaagguuuuuggaauuaugucugcugaauaauaaacuuuuuugaaauaauaaaucugguagaaaaaugagaucucaaaggcucuuuucagagccaccaaaaaaaaaaaaaaaaaaaaaaaaaaaaaaaaaaaaaaaaaaaaaaaaaaaaaaaaaaaaaaaaaaaaaaaaaaaaaaaaaaaaaaaaaaaaaaaaaaaaa

SEQ ID NO: 37615 - RNA, 1809 nt, Artificial Sequence
  mRNA product Design b-4 (hSL-A100) comprising derived and/or modified sequence from LASV(Lassa virus/H.sapiens-wt/NGA/2015/ISTH_0543;Clade II)__AVO03639__GPCmut10 (opt1)
aggagagucccgcagucggcguccagcggcucugcuuguucgugugugugucguugcaggccuuauucaagcuuaccaugggccagaucaucaccuucuuccaggaggugccccacgucaucgaggaggugaugaacaucgugcugaucgcccucagccugcuggccauccucaaggggaucuacaacgucgcgaccugcggccuguucgggcugguguccuuccuccugcugugcggccgcagcugcuccacgaccuacaaggggguguacgagcuccagacccuggagcuggacauggccaaccucaacaugugcaugccgcugagcugcaccaagaacaacucccaccacuacaucauggucggcaacgagacgggccuggagcucacccugaccaacaccagcaucaucaaccacaaguucugcaaccuguccgacgcccacaagaagaaccucuacgaccacgcccugaugagcaucaucuccacguuccaccugagcauccccaacuucaaccaguacgaggccauguccugcgacuucaacgggggcaagaucagcgugcaguacaaccucucccacaccuacgcgguggacgccgccaaccacugcgggaccaucgccaacggcguccugcagaccuucaugcggauggcguggggcgggagcuacaucgcccuggacuccggcaaggggagcugggacugcaucaugacguccuaccaguaccucgugauccagaacaccaccugggaggaccacugccaguucagccgccccucccccaucggcuaccuggggcugcucagccagcggacccgcgacaucuacaucagccggcgccugcugggcacguucaccuggacccucuccgacagcgagggcaacgagacccccgggggcuacugccugacgcgguggaugcugaucgaggccgagcucaagugcuucgggaacaccgccguggccaagugcaacgagaagcacgacgaggaguucugcgacaugcugcgccuguucgacuucugcaagcaggcgauccggcgccucaagaccgaggcccagauguccauccagcugaucaacaaggccgucaacgcccugaucaacgaccagcucaucaugaagaaccaccuccgggacaucaugggcaucccguacugcaacuacagcaaguacugguaccugaaccacaccgugacggggaagaccucccugccccgcugcuggcuggugagcaacggcuccuaccugaacgagacccacuucagcgacgacaucgagcagcaggccgacaacaugaucaccgagcuccugcagaaggaguacaucgaccggcagggcaagacgccccuggggcuggucgaccucuucguguucuccaccagcuucuaccugaucuccaucuuccugcaccucgugaagaucccgacccaccgccacaucaccggcaagcccugccccaagccccaccggcugaaccacauggggaucugcagcugcggccuguacaagcacccggggguccccgugaaguggaagcgcugaggacuaguaauaaggaaacuguaugaaugucugugggcaggaagugaagagauccuucuguaaagguuuuuggaauuaugucugcugaauaauaaacuuuuuugaaauaauaaaucugguagaaaaaugagaucucaaaggcucuuuucagagccaccaaaaaaaaaaaaaaaaaaaaaaaaaaaaaaaaaaaaaaaaaaaaaaaaaaaaaaaaaaaaaaaaaaaaaaaaaaaaaaaaaaaaaaaaaaaaaaaaaaaaa

SEQ ID NO: 37616 - RNA, 1809 nt, Artificial Sequence
  mRNA product Design b-4 (hSL-A100) comprising derived and/or modified sequence from LASV(Lassa virus/H.sapiens-wt/NGA/2016/ISTH_0009;Clade II)__AVO03571__GPCmut10 (opt1)
aggagagucccgcagucggcguccagcggcucugcuuguucgugugugugucguugcaggccuuauucaagcuuaccaugggccagaucaucaccuucuuccaggaggugccccacgucaucgaggaggugaugaacaucgugcugaucgcccucagccugcuggccauccucaaggggaucuacaacgucgcgaccugcggccugcuggggcucguguccuuccugcugcucugcggccgcagcugcuccacgaccuacaaggggguguacgagcugcagacccuggagcucgacauggccagccugaacaugugcaugccgcuguccugcaccaagaacaacagccaccacuacaucauggucggcaacgagacgggccucgagcugacccugaccaacaccuccaucaucaaccacaaguucugcaaccucagcgacgcccacaagaagaaccuguacgaccacgcccugauguccaucaucagcacguuccaccucuccauccccaacuucaaccaguacgaggccaugagcugcgacuucaacgggggccggaucuccgugcaguacaaccugagccacuccuacgcgguggacgccgccaaccacugcgggaccaucgccaacggcguccugcagaccuucaugcgcauggcguggggcgggagcuacaucgcccucgacuccggcaaggggagcugggacugcaucaugaccuccuaccaguaccugaucauccagaacacgaccugggaggaccacugccaguucagccggcccagccccaucggcuaccuggggcuccugucccagcgcacccgggacaucuacaucagccgccggcugcucggcaccuucacguggacccuguccgacagcgagggcaacgagacccccgggggcuacugccugacccgcuggaugcucaucgaggccgagcugaagugcuucgggaacacggccguggccaagugcaacgagaagcacgacgaggaguucugcgacaugcugcggcuguucgacuucugcaagcaggcgauccgccggcugaagaccgaggcccagauguccauccagcugaucaacaaggccgugaacgcccucaucaacgaccagcugaucaugaagaaccaccuccgcgacaucaugggcauccccuacugcaacuacagcaaguacugguaccucaaccacaccgucaccgggaagacgucccugccccggugcuggcuggugagcaacggcuccuaccucaacgagacccacuucagcgacgacaucgagcagcaggccgacaacaugaucaccgagcugcugcagaaggaguacaucgaccgccagggcaagaccccgcuggggcucguggaccuguucgucuucuccacgagcuucuaccugaucuccaucuuccuccaccuggugaagaucccgacccaccggcacaucaccggcaagcccugccccaagccccaccgccugaaccacauggggaucugcagcugcggccucuacaaccacccgggggugcccgucaaguggaagcggugaggacuaguaauaaggaaacuguaugaaugucugugggcaggaagugaagagauccuucuguaaagguuuuuggaauuaugucugcugaauaauaaacuuuuuugaaauaauaaaucugguagaaaaaugagaucucaaaggcucuuuucagagccaccaaaaaaaaaaaaaaaaaaaaaaaaaaaaaaaaaaaaaaaaaaaaaaaaaaaaaaaaaaaaaaaaaaaaaaaaaaaaaaaaaaaaaaaaaaaaaaaaaaaaa

SEQ ID NO: 37617 - RNA, 1809 nt, Artificial Sequence
  mRNA product Design b-4 (hSL-A100) comprising derived and/or modified sequence from LASV(Lassa virus/H.sapiens-wt/NGA/2016/ISTH_0017;Clade II)__AVO03567__GPCmut10 (opt1)
aggagagucccgcagucggcguccagcggcucugcuuguucgugugugugucguugcaggccuuauucaagcuuaccaugggccagaucaucaccuucuuccaggaggugccccacgucaucgaggaggugaugaacaucgugcugaucgcccucagccugcuggccauccucaaggggaucuacaacgucgcgaccugcggccuguucgggcugguguccuuccuccugcugugcggccgcagcugcuccacgaccuacaaggggguguacgagcuccagacccuggagcuggacauggccagccucaacaugugcaugccgcuguccugcaccaagaacaacagccaccacuacaucauggucggcaacgagacgggccuggagcucacccugaccaacaccuccaucaucaaccacaaguucugcaaccugagcgacgcccacaagaagaaccucuacgaccacgcccugauguccaucaucagcacguuccaccuguccauccccaacuucaaccaguacgaggccaugagcugcgacuucaacgggggcaagaucuccgugcaguacaaccucagccacaccuacgcgaucgacgccgccaaccacugcgggaccaucgccaacggcgugcugcagaccuucaugcggauggcguggggcggguccuacaucgcccuggacagcggcaagggguccugggacugcaucaugacgagcuaccaguaccucaucauccagaacaccaccugggaggaccacugccaguucucccgccccagccccaucggcuaccuggggcugcucagccagcggacccgcgacaucuacaucucccggcgccugcugggcacguucaccuggacccucagcgacuccgagggcaacgagacccccgggggcuacugccugacgcgguggaugcugaucgaggccgagcucaagugcuucgggaacaccgccgucgccaagugcaacgagaagcacgacgaggaguucugcgacaugcugcgccuguucgacuucugcaagcaggcgauccggcgccucaagaccgaggcccagaugagcauccagcugaucaacaaggccgugaacgcccugaucaacgaccagcucaucaugaagaaccaccuccgggacaucaugggcaucccguacugcaacuacuccaaguacugguaccugaaccacaccgugacggggaagaccagccugccccgcugcuggcuggucuccaacggcagcuaccugaacgagacccacuucuccgacgacaucgagcagcaggccgacaacaugaucaccgagcuccugcagaaggaguacauggaccggcagggcaagacgccccuggggcugguggaccucuucguguucagcaccuccuucuaccugaucagcaucuuccugcaccucguccgcaucccgacccaccggcacgugaucggcaagcccugccccaagccccaccgccugaaccacauggggaucugcuccugcggccuguacaagcacccgggggugcccgucaaguggaagcggugaggacuaguaauaaggaaacuguaugaaugucugugggcaggaagugaagagauccuucuguaaagguuuuuggaauuaugucugcugaauaauaaacuuuuuugaaauaauaaaucugguagaaaaaugagaucucaaaggcucuuuucagagccaccaaaaaaaaaaaaaaaaaaaaaaaaaaaaaaaaaaaaaaaaaaaaaaaaaaaaaaaaaaaaaaaaaaaaaaaaaaaaaaaaaaaaaaaaaaaaaaaaaaaaa

SEQ ID NO: 37618 - RNA, 1809 nt, Artificial Sequence
  mRNA product Design b-4 (hSL-A100) comprising derived and/or modified sequence from LASV(Lassa virus/H.sapiens-wt/NGA/2018/ISTH_0959;Clade II)__AVV65099__GPCmut10 (opt1)
aggagagucccgcagucggcguccagcggcucugcuuguucgugugugugucguugcaggccuuauucaagcuuaccaugggccagaucaucaccuucuuccaggaggugccccacgucaucgaggaggugaugaacaucgugcugaucgcccucagccugcuggccauccucaaggggaucuacaacgucgugaccugcggccuguucgggcugguguccuuccuccugcugugcggccgcagcugcuccacgaccuacaagggggucuacgagcuccagacccuggagcuggacauggcgagccucaacaugugcaugccgcuguccugcaccaagaacaacagccaccacuacaucauggugggcaacgagacgggccuggagcucacccugaccaacaccuccaucaucaaccacaaguucugcaaccugagcgacgcccacaagaagaaccucuacgaccacgcccugauguccaucaucagcacguuccaccuguccauccccaacuucaaccaguacgaggccaugagcugcgacuucaacgggggcaagaucuccgugcaguacaaccucagccacgccuacgcgaucgacgccgccaaccacugcgggaccaucgccaacggcguccugcagaccuucaugcggauggcguggggcggguccuacaucgcccuggacagcggcaagggguccugggacugcaucaugaccagcuaccaguaccucaucauccagaacacgaccugggaggaccacugccaguucucccgccccagccccaucggcuaccuggggcugcucagccagcggacccgcgacaucuacaucucccggcgccugcugggcaccuucacguggacccucagcgacuccgagggcaacgagacccccgggggcuacugccugacccgguggaugcugaucgaggccgagcucaagugcuucgggaacacggccguggccaagugcaacgagaagcacgacgaggaguucugcgacaugcugcgccuguucgacuucugcaagcaggcgauccggcgccucaagaccgaggcccagaugagcauccagcugaucaacaaggccgugaacgcccugaucaacgaccagcucaucaugaagaaccaccuccgggacaucaugggcauccccuacugcaacuacuccaaguacugguaccugaaccacaccgucaccgggaagacgagccugccccgcugcuggcugguguccaacggcagcuaccugaacgagacccacuucuccgacgacaucgagcagcaggccgacaacaugaucaccgagcuccugcagaaggaguacaucgaccggcagggcaagaccccgcuggggcugguggaccucuucgucuucagcacguccuucuaccugaucagcaucuuccugcaccucgugaagaucccgacccaccgccacgugaucggcaagcccugccccaagccccaccggcugaaccacauggggaucugcuccugcggccuguacaagcacccggggguccccgugaaguggaagcgcugaggacuaguaauaaggaaacuguaugaaugucugugggcaggaagugaagagauccuucuguaaagguuuuuggaauuaugucugcugaauaauaaacuuuuuugaaauaauaaaucugguagaaaaaugagaucucaaaggcucuuuucagagccaccaaaaaaaaaaaaaaaaaaaaaaaaaaaaaaaaaaaaaaaaaaaaaaaaaaaaaaaaaaaaaaaaaaaaaaaaaaaaaaaaaaaaaaaaaaaaaaaaaaaaa

SEQ ID NO: 37619 - RNA, 1809 nt, Artificial Sequence
  mRNA product Design b-4 (hSL-A100) comprising derived and/or modified sequence from LASV(LASV003-NIG-2008;Clade II)__AIT17580__GPCmut10 (opt1)
aggagagucccgcagucggcguccagcggcucugcuuguucgugugugugucguugcaggccuuauucaagcuuaccaugggccagaucaucaccuucuuccaggaggugccccacgucaucgaggaggugaugaacaucgugcugaucgcccucagccugcuggccauccucaaggggaucuacaacgucgcgaccugcggccuguucgggcugguguccuuccuccugcugugcggccgcagcugcuccacgaccuacaaggggguguacgagcuccagacccuggagcuggacauggccagccucaacaugugcaugccgcuguccugcaccaagaacaacagccaccacuacaucauggucggcaacgagacgggccuggagcucacccugaccaacaccuccaucaucaaccacaaguucugcaaccugagcgacgcccacaagaagaaccucuacgaccacgcccugauguccaucaucagcacguuccaccuguccauccccaacuucaaccaguacgaggccaugagcugcgacuucaacgggggcaagaucuccgugcaguacaaccucagccacaccuacgcgguggacgccgccaaccacugcgggaccaucgccaacggcguccugcagaccuucaugcggauggcguggggcggguccuacaucgcccuggacagcggcaagggguccugggacugcaucaugacgagcuaccaguaccucaucauccagaacaccaccugggaggaccacugccaguucucccgccccagccccaucggcuaccuggggcugcucagccagcggacccgcgacaucuacaucucccggcgccugcugggcacguucaccuggacccucagcgacuccgagagcaacgagaccccgggcggguacugccugacgcgguggaugcugaucgaggccgagcucaagugcuucggcaacaccgccguggccaagugcaacgagaagcacgacgaggaguucugcgacaugcugcgccuguucgacuucugcaagcaggcgauccggcgccucaaggccgaggcccagauguccauccagcugaucaacaaggccgugaacgcccugaucaacgaccagcucaucaugaagaaccaccuccgggacaucauggggauccccuacugcaacuacagcaaguacugguaccugaaccacaccgucaccggccgcacgucccugccccggugcuggcuggugagcaacggguccuaccugaacgagacccacuucagcgacgacaucgagcagcaggcggacaacaugaucaccgagcuccugcagaaggaguacauggaccgccagggcaagacgccccugggccugguggaccucuucgucuucuccaccagcuucuaccugaucuccaucuuccugcaccucgugaagaucccgacccaccggcacgugaucgggaagcccugccccaagccccaccgccugaaccacaugggcaucugcagcugcgggcuguacaagcacccgggcguccccgugaaguggaagcggugaggacuaguaauaaggaaacuguaugaaugucugugggcaggaagugaagagauccuucuguaaagguuuuuggaauuaugucugcugaauaauaaacuuuuuugaaauaauaaaucugguagaaaaaugagaucucaaaggcucuuuucagagccaccaaaaaaaaaaaaaaaaaaaaaaaaaaaaaaaaaaaaaaaaaaaaaaaaaaaaaaaaaaaaaaaaaaaaaaaaaaaaaaaaaaaaaaaaaaaaaaaaaaaaa

SEQ ID NO: 37620 - RNA, 1809 nt, Artificial Sequence
  mRNA product Design b-4 (hSL-A100) comprising derived and/or modified sequence from LASV(LASV035-NIG-2009;Clade II)__AIT17588__GPCmut10 (opt1)
aggagagucccgcagucggcguccagcggcucugcuuguucgugugugugucguugcaggccuuauucaagcuuaccaugggccagaucaucaccuucuuccaggaggugccccacgucaucgaggaggugaugaacaucgugcugaucgcccucagccugcuggccauccucaaggggaucuacaacgucgcgaccugcggccuguucgggcugguguccuuccuccugcugugcggccgcagcugcuccacgaccuacaaggggguguacgagcuccagacccuggagcuggacauggccagccucaacaugugcaugccgcuguccugcaccaagaacaacagccaccacuacaucauggucggcaacgagacgggccuggagcucacccugaccaacaccuccaucaucaaccacaaguucugcaaccugagcgacgcccacaagaagaaccucuacgaccacgcccugauguccaucaucagcacguuccaccuguccauccccaacuucaaccaguacgaggccaugagcugcgacuucaacgggggcaagaucuccgugcaguacaaccucagccacgcguacgccguggacgccgccaaccacugcgggaccaucgcgaacggcguccugcagaccuucaugcggauggccuggggcggguccuacaucgcccuggacagcggcaagggguccugggacugcaucaugaccagcuaccaguaccucaucauccagaacacgaccugggaggaccacugccaguucucccgccccagccccaucggcuaccuggggcugcucagccagcggacccgcgacaucuacaucucccggcgccugcugggcaccuucacguggacccucagcgacuccgagggcaacgagacccccgggggcuacugccugacccgguggaugcugaucgaggccgagcucaagugcuucgggaacacggccguggcgaagugcaacgagaagcacgacgaggaguucugcgacaugcugcgccuguucgacuucugcaagcaggccauccggcgccucaaggccgaggcccagaugagcauccagcugaucaacaaggccgugaacgcgcugaucaacgaccagcucaucaugaagaaccaccuccgggacaucaugggcauccccuacugcaacuacuccaaguacugguaccugaaccacaccgucaccgggaagaccagccugccccgcugcuggcugguguccaacggcagcuaccugaacgagacgcacuucuccgacgacaucgagcagcaggccgacaacaugaucaccgagcuccugcagaaggaguacaucgaccggcagggcaagaccccgcuggggcugguggaccucuucgucuucagcaccuccuucuaccugaucagcaucuuccugcaccucgugaagaucccgacgcaccgccacgugaucggcaagcccugccccaagccccaccggcugaaccacauggggaucugcuccugcggccuguacaagcacccggggguccccgugaaguggaagcgcugaggacuaguaauaaggaaacuguaugaaugucugugggcaggaagugaagagauccuucuguaaagguuuuuggaauuaugucugcugaauaauaaacuuuuuugaaauaauaaaucugguagaaaaaugagaucucaaaggcucuuuucagagccaccaaaaaaaaaaaaaaaaaaaaaaaaaaaaaaaaaaaaaaaaaaaaaaaaaaaaaaaaaaaaaaaaaaaaaaaaaaaaaaaaaaaaaaaaaaaaaaaaaaaaa

SEQ ID NO: 37621 - RNA, 1809 nt, Artificial Sequence
  mRNA product Design b-4 (hSL-A100) comprising derived and/or modified sequence from LASV(LASV1000-NIG-2009;Clade II)__AIT17782__GPCmut10 (opt1)
aggagagucccgcagucggcguccagcggcucugcuuguucgugugugugucguugcaggccuuauucaagcuuaccaugggccagaucaucaccuucuuccaggaggugccccacgucaucgaggaggugaugaacaucgugcugaucgcccucagccugcuggccauccucaaggggaucuacaacgucgcgaccugcggccuguucgggcugguguccuuccuccugcugugcggccgcagcugcuccacgaccuacaaggggguguacgagcuccagacccuggagcuggacauggccagccucaacaugugcaugccgcuguccugcaccaagaacaacagccaccacuacaucauggucggcaacgagacgggccuggagcucacccugaccaacaccuccaucaucaaccacaaguucugcaaccugagcgacgcccacaagaagaaccucuacgaccacgcccugauguccaucaucagcacguuccaccuguccauccccaacuucaaccaguacgaggccaugagcugcgacuucaacgggggcaagaucuccgugcaguacaaccucagccacaccuacgcgguggacgccgccaaccacugcgggaccaucgccaacggcguccugcagaccuucaugcggauggcguggggcggguccuacaucgcccuggacagcggcaagggguccugggacugcaucaugacgagcuaccaguaccucaucauccagaacaccaccugggaggaccacugccaguucucccgccccagccccaucggcuaccuggggcugcucagccagcggacccgcgacaucuacaucucccggcgccugcugggcacguucaccuggacccucagcgacuccgagggcaacgagacccccgggggcuacugccugacgcgguggaugcugaucgaggccgagcucaagugcuucgggaacaccgccguggccaagugcaacgagaagcacgacgaggaguucugcgacaugcugcgccuguucgacuucugcaagcaggcgaucaagcggcucaagaccgaggcccagaugagcauccagcugaucaacaaggccgugaacgcccugaucaacgaccagcucaucaugaagaaccaccuccgcgacaucaugggcaucccguacugcaacuacuccaaguacugguaccugaaccacaccgucacggggaagaccagccugccccggugcuggcugguguccaacggcagcuaccugaacgagacccacuucuccgacgacaucgagcagcaggccgacaacaugaucaccgagcuccugcagaaggaguacaucgaccgccagggcaagacgccccuggggcugguggaccucuucgucuucagcaccuccuucuaccugaucagcaucuuccugcaccucgugaagaucccgacccaccggcacguggucggcaagcccugccccaagccccaccgccugaaccacauggggaucugcuccugcggccuguacaagcacccgggggugcccgugaaguggaagcggugaggacuaguaauaaggaaacuguaugaaugucugugggcaggaagugaagagauccuucuguaaagguuuuuggaauuaugucugcugaauaauaaacuuuuuugaaauaauaaaucugguagaaaaaugagaucucaaaggcucuuuucagagccaccaaaaaaaaaaaaaaaaaaaaaaaaaaaaaaaaaaaaaaaaaaaaaaaaaaaaaaaaaaaaaaaaaaaaaaaaaaaaaaaaaaaaaaaaaaaaaaaaaaaaa

SEQ ID NO: 37622 - RNA, 1809 nt, Artificial Sequence
  mRNA product Design b-4 (hSL-A100) comprising derived and/or modified sequence from LASV(LASV221-NIG-2010;Clade II)__AIT17624__GPCmut10 (opt1)
aggagagucccgcagucggcguccagcggcucugcuuguucgugugugugucguugcaggccuuauucaagcuuaccaugggccagaucaucaccuucuuccaggaggugccccacgucaucgaggaggugaugaacaucgugcugaucgcccucagccugcuggccauccucaaggggaucuacaacgucgcgaccugcggccuguucgggcugguguccuuccuccugcugugcggccgcagcugcuccacgaccuacaaggggguguacgagcuccagacccuggagcuggacauggccagccucaacaugugcaugccgcuguccugcaccaagaacaacagccaccacuacaucauggucggcaacgagacgggccuggagcucacccugaccaacaccuccaucaucaaccacaaguucugcaaccugagcgacgcccacaagaagaaccucuacgaccacgcccugauguccaucaucagcacguuccaccuguccauccccaacuucaaccaguacgaggccaugagcugcgacuucaacgggggcaagaucuccgugcaguacaaccucagccacaccuacgcgaucgacgccgccaaccacugcgggaccaucgccaacggcgugcugcagaccuucaugcggauggcguggggcggguccuacaucgcccuggacagcggcaagggguccugggacugcaucaugacgagcuaccaguaccucaucauccagaacaccaccugggaggaccacugccaguucucccgccccagccccaucggcuaccuggggcugcucagccagcggacccgcgacaucuacaucucccggcgccugcugggcacguucaccuggacccucagcgacuccgagggcaacgagacccccgggggcuacugccugacgcgguggaugcugaucgaggccgagcucaagugcuucgggaacaccgccgucgccaagugcaacgagaagcacgacgaggaguucugcgacaugcugcgccuguucgacuucugcaagcaggcgauccggcgccucaagaccgaggcccagaugagcauccagcugaucaacaaggccgugaacgcccugaucaacgaccagcucaucaugaagaaccaccuccgggacaucaugggcaucccguacugcaacuacuccaaguacugguaccugaaccacaccgugacggggaagaccagccugccccgcugcuggcuggucuccaacggcagcuaccugaacgagacccacuucuccgacgacaucgagcagcaggccgacaacaugaucaccgagaugcuccagaaggaguacauggaccggcagggcaagacgccccuggggcugguggaccuguucguguucagcaccuccuucuaccucaucagcaucuuccugcaccuggucaagaucccgacccaccgccacgugaucggcaagcccugccccaagccccaccggcucaaccacauggggaucugcuccugcggccuguacaagcacccgggggugcccgucaaguggaagcgcugaggacuaguaauaaggaaacuguaugaaugucugugggcaggaagugaagagauccuucuguaaagguuuuuggaauuaugucugcugaauaauaaacuuuuuugaaauaauaaaucugguagaaaaaugagaucucaaaggcucuuuucagagccaccaaaaaaaaaaaaaaaaaaaaaaaaaaaaaaaaaaaaaaaaaaaaaaaaaaaaaaaaaaaaaaaaaaaaaaaaaaaaaaaaaaaaaaaaaaaaaaaaaaaaa

SEQ ID NO: 37623 - RNA, 1809 nt, Artificial Sequence
  mRNA product Design b-4 (hSL-A100) comprising derived and/or modified sequence from LASV(LASV237-NIG-2010;Clade II)__AIT17638__GPCmut10 (opt1)
aggagagucccgcagucggcguccagcggcucugcuuguucgugugugugucguugcaggccuuauucaagcuuaccaugggccagaucaucaccuucuuccaggaggugccccacgucaucgaggaggugaugaacaucgugcugaucgcccucagccugcuggccauccucaaggggaucuacaacgucgcgaccugcggccuguucgggcugguguccuuccuccugcugugcggccgcagcugcuccacgaccuacaaggggguguacgagcuccagacccuggagcuggacauggccagccucaacaugugcaugccgcuguccugcaccaagaacaacagccaccacuacaucauggucggcaacgagacgggccuggagcucacccugaccaacaccuccaucaucaaccacaaguucugcaaccugagcgacgcccacaagaaggaccucuacgaccacgcccugauguccaucaucagcacguuccaccuguccauccccaacuucaaccaguacgaggccaugagcugcgacuucaacgggggcaagaucuccgugcaguacaaccucagccacaccuacgcgguggacgccgccaaccacugcgggaccaucgccaacggcguccugcagaccuucaugcggauggcguggggcggguccuacaucgcccuggacagcggcaagggguccugggacugcaucaugacgagcuaccaguaccucaucauccagaacaccaccugggaggaccacugccaguucucccgccccagccccaucggcuaccuggggcugcucagccagcggacccgcgacaucuacaucucccggcgccugcugggcacguucaccuggacccucagcgacuccgagggcaacgagacccccgggggcuacugccugacgcgguggaugcugaucgaggccgagcucaagugcuucgggaacaccgccguggccaagugcaacgagaagcacgacgaggaguucugcgacaugcugcgccuguucgacuucugcaagcaggcgauccggcgccucaagaccgaggcccagaugagcauccagcugaucaacaaggccgugaacgcccugaucaacgaccagcucaucaugaagaaccaccuccgggacaucaugggcaucccguacugcaacuacuccaaguacugguaccugaaccacaccgucacggggaagaccagccugccccgcugcuggcugguguccaacggcagcuaccugaacgagacccacuucuccgacgacaucgagcagcaggccgacaacaugaucaccgagcuccugcagaaggaguacauggaccggcagggcaagacgccccuggggcugguggaccucuucgucuucagcaccuccuucuaccugaucagcaucuuccugcaccucaucaagaucccgacccaccgccacaucaccggcaagcccugccccaagccccaccggcugaaccacauggggaucugcuccugcggccuguacaagcacccgggggugcccgugaaguggaagcgcugaggacuaguaauaaggaaacuguaugaaugucugugggcaggaagugaagagauccuucuguaaagguuuuuggaauuaugucugcugaauaauaaacuuuuuugaaauaauaaaucugguagaaaaaugagaucucaaaggcucuuuucagagccaccaaaaaaaaaaaaaaaaaaaaaaaaaaaaaaaaaaaaaaaaaaaaaaaaaaaaaaaaaaaaaaaaaaaaaaaaaaaaaaaaaaaaaaaaaaaaaaaaaaaaa

SEQ ID NO: 37624 - RNA, 1809 nt, Artificial Sequence
  mRNA product Design b-4 (hSL-A100) comprising derived and/or modified sequence from LASV(LASV253-NIG-2011;Clade II)__AIT17670__GPCmut10 (opt1)
aggagagucccgcagucggcguccagcggcucugcuuguucgugugugugucguugcaggccuuauucaagcuuaccaugggccagaucaucaccuucuuccaggaggugccccacgucaucgaggaggugaugaacaucgugcugaucgcccucagccugcuggccauccucaaggggaucuacaacgucgcgaccugcggccuguucgggcugguguccuuccuccugcugugcggccgcagcugcuccacgaccuacaaggggguguacgagcuccagacccuggagcuggacauggccagccucaacaugugcaugccgcuguccugcaccaagaacaacagccaccacuacaucauggucggcaacgagacgggccuggagcucacccugaccaacaccuccaucaucaaccacaaguucugcaaccugagcgacgcccacaagaagaaccucuacgaccacgcccugauguccaucaucagcacguuccaccuguccauccccaacuucaaccaguacgaggccaugagcugcgacuucaacgggggcaagaucuccgugcaguacaaccucagccacaccuacgcgguggacgccgccaaccacugcgggaccaucgccaacggcguccugcagaccuucaugcggauggcguggggcggguccuacaucgcccuggacagcggcaagggguccugggacugcaucaugacgagcuaccaguaccucaucauccagaacaccaccugggaggaccacugccaguucucccgccccagccccaucggcuaccuggggcugcucagccagcggacccgcgacaucuacaucucccggcgccugcugggcacguucaccuggacccucagcgacuccgagggcaacgagacccccgggggcuacugccugacgcgguggaugcugaucgaggccgagcucaagugcuucgggaacaccgccguggccaagugcaacgagaagcacgacgaggaguucugcgacaugcugcgccuguucgacuucugcaagcaggcgauccggcgccucaaggccgaggcccagaugagcauccagcugaucaacaaggccgugaacgcccugaucaacgaccagcucaucaugaagaaccaccuccgggacaucaugggcauccccuacugcaacuacuccaaguacugguaccugaaccacaccgucaccgggcgcacgagccugccccggugcuggcugguguccaacggcagcuaccugaacgagacccacuucuccgacgacaucgagcagcaggcggacaacaugaucaccgagcuccugcagaaggaguacaucgaccgccagggcaagaccccgcuggggcugguggaccucuucgucuucagcacguccuucuaccugaucagcaucuuccugcaccucgugaagaucccgacccaccggcacaucaucggcaagcccugccccaagccccaccgccugaaccacauggggaucugcuccugcggccuguacaagcacccgggggugcccgucaaguggaagcggugaggacuaguaauaaggaaacuguaugaaugucugugggcaggaagugaagagauccuucuguaaagguuuuuggaauuaugucugcugaauaauaaacuuuuuugaaauaauaaaucugguagaaaaaugagaucucaaaggcucuuuucagagccaccaaaaaaaaaaaaaaaaaaaaaaaaaaaaaaaaaaaaaaaaaaaaaaaaaaaaaaaaaaaaaaaaaaaaaaaaaaaaaaaaaaaaaaaaaaaaaaaaaaaaa

SEQ ID NO: 37625 - RNA, 1809 nt, Artificial Sequence
  mRNA product Design b-4 (hSL-A100) comprising derived and/or modified sequence from LASV(LASV254-NIG-2011;Clade II)__AIT17674__GPCmut10 (opt1)
aggagagucccgcagucggcguccagcggcucugcuuguucgugugugugucguugcaggccuuauucaagcuuaccaugggccagaucaucaccuucuuccaggaggugccccacgucaucgaggaggugaugaacaucgugcugaucgcccucagccugcuggccauccucaaggggaucuacaacgucgcgaccugcggccuguucgggcugguguccuuccuccugcugugcggccgcagcugcuccacgaccuacaaggggguguacgagcuccagacccuggagcuggacaugaccaaccucaacaugugcaugccgcugagcugcacgaagaacaacucccaccacuacaucauggucggcaacgagaccggccuggagcucacccugaccaacacgagcaucaucaaccacaaguucugcaaccuguccgacgcccacaagaagaaccucuacaaccacgcccugaugagcaucaucuccaccuuccaccugagcauccccaacuucaaccaguacgaggccauguccugcgacuucaacgggggcaagaucagcgugcaguacaaccucucccacagcuacgccguggacgcggccaaccacugcgggaccaucgccaacggcguccugcagaccuucaugcggauggccuggggcggguccuacaucgcgcuggacagcggcaaggggaacugggacugcaucaugacguccuaccaguaccucaucauccagaacaccaccugggaggaccacugccaguucagccgccccucccccaucggcuaccuggggcugcucagccagcggacccgcgacaucuacaucagccggcgccugcugggcacguucaccuggacccucuccgacagcgagggcaacgagacccccgggggcuacugccugacgcgguggaugcugaucgaggccgagcucaagugcuucgggaacaccgccguggccaagugcaacgagaagcacgacgaggaguucugcgacaugcugcgccuguucgacuucugcaagcaggccauccggcgccucaagaccgaggcgcaggccaacauccagcugaucaacaaggccgugaacgcccugaucaacgaccagcucaucaugaagaaccaccuccgggacaucaugggcaucccguacugcaacuacuccaaguacugguaccugaaccacaccgucacggggaagaccagccugccccgcugcuggcugguguccaacggcagcuaccugaacgagacccacuucuccgacgacaucgagcagcaggccgacaacaugaucaccgagcuccugcagaaggaguacauggaccggcagggcaagacgccccuggggcugguggaccucuucgucuucagcaccuccuucuaccugaucagcaucuuccugcaccucgugaagaucccgacccaccgccacgugaucggcaagcccugccccaagccccaccggcugaaccacauggggaucugcuccugcggccuguacaagcacccggggguccccgugaaguggaagcgcugaggacuaguaauaaggaaacuguaugaaugucugugggcaggaagugaagagauccuucuguaaagguuuuuggaauuaugucugcugaauaauaaacuuuuuugaaauaauaaaucugguagaaaaaugagaucucaaaggcucuuuucagagccaccaaaaaaaaaaaaaaaaaaaaaaaaaaaaaaaaaaaaaaaaaaaaaaaaaaaaaaaaaaaaaaaaaaaaaaaaaaaaaaaaaaaaaaaaaaaaaaaaaaaaa

SEQ ID NO: 37626 - RNA, 1809 nt, Artificial Sequence
  mRNA product Design b-4 (hSL-A100) comprising derived and/or modified sequence from LASV(Nig08-A19;Clade III)__ADU56618__GPCmut10 (opt1)
aggagagucccgcagucggcguccagcggcucugcuuguucgugugugugucguugcaggccuuauucaagcuuaccaugggccagaucgugaccuucuuccaggaggucccccacgugaucgaggaggugaugaacaucguccugaucgcccucagcauccuggccauccugaaggggcucuacaacaucgcgaccugcggccugaucgggcuggugacguuccuccugcuguccggccgcagcugcuccaugaccuacaaggggguguacgagcuccagacccuggagcugaacaugaacacccucaacaugugcaugccgcugagcugcacgaagaacaacucccaccacuacaucauggucggcaacgagaccggccuggagcucacccugaccaacacgagccugcuccaccacaaguucugcaaccuguccgacgcccacaagaagaaccuguacgaccacacccucaugagcaucaucuccaccuuccaccugagcauccccaacuucaaccaguacgaggccauguccugcgacuucaacgggggcaagaucaccgugcaguacaaccugagccacuccuacgccaucgacgccgcgaaccacugcgggacgguggccaacggcguccuccagaccuucaugcggauggccuggggcgggagcuacaucgcccuggacuccggccgcgggaagugggacugcaucaugaccagcuaccaguaccugaucauccagaacaccacgugggaggaccacugccaguucucccggcccagccccaucggcuaccucgggcugcugucccagcgcacccgggacaucuacaucagccgccggcuccugggcaccuucaccuggacgcugagcgacuccgagggcaacgagacccccgggggcuacugccucacccgcuggaugcugaucgaggcggagcugaagugcuucgggaacaccgccguggccaagugcaacgagaagcacgacgaggaguucugcgacaugcuccggcuguucgacuucugcaagcaggccauccgccggcugaaggccgaggcgcagaugagcauccagcucaucaacaaggccgugaacgcccugaucaacgaccagcugaucaugaagaaccaccuccgcgacaucaugggcauccccuacugcaacuacuccaaguacugguaccugaaccacacgagcaccgggcggaccucccugccccgcugcuggcucgucagcaacggcuccuaccugaacgagacccacuucagcgacgacaucgagcagcaggccgacaacaugaucacggagaugcugcagaaggaguaccuggaccggcagggcaagaccccgcucgggcugguggaccuguucguguucuccaccagcuucuaccucaucuccaucuuccugcaccuggucaagaucccgacccaccgccacaucgugggcaagcccugccccaagccccaccggcucaaccacauggggaucugcagcugcggccuguacaagcagccgggggugcccguccgcuggaagcggugaggacuaguaauaaggaaacuguaugaaugucugugggcaggaagugaagagauccuucuguaaagguuuuuggaauuaugucugcugaauaauaaacuuuuuugaaauaauaaaucugguagaaaaaugagaucucaaaggcucuuuucagagccaccaaaaaaaaaaaaaaaaaaaaaaaaaaaaaaaaaaaaaaaaaaaaaaaaaaaaaaaaaaaaaaaaaaaaaaaaaaaaaaaaaaaaaaaaaaaaaaaaaaaaa

SEQ ID NO: 37627 - RNA, 1812 nt, Artificial Sequence
  mRNA product Design b-4 (hSL-A100) comprising derived and/or modified sequence from LASV(G1180-SLE-2010;Clade IV)__AIT17168__GPCmut10 (opt1)
aggagagucccgcagucggcguccagcggcucugcuuguucgugugugugucguugcaggccuuauucaagcuuaccaugggccagaucgugaccuucuuccaggaggucccccacgugaucgaggaggugaugaacaucguccugaucgcccucagcauccuggccgugcugaaggggcucuacaacuucgcgaccugcggccugguggggcugcucacguuccugcugcucugcggccgcuccugcaccgccagccgguacaagggggucuacgagcugcagacccuggagcucaacauggagacccugaacaugugcaugccgcuguccugcacgaagaacaacagccaccacuacaucauggugggcaacgagaccggccucgagcugacccugaccaacacguccaucaucaaccacaaguucugcaaccucagcgacgcccacaagaagaaccuguacgaccacgcccugauguccaucaucagcaccuuccaccucuccauccccaacuucaaccaguacgaggccaugagcugcgacuucaacgggggcaagaucuccgugcaguacaaccugagccacuccuacgcgggggacgccgccaaccacugcggcaccgucgccaacggggugcugcagaccuucaugcgcauggcguggggcggcagcuacaucgcccucgacuccgggcacggcagcugggacugcaucaugacguccuaccaguaccugaucauccagaacaccaccugggaggaccacugccaguucagccggcccucccccaucggguaccugggccuccugagccagcgcacccgggacaucuacaucagccgccggcugcucggcacguucaccuggacccuguccgacagcgaggggaaggacaccccgggcggguacugccugacgcgcuggaugcucaucgaggccgagcugaagugcuucggcaacaccgccguggccaagugcaacgagaagcacgacgaggaguucugcgacaugcugcggcuguucgacuucugcaagcaggcgauccagcgccugaaggccgaggcccagauguccauccagcugaucaacaaggccgucaacgcccucaucaacgaccagcugaucaugaagaaccaccuccgggacaucauggggauccccuacugcaacuacagcaaguacugguaccucaaccacaccaccacgggcaagaccucccugcccaagugcuggcuggugagcaacggcuccuaccucaacgagacccacuucagcgacgacaucgagcagcaggcggacaacaugaucaccgagaugcugcagaaggaguacauggagcgccaggggaagacgccccugggccugguggaccucuucgucuucuccaccagcuucuaccugaucuccaucuuccugcaccucgugaagaucccgacccaccggcacaucgugggcaagagcugccccaagccccaccgccugaaccacauggggaucugcuccugcgggcuguacaagcagcccggcgucccggugaaguggaagcggugaggacuaguaauaaggaaacuguaugaaugucugugggcaggaagugaagagauccuucuguaaagguuuuuggaauuaugucugcugaauaauaaacuuuuuugaaauaauaaaucugguagaaaaaugagaucucaaaggcucuuuucagagccaccaaaaaaaaaaaaaaaaaaaaaaaaaaaaaaaaaaaaaaaaaaaaaaaaaaaaaaaaaaaaaaaaaaaaaaaaaaaaaaaaaaaaaaaaaaaaaaaaaaaaa

SEQ ID NO: 37628 - RNA, 1812 nt, Artificial Sequence
  mRNA product Design b-4 (hSL-A100) comprising derived and/or modified sequence from LASV(G1442-SLE-2011;Clade IV)__AIT17180__GPCmut10 (opt1)
aggagagucccgcagucggcguccagcggcucugcuuguucgugugugugucguugcaggccuuauucaagcuuaccaugggccagaucgugaccuucuuccaggaggucccccacgugaucgaggaggugaugaacaucguccugaucgcccucagcauccuggccgugcugaaggggcucuacaacguggcgaccugcggccugaucgggcuggucaccuuccuccugcugugcggccgcuccugcaccaccacccucuacaaggggguguacgagcugcagacgcuggagcucaacauggagacccugaacaugugcaugccgcugagcugcaccaagaacaacucccaccacuacauccgggugggcaacgagaccggccucgagcugacgcugaccaacaccagcaucaucaaccacaaguucugcaaccucuccgacgcccacaagaagaaccuguacgaccacgcccugaugagcaucaucuccaccuuccaccucagcauccccaacuucaaccaguacgaggccauguccugcgacuucaacgggggcaagaucagcguccaguacaaccugucccacagcuacgccggggacgcggccaaccacugcggcacgguggccaacggggugcugcagaccuucaugcgcauggccuggggcggcuccuacaucgcgcucgacagcgggcggggcaacugggacugcaucaugaccuccuaccaguaccugaucauccagaacaccacgugggacgaccacugccaguucagccgccccucccccaucggguaccugggccuccugagccagcggacccgcgacgucuacaucucccggcgccugcucggcaccuucaccuggacgcugagcgacagcgaggggaaggacaccccgggcggguacugccugacccgguggaugcucaucgaggccgagcugaagugcuucggcaacaccgccguggccaagugcaacgagaagcacgacgaggaguucugcgacaugcugcgccucuucgacuucugcaagcaggccauccagcggcugaaggcggaggcccagauguccauccagcugaucaacaaggccgugaacgcccucaucaacgaccagcugaucaugaagaaccaccuccgcgacaucauggggauccccuacugcaacuacagcaaguacugguaccugaacaacacggccaccggcaagaccucccugcccaagugcuggcugaucagcaacggcuccuaccucaacgagacccacuucagcgacgacaucgagcaggaggcggacaacaugaucacggagaugcugcagaaggaguacauggagcggcaggggaagacgccccugggccuggucgaccucuucguguucuccaccagcuucuaccugaucuccaucuuccugcaccucgugaagaucccgacccaccgccacaucgucggcaagagcugccccaagccccaccggcugaaccacauggggaucugcuccugcgggcuguacaagcagcccggcgugccggugcgcuggaagcggugaggacuaguaauaaggaaacuguaugaaugucugugggcaggaagugaagagauccuucuguaaagguuuuuggaauuaugucugcugaauaauaaacuuuuuugaaauaauaaaucugguagaaaaaugagaucucaaaggcucuuuucagagccaccaaaaaaaaaaaaaaaaaaaaaaaaaaaaaaaaaaaaaaaaaaaaaaaaaaaaaaaaaaaaaaaaaaaaaaaaaaaaaaaaaaaaaaaaaaaaaaaaaaaaa

SEQ ID NO: 37629 - RNA, 1812 nt, Artificial Sequence
  mRNA product Design b-4 (hSL-A100) comprising derived and/or modified sequence from LASV(G3010-SLE-2013;Clade IV)__AIT17344__GPCmut10 (opt1)
aggagagucccgcagucggcguccagcggcucugcuuguucgugugugugucguugcaggccuuauucaagcuuaccaugggccagaucgugaccuucuuccaggaggucccccacgugaucgaggaggugaugaacaucguccugaucgcccucagcauccuggccgugcugaaggggcucuacaacuucgcgaccugcggccugguggggcuggucacguuccuccugcugugcggccgcuccugcaccaccagccucuacaaggggguguacgagcugcagacccuggagcucaacauggagacgcugaacaugugcaugccgcuguccugcaccaagaacaacagccaccacuacaucauggugggcaacgagaccggccucgagcugacccugacgaacaccuccaucaucaaccacaaguucugcaaccucagcgacgcccacaagaagaaccuguacaaccacgcccugauguccaucaucagcaccuuccaccucuccauccccaacuucaaccaguacgaggccaugagcugcgacuucaacgggggcaagaucuccguccaguacaaccugagccacuccuacgccggggacgcggccagccacugcggcaccguggccaacggggugcugcagacguucaugcggauggccuggggcggcuccuacaucgcgcucgacagcggguacggcaagugggacugcaucaugaccuccuaccaguaccugaucauccagaacaccaccugggaggaccacugccaguucagccgccccucccccaucggguaccugggccuccugagccagcggacgcgcgacaucuacaucagccggcgccugcucggcaccuucaccuggacccuguccgacagcgaggggaaggacacgccgggcggguacugccugacccgguggaugcucaucgaggccgagcugaagugcuucggcaacaccgccgucgccaagugcaacgagaagcacgacgaggaguucugcgacaugcugcgccucuucgacuucugcaagcaggccauccagcggcugaagaccgaggcgcagauguccauccagcugaucaacaaggccgugaacgcccucaucaacgaccagcugaucaugaagaaccaccuccgcgacaucauggggauccccuacugcaacuacagcaaguacugguaccugaaccacacgaccaccggcaagaccucccugcccaagugcuggcuggugagcaacggcuccuaccucaacgagacgcacuucagcgacgacaucgagcagcaggccgacaacaugaucaccgagaugcugcagaaggaguacauggagcggcaggggaagacgccccugggccuggucgaccucuucguguucuccaccagcuucuaccugaucuccaucuuccugcaccucgugaagaucccgacccaccgccacaucgucggcaagagcugccccaagccccaccggcugaaccacauggggaucugcuccugcgggcuguacaagcagcccggcgugccggugcgcuggaagcggugaggacuaguaauaaggaaacuguaugaaugucugugggcaggaagugaagagauccuucuguaaagguuuuuggaauuaugucugcugaauaauaaacuuuuuugaaauaauaaaucugguagaaaaaugagaucucaaaggcucuuuucagagccaccaaaaaaaaaaaaaaaaaaaaaaaaaaaaaaaaaaaaaaaaaaaaaaaaaaaaaaaaaaaaaaaaaaaaaaaaaaaaaaaaaaaaaaaaaaaaaaaaaaaaa

SEQ ID NO: 37630 - RNA, 1812 nt, Artificial Sequence
  mRNA product Design b-4 (hSL-A100) comprising derived and/or modified sequence from LASV(G502-SLE-2009;Clade IV)__AIT17126__GPCmut10 (opt1)
aggagagucccgcagucggcguccagcggcucugcuuguucgugugugugucguugcaggccuuauucaagcuuaccaugggccagaucgugaccuucuuccaggaggucccccacgugaucgaggaggugaugaacaucguccugaucgcccucagcauccuggccgugcugaaggggcucuacaacuucgcgaccugcggccugguggggcugcucacguuccugcugcucugcggccgcuccugcaccaccgggcuguacaagggcgucuacgagcugcagacccucgagcugaacauggagacgcugaacaugugcaugccgcucagcugcaccaagaacaacucccaccacuacaucauggugggcaacgagaccgggcuggagcugacccucacgaacaccagcaucaucaaccacaaguucugcaaccuguccgacgcccacaagaagaaccuguacgaccacgcccucaugagcaucaucuccaccuuccaccugagcauccccaacuucaaccaguacgaggccauguccugcgacuucaacggcgggaagaucagcgugcaguacaaccugucccacagcuacgccggcgacgcggccgaccacugcgggaccgucgccaacggcgugcuccagacguucaugcggauggccuggggcggguccuacaucgcgcuggacagcggccgcgggcggugggacugcaucaugaccuccuaccaguaccugaucauccagaacaccaccugggaggaccacugccaguucagccgccccucccccaucggcuaccucggccugcugagccagcggacgcgcgacaucuacaucucccggcgccuccuggggaccuucaccuggacccugagcgacagcgagggcaaggacacgcccgggggcuacugccucacccgguggaugcugaucgaggccgagcugaagugcuucgggaacaccgccguggccaagugcaacgagaagcacgacgaggaguucugcgacaugcuccgccuguucgacuucugcaagcaggccauccagcggcugaaggcggaggcccagauguccauccagcucaucaacaaggccgucaacgcccugaucaacgaccagcuggugaugaagaaccaccuccgcgacaucaugggcauccccuacugcaacuacagccgguacugguaccugaaccacaccacgaccggccgcaccucccugcccaagugcuggcucgugagcaacggguccuaccugaacgagacccacuucagcgacgacaucgagcagcaggccgacaacaugaucacggagaugcugcagaaggaguacauggagcggcagggcaagaccccgcuggggcucgucgaccuguucguguucuccaccagcuucuaccugaucuccaucuuccuccaccuggugaagaucccgacccaccgccacaucgucggcaagagcugccccaagccccaccggcugaaccacauggggaucugcuccugcggccucuacaagcagcccggcgugccggugaaguggaagcgcugaggacuaguaauaaggaaacuguaugaaugucugugggcaggaagugaagagauccuucuguaaagguuuuuggaauuaugucugcugaauaauaaacuuuuuugaaauaauaaaucugguagaaaaaugagaucucaaaggcucuuuucagagccaccaaaaaaaaaaaaaaaaaaaaaaaaaaaaaaaaaaaaaaaaaaaaaaaaaaaaaaaaaaaaaaaaaaaaaaaaaaaaaaaaaaaaaaaaaaaaaaaaaaaaa

SEQ ID NO: 37631 - RNA, 1812 nt, Artificial Sequence
  mRNA product Design b-4 (hSL-A100) comprising derived and/or modified sequence from LASV(G733-SLE-2010;Clade IV)__AIT17154__GPCmut10 (opt1)
aggagagucccgcagucggcguccagcggcucugcuuguucgugugugugucguugcaggccuuauucaagcuuaccaugggccagaucgugaccuucuuccaggaggucccccacgugaucgaggaggugaugaacaucguccugaucgcccucagcauccuggccgugcugaaggggcucuacaacuucgcgaccugcggcaucguggggcuggucuccuuccugcuccugugcggccgcagcugcacgaccucccuguacaaggggguguacgagcuccagacccuggagcugaacauggagacccucaacaugugcaugccgcugagcugcacgaagaacaacucccaccacuacaucauggugggcaacgagaccggccuggagcucacccugaccaacacgagcaucaucaaccacaaguucugcaaccuguccgacgcccacaagaagaaccucuacgaccacgcccugaugagcaucaucuccaccuuccaccugagcauccccaacuucaaccaguacgaggccauguccugcgacuucaacgggggcaagaucagcguccaguacaaccucucccacagcuacgccggggacgcggccaaccacugcggcaccaucgccaacggggugcugcagaccuucaugcggauggccuggggcggcuccuacaucgcgcuggacagcgggcgcgaccggugggacugcaucaugacguccuaccaguaccucaucauccagaacaccaccugggaggaccacugccaguucagccgccccucccccaucggcuaccuggggcugcucagccagcggacccgcgacaucuacaucagccggcgccugcugggcacguucaccuggacccucuccgacagcgagggcaaggacacccccgggggcuacugccugacgcgguggaugcugaucgaggccgagcucaagugcuucgggaacaccgccguggccaagugcaacgagaagcacgacgaggaguucugcgacaugcugcgccuguucgacuucugcaagcaggccauccagcggcucaaggcggaggcccagauguccauccagcugaucaacaaggccgucaacgcccugaucaacgaccagcucaucaugaagaaccaccuccgcgacaucaugggcaucccguacugcaacuacagcaaguacugguaccugaaccacaccaccacggggaagaccucccugcccaagugcuggcuggugagcaacggcuccuaccugaacgagacccacuucagcgacgacaucgagcagcaggccgacaacaugaucaccgagaugcuccagaaggaguacauggagcggcagggcaagacgccccuggggcugguggaccuguucgucuucuccaccagcuucuaccucaucuccaucuuccugcaccuggugaagaucccgacccaccgccacguggucggcaagagcugccccaagccccaccggcucaaccacauggggaucugcuccugcggccuguacgggcagcccggcgugccggugaaguggaagcgcugaggacuaguaauaaggaaacuguaugaaugucugugggcaggaagugaagagauccuucuguaaagguuuuuggaauuaugucugcugaauaauaaacuuuuuugaaauaauaaaucugguagaaaaaugagaucucaaaggcucuuuucagagccaccaaaaaaaaaaaaaaaaaaaaaaaaaaaaaaaaaaaaaaaaaaaaaaaaaaaaaaaaaaaaaaaaaaaaaaaaaaaaaaaaaaaaaaaaaaaaaaaaaaaaa

SEQ ID NO: 37632 - RNA, 1812 nt, Artificial Sequence
  mRNA product Design b-4 (hSL-A100) comprising derived and/or modified sequence from MOPV/LASV reassortant(IGS-1;Clade IV)__AFY05576__GPCmut10 (opt1)
aggagagucccgcagucggcguccagcggcucugcuuguucgugugugugucguugcaggccuuauucaagcuuaccaugggccagaucgugaccuucuuccaggaggucccccacgugaucgaggaggugaugaacaucguccugaucgcccucagcgugcuggccgugcugaaggggcucuacaacuucgcgaccugcggccuggucgggcuggugaccuuccuccugcugugcggccgcuccugcaccaccagccucuacaaggggguguacgagcugcagacccuggagcucaacauggagacgcugaacaugugcaugccgcuguccugcaccaagaacaacagccaccacuacaucauggucggcaacgagaccggccucgagcugacccugacgaacaccuccaucaucaaccacaaguucugcaaccucagcgacgcccacaagaagaaccuguacgaccacgcccugauguccaucaucagcaccuuccaccucuccauccccaacuucaaccaguacgaggccaugagcugcgacuucaacgggggcaagaucuccgugcaguacaaccugagccacuccuacgccggggacgcggccaaccacugcggcaccguggccaacgggguccugcagacguucaugcggauggccuggggcggcagcuacaucgcgcucgacuccgggcgcggcaacugggacugcaucaugaccagcuaccaguaccugaucauccagaacaccaccugggaggaccacugccaguucucccggcccagccccaucggguaccugggccuccugucccagcgcacgcgggacaucuacaucagccgccggcugcucggcaccuucaccuggacccugagcgacuccgagggggaggacacgccgggcggguacugccugacccgcuggaugcucaucgaggccgagcugaagugcuucggcaacaccgccguggccaagugcaacgagaagcacgacgaggaguucugcgacaugcugcggcuguucgacuucugcaagcaggccauccagcgccugaaggcggaggcccagaugagcauccagcugaucaacaaggccgugaacgcccucaucaacgaccagcugaucaugaagaaccaccuccgggacaucauggggauccccuacugcaacuacuccaaguacugguaccucaaccacaccacgaccggccgcaccagccugcccaagugcuggcuggucuccaacggcagcuaccucaacgagacccacuucuccgacgacaucgagcagcaggccgacaacaugaucacggagaugcugcagaaggaguacauggagcggcaggggaagacgccccugggccugguggaccucuucguguucagcaccuccuucuaccugaucagcaucuuccugcaccucgucaagaucccgacccaccgccacaucguggggaaguccugccccaagccccaccggcugaaccacaugggcaucugcagcugcgggcuguacaagcagcccggcgugccggucaaguggaagcgcugaggacuaguaauaaggaaacuguaugaaugucugugggcaggaagugaagagauccuucuguaaagguuuuuggaauuaugucugcugaauaauaaacuuuuuugaaauaauaaaucugguagaaaaaugagaucucaaaggcucuuuucagagccaccaaaaaaaaaaaaaaaaaaaaaaaaaaaaaaaaaaaaaaaaaaaaaaaaaaaaaaaaaaaaaaaaaaaaaaaaaaaaaaaaaaaaaaaaaaaaaaaaaaaaa

SEQ ID NO: 37633 - RNA, 1812 nt, Artificial Sequence
  mRNA product Design b-4 (hSL-A100) comprising derived and/or modified sequence from LASV(LM765-SLE-2012;Clade IV)__AIT17814__GPCmut10 (opt1)
aggagagucccgcagucggcguccagcggcucugcuuguucgugugugugucguugcaggccuuauucaagcuuaccaugggccagaucgugaccuucuuccaggaggucccccacgugaucgaggaggugaugaacaucguccugaucgcccucagcauccuggccgugcugaaggggcucuacaacuucgcgaccugcggccugguggggcuggucacguuccuccugcugugcggccgcuccugcaccaccagccucuacaaggggguguacgagcugcagacccuggagcucaacauggagacgcugaacaugugcaugccgcuguccugcaccaagaacaacagccaccacuacaucauggugggcaacgagaccggccucgagcugacccugacgaacaccuccaucaucgaccacaaguucugcaaccucagcgacgcccaccggaagaaccuguacgaccacgcccugauguccaucaucagcaccuuccaccucuccauccccaacuucaaccaguacgaggccaugagcugcgacuucaacgggggcaagaucuccguccaguacaaccugagccacuccuacgccaaggacgcggccgaccacugcgggaccguggccaacggcgugcugcagacguucaugcgcauggccuggggcgggagcuacaucgcgcucgacuccggccgggggcgcugggacugcaucaugaccagcuaccaguaccugaucauccagaacaccaccugggaggaccacugccaguucucccggcccagccccaucggcuaccuggggcuccugucccagcgcacgcgggacaucuacaucagccgccggcugcucggcaccuucaccuggacccugagcgacuccgagggcaaggacacgcccgggggcuacugccugacccgcuggaugcucaucgaggccgagcugaagugcuucgggaacaccgccgucgccaagugcaacgagaagcacgacgaggaguucugcgacaugcugcggcuguucgacuucugcaagcaggccauccagcgccugaaggcggaggcccagaugagcauccagcugaucaacaaggccgugaacgcccucaucaacgaccagcugaucaugaagaaccaccuccgggacaucaugggcauccccuacugcaacuacuccaaguacugguaccucaaccacaccacgaccgggaagaccagccugcccaagugcuggcugguguccaacggcagcuaccucaacgagacccacuucuccgacgacaucgagcagcaggccgacaacaugaucacggagaugcugcagaaggaguacauggagcgccagggcaagaccccgcuggggcuggucgaccucuucguguucagcaccuccuucuaccugaucagcaucuuccugcaccucgugaagaucccgacccaccggcacaucgucggcaagcccugccccaagccccaccgccugaaccacauggggaucugcuccugcggccuguacaagcagccgggggugcccgugaaguggaagcggugaggacuaguaauaaggaaacuguaugaaugucugugggcaggaagugaagagauccuucuguaaagguuuuuggaauuaugucugcugaauaauaaacuuuuuugaaauaauaaaucugguagaaaaaugagaucucaaaggcucuuuucagagccaccaaaaaaaaaaaaaaaaaaaaaaaaaaaaaaaaaaaaaaaaaaaaaaaaaaaaaaaaaaaaaaaaaaaaaaaaaaaaaaaaaaaaaaaaaaaaaaaaaaaaa

SEQ ID NO: 37634 - RNA, 1812 nt, Artificial Sequence
  mRNA product Design b-4 (hSL-A100) comprising derived and/or modified sequence from LASV(LM776-SLE-2012;Clade IV)__AIT17824__GPCmut10 (opt1)
aggagagucccgcagucggcguccagcggcucugcuuguucgugugugugucguugcaggccuuauucaagcuuaccaugggccagaucgugaccuucuuccaggaggucccccacgugaucgaggaggugaugaacaucguccugaucgcccucagcauccuggccgugcugaaggggcucuacaacuucgcgaccugcggccugguggggcuggucaccuuccuccugcugugcggccgcuccugcaccaccagcguguacaaggggguguacgagcuccagacccuggagcugaacauggagacgcucaacaugugcaugccgcuguccugcaccaagaacaacagccaccacuacaucauggucggcaacgagaccggccuggagcucacccugacgaacaccuccaucaucaaccacaaguucugcaaccugagcgacgcccacaagaagaaccucuacgaccacgcccugauguccaucaucagcaccuuccaccuguccauccccaacuucaaccaguacgaggccaugagcugcgacuucaacgggggcaagaucuccgugcaguacaaccucagccacuccuacgccggggacgcggccaaccacugcggcaccguggccaacgggguccugcagacguucaugcggauggccuggggcggcagcuacaucgcgcuggacuccgggcacggcaagugggacugcaucaugaccagcuaccaguaccucaucauccagaacaccaccugggaggaccacugccaguucucccgccccagccccaucggguaccugggccugcucucccagcggacgcgcgacaucuacaucagccggcgccugcugggcaccuucaccuggacccucagcgacuccgaggggaaggacacgccgggcggguacugccugacccgguggaugcugaucgaggccgagcucaagugcuucggcaacaccgccguggccaagugcaacgagaagcacgacgaggaguucugcgacaugcugcgccuguucgacuucugcaagcaggccauccagcggcucaaggcggaggcccagaugagcauccagcugaucaacaaggccgugaacgcccugaucaacgaccagcucaucaugaagaaccaccuccgcgacaucauggggauccccuacugcaacuacuccaaguacugguaccugaaccacaccacgaccggcaagaccagccugcccaagugcuggcuggucuccaacggcagcuaccugaacgagacccacuucuccgacgacaucgagcagcaggccgacaacaugaucacggagaugcuccagaaggaguacauggagcggcaggggaagacgccccugggccugguggaccuguucguguucagcaccuccuucuaccucaucagcaucuuccugcaccuggucaagaucccgacccaccgccacaucguggggaaguccugccccaagccccaccggcucaaccacaugggcaucugcagcugcgggcuguacaagcagcccggcgugccgguccgcuggaagcggugaggacuaguaauaaggaaacuguaugaaugucugugggcaggaagugaagagauccuucuguaaagguuuuuggaauuaugucugcugaauaauaaacuuuuuugaaauaauaaaucugguagaaaaaugagaucucaaaggcucuuuucagagccaccaaaaaaaaaaaaaaaaaaaaaaaaaaaaaaaaaaaaaaaaaaaaaaaaaaaaaaaaaaaaaaaaaaaaaaaaaaaaaaaaaaaaaaaaaaaaaaaaaaaaa

SEQ ID NO: 37635 - RNA, 1812 nt, Artificial Sequence
  mRNA product Design b-4 (hSL-A100) comprising derived and/or modified sequence from LASV(Mad39;Clade IV)__ANH09722__GPCmut10 (opt1)
aggagagucccgcagucggcguccagcggcucugcuuguucgugugugugucguugcaggccuuauucaagcuuaccaugggccagaucgugaccuucuuccaggaggucccccacgugaucgaggaggugaugaacaucguccugaucgcccucagcauccuggccgugcugaaggggcucuacaacguggcgaccugcggccugaucgggcuggucacguuccuccugcugugcggccgcuccugcaccaccacccucuacaaggggguguacgagcugcaggcccuggagcucaacauggagacgcugaacaugugcaugccgcugagcugcaccaagaacaacucccaccacuacauccgggugggcaacgagaccggccucgagcugacccugacgaacaccagccucaucaaccacaaguucugcaaccuguccgacgcccacaagaagaaccuguacgaccacgcccucaugagcaucaucuccaccuuccaccugagcauccccaacuucaaccaguacgaggccauguccugcgacuucaacgacgggaagaucagcguccaguacaaccugucccacaccuacgcgggcgacacggccaaccacugcgggaccguggccaacggcgugcuccagaccuucaugcgcauggccuggggcgggagcuacaucgcgcuggacuccggccgcgggggcugggacugcaucaugaccagcuaccaguaccugaucauccagaacacgaccugggaggaccacugccaguucucccggcccagccccaucggguaccucggccugcugucccagcggacccgcgacaucuacaucagccggcgccuccugggcaccuucacguggacccuguccgacagcgaggggaaggacaccccgggcggguacugccucacccgguggaugcugaucgaggccgagcugaagugcuucggcaacacggccgucgccaagugcaacgagaagcacgacgaggaguucugcgacaugcuccgccuguucgacuucugcaagcaggccauccagcggcugaaggcggaggcccagaugagcauccagcucaucaacaaggccgugaacgcccugaucaacgaccagcugaucaugaagaaccaccuccgcgacaucauggggauccccuacugcaacuacuccaaguacugguaccugaaccacaccgugaccggcaagaccagccugcccaagugcuggcucgucuccaacggcagcuaccugaacgagacgcacuucuccgacgacaucgagcagcaggccgacaacaugaucaccgagaugcugcagaaggaguacauggagcggcaggggaagacgccccugggccucguggaccuguucguguucagcaccuccuucuaccugaucagcaucuuccuccaccuggucaagaucccgacccaccgccacgugguggggaagcccugccccaagccccaccggcugaaccacaugggcaucugcuccugcggguucuacaagcagccgggcguccccgugcgcuggaagcggugaggacuaguaauaaggaaacuguaugaaugucugugggcaggaagugaagagauccuucuguaaagguuuuuggaauuaugucugcugaauaauaaacuuuuuugaaauaauaaaucugguagaaaaaugagaucucaaaggcucuuuucagagccaccaaaaaaaaaaaaaaaaaaaaaaaaaaaaaaaaaaaaaaaaaaaaaaaaaaaaaaaaaaaaaaaaaaaaaaaaaaaaaaaaaaaaaaaaaaaaaaaaaaaaa

SEQ ID NO: 37636 - RNA, 1812 nt, Artificial Sequence
  mRNA product Design b-4 (hSL-A100) comprising derived and/or modified sequence from LASV(Z0947-SLE-2011;Clade IV)__AIT17840__GPCmut10 (opt1)
aggagagucccgcagucggcguccagcggcucugcuuguucgugugugugucguugcaggccuuauucaagcuuaccaugggccagaucgugaccuucuuccaggaggucccccacgugaucgaggaggugaugaacaucguccugaucgcccucagcauccuggccgugcugaaggggcucuacaacuucgcgaccugcggccugguggggcuggucacguuccuccugcugugcggccgcuccugcaccaucagccucuacaaggggguguacgagcugcagacccuggagcucaacauggagacccugaacaugugcaugccgcuguccugcacgaagaacaacagccaccacuacaucauggugggcaacgagaccggccucgagcugacccugaccaacacguccaucaucaaccacaaguucugcaaccucagcgacgcccacaagaagaaccuguacgaccacgcccugauguccaucaucagcaccuuccaccucuccauccccaacuucaaccaguacgaggccaugagcugcgacuucaacgggggcaagaucuccguccaguacaaccugagccacuccuacgccggggacgcggccaaccacugcggcaccguggccaacggggugcugcagaccuucaugcggauggccuggggcggcagcuacaucgcgcucgacuccgggcgcgaccggugggacugcaucaugacgagcuaccaguaccugaucauccagaacaccaccugggaggaccacugccaguucucccgccccagccccaucggcuaccuggggcuccugucccagcggacccgcgacaucuacaucagccggcgccugcucggcacguucaccuggacccugagcgacuccgagggcaaggacacccccgggggcuacugccugacgcgguggaugcucaucgaggccgagcugaagugcuucgggaacaccgccgucgccaagugcaacgagaagcacgacgaggaguucugcgacaugcugcgccucuucgacuucugcaagcaggccauccagcggcugaaggcggaggcccagaugagcauccagcugaucaacaaggccgugaacgcccucaucaacgaccagcugaucaugaagaaccaccuccgcgacaucaugggcaucccguacugcaacuacuccaaguacugguaccugaaccacaccaccacggggaagaccagccugcccaagugcuggcugguguccaacggcagcuaccucaacgagacccacuucuccgacgacaucgagcagcaggccgacaacaugaucaccgagaugcugcagaaggaguacauggagcggcagggcaagacgccccuggggcuggucgaccucuucguguucagcaccuccuucuaccugaucagcaucuuccugcaccucgugaagaucccgacccaccgccacaucgucggcaagcccugccccaagccccaccggcugaaccacauggggaucugcuccugcggccuguacaagcagccgggggugcccgugaaguggaagcgcugaggacuaguaauaaggaaacuguaugaaugucugugggcaggaagugaagagauccuucuguaaagguuuuuggaauuaugucugcugaauaauaaacuuuuuugaaauaauaaaucugguagaaaaaugagaucucaaaggcucuuuucagagccaccaaaaaaaaaaaaaaaaaaaaaaaaaaaaaaaaaaaaaaaaaaaaaaaaaaaaaaaaaaaaaaaaaaaaaaaaaaaaaaaaaaaaaaaaaaaaaaaaaaaaa

SEQ ID NO: 37637 - RNA, 1812 nt, Artificial Sequence
  mRNA product Design b-4 (hSL-A100) comprising derived and/or modified sequence from LASV(Josiah;Clade IV)__NP_694870__GPCmut10 (opt4)
aggagagucccgcagucggcguccagcggcucugcuuguucgugugugugucguugcaggccuuauucaagcuuaccaugggccagaucgugaccuucuuccaggaggugccccacgugaucgaggaggugaugaacaucgugcugaucgcccugagcgugcuggccgugcugaagggccuguacaacuucgccaccugcggccuggugggccuggugaccuuccugcugcugugcggcagaagcugcaccaccagccuguacaagggcguguacgagcugcagacccuggagcugaacauggagacccugaacaugugcaugccccugagcugcaccaagaacaacagccaccacuacaucauggugggcaacgagaccggccuggagcugacccugaccaacaccagcaucaucaaccacaaguucugcaaccugagcgacgcccacaagaagaaccuguacgaccacgcccugaugagcaucaucagcaccuuccaccugagcauccccaacuucaaccaguacgaggccaugagcugcgacuucaacggcggcaagaucagcgugcaguacaaccugagccacagcuacgccggcgacgccgccaaccacugcggcaccguggccaacggcgugcugcagaccuucaugagaauggccuggggcggcagcuacaucgcccuggacagcggcagaggcaacugggacugcaucaugaccagcuaccaguaccugaucauccagaacaccaccugggaggaccacugccaguucagcagacccagccccaucggcuaccugggccugcugagccagagaaccagagacaucuacaucagcagaagacugcugggcaccuucaccuggacccugagcgacagcgagggcaaggacacccccggcggcuacugccugaccagauggaugcugaucgaggccgagcugaagugcuucggcaacaccgccguggccaagugcaacgagaagcacgacgaggaguucugcgacaugcugagacuguucgacuucugcaagcaggccauccagagacugaaggccgaggcccagaugagcauccagcugaucaacaaggccgugaacgcccugaucaacgaccagcugaucaugaagaaccaccugagagacaucaugggcauccccuacugcaacuacagcaaguacugguaccugaaccacaccaccaccggcagaaccagccugcccaagugcuggcuggugagcaacggcagcuaccugaacgagacccacuucagcgacgacaucgagcagcaggccgacaacaugaucaccgagaugcugcagaaggaguacauggagagacagggcaagaccccccugggccugguggaccuguucguguucagcaccagcuucuaccugaucagcaucuuccugcaccuggugaagauccccacccacagacacaucgugggcaagagcugccccaagccccacagacugaaccacaugggcaucugcagcugcggccuguacaagcagcccggcgugcccgugaaguggaagagaugaggacuaguaauaaggaaacuguaugaaugucugugggcaggaagugaagagauccuucuguaaagguuuuuggaauuaugucugcugaauaauaaacuuuuuugaaauaauaaaucugguagaaaaaugagaucucaaaggcucuuuucagagccaccaaaaaaaaaaaaaaaaaaaaaaaaaaaaaaaaaaaaaaaaaaaaaaaaaaaaaaaaaaaaaaaaaaaaaaaaaaaaaaaaaaaaaaaaaaaaaaaaaaaaa

SEQ ID NO: 37638 - RNA, 1809 nt, Artificial Sequence
  mRNA product Design b-4 (hSL-A100) comprising derived and/or modified sequence from LASV(LP;Clade I)__AAF86701__GPCmut10 (opt4)
aggagagucccgcagucggcguccagcggcucugcuuguucgugugugugucguugcaggccuuauucaagcuuaccaugggccagaucaucaccuucuuccaggaggugccccacgugaucgaggaggugaugaacaucgugcugaucgcccugagccugcuggccauccugaagggccuguacaacaucgccaccugcggcaucaucggccugguggccuuccuguuccugugcggcaagagcugcagccugacccugaagggcggcuacgagcugcagacccuggagcugaacauggagacccugaacaugugcaugccccugagcugcaccaagaacagcagccaccacuacaucagagugggcaacgagaccggccuggagcugacccugaccaacaccagcaucaucaaccacaaguucugcaaccugagcgacgcccacaagaagaaccuguacgaccacgcccugaugagcaucaucagcaccuuccaccugagcauccccaacuucaaccaguacgaggccaugagcugcgacuucaacggcggcaagaucagcgugcaguacaaccugagccacagcuacgccggcgacgccgccgagcacugcggcaccguggccaacggcgugcugcagaccuucaugagaauggccuggggcggcagauacaucgcccuggacagcggcaagggcaacugggacugcaucaugaccagcuaccaguaccugaucauccagaacaccaccugggaggaccacugccaguucagcagacccagccccaucggcuaccugggccugcugagccagagaaccagagacaucuacaucagcagaagacugcugggcaccuucaccuggacccugagcgacagcgagggcaacgagacccccggcggcuacugccugaccagauggaugcugaucgaggccgagcugaagugcuucggcaacaccgccguggccaagugcaacgagaagcacgacgaggaguucugcgacaugcugagacuguucgacuucugcaagcaggccaucagaagacugaaggccgaggcccagaugagcauccagcugaucaacaaggccgugaacgcccugaucaacgaccagcugaucaugaagaaccaccugagagacaucaugggcauccccuacugcaacuacagcaaguacugguaccugaaccacaccagcagcggcagaaccagccugcccaagugcuggcugaucagcaacggcagcuaccugaacgagacccaguucagcgacgacaucgagcagcaggccgacaacaugaucaccgagaugcugcagaaggaguacaucgagagacagggcaagaccccccugggccugguggacaucuucaucuucagcaccagcuucuaccugaucagcaucuuccugcaccugaucaagauccccacccacagacacaucgugggcaagcccugccccaagccccacagacugaaccacaugggcgugugcagcugcggccuguacaagcaccccggcgugcccaccaaguggaagagaugaggacuaguaauaaggaaacuguaugaaugucugugggcaggaagugaagagauccuucuguaaagguuuuuggaauuaugucugcugaauaauaaacuuuuuugaaauaauaaaucugguagaaaaaugagaucucaaaggcucuuuucagagccaccaaaaaaaaaaaaaaaaaaaaaaaaaaaaaaaaaaaaaaaaaaaaaaaaaaaaaaaaaaaaaaaaaaaaaaaaaaaaaaaaaaaaaaaaaaaaaaaaaaaaa

SEQ ID NO: 37639 - RNA, 1809 nt, Artificial Sequence
  mRNA product Design b-4 (hSL-A100) comprising derived and/or modified sequence from LASV(803213;Clade II)__AAF86703__GPCmut10 (opt4)
aggagagucccgcagucggcguccagcggcucugcuuguucgugugugugucguugcaggccuuauucaagcuuaccaugggccagaucaucaccuucuuccaggaggugccccacgugaucgaggaggugaugaacaucgugcugaucgcccugagccugcuggccauccugaagggcaucuacaacguggccaccugcggccuguucggccugaucagcuuccugcugcugugcggcagaagcugcagcgugaccuacaagggcguguacgagcugcagacccuggagcugaacauggccaaccugaacaugugcaugccccugagcugcaccaagaacaacagccaccacuacaucauggugggcaacgagaccggccuggagcugacccugaccaacaccagcaucaucaaccacaaguucugcaaccugagcgacgcccacaagaagaaccuguacgaccacgcccugaugagcaucaucagcaccuuccaccugagcauccccaacuucaaccaguacgaggccaugagcugcgacuucaacggcggcaagaucagcgugcaguacaaccugagccacagcuucgccguggacgccgccaaccacugcggcaccaucgccaacggcgugcugcagaccuucaugagaauggccuggggcggcagcuacaucgcccuggacagcggcaagggcaacugggacugcaucaugaccagcuaccaguaccugaucauccagaacaccaccugggaggaccacugccaguucagcagacccagccccaucggcuaccugggccugcugagccagagaaccagagacaucuacaucagcagaagacugcugggcaccuucaccuggacccugagcgacagcgagggcaacgaggcccccggcggcuacugccugaccagauggaugcugaucgaggccgagcugaagugcuucggcaacaccgccguggccaagugcaacgagaagcacgacgaggaguucugcgacaugcugagacuguucgacuucugcaagcaggccaucaagagacugaagaccgaggcccagaugagcauccagcugaucaacaaggccgugaacgcccugaucaacgaccagcugaucaugaagaaccaccugagagacaucaugggcauccccuacugcaacuacagcagauacugguaccugaaccacaccgugaccggcaagaccagccugcccagaugcuggcuggugagcaacggcagcuaccugaacgagacccacuucagcgacgacaucgagcagcaggccgacaacaugaucaccgagaugcugcagaaggaguacauggacagacagggcaagaccccccugggccugguggaccuguucguguucagcaccagcuucuaccugaucagcaucuuccugcaccuggugaagauccccacccacagacacaucgugggcaagcccugccccaagccccacagacugaaccacaugggcaucugcagcugcggccuguacaagcaccccggcgugcccgugaaguggaagagaugaggacuaguaauaaggaaacuguaugaaugucugugggcaggaagugaagagauccuucuguaaagguuuuuggaauuaugucugcugaauaauaaacuuuuuugaaauaauaaaucugguagaaaaaugagaucucaaaggcucuuuucagagccaccaaaaaaaaaaaaaaaaaaaaaaaaaaaaaaaaaaaaaaaaaaaaaaaaaaaaaaaaaaaaaaaaaaaaaaaaaaaaaaaaaaaaaaaaaaaaaaaaaaaaa

SEQ ID NO: 37640 - RNA, 1809 nt, Artificial Sequence
  mRNA product Design b-4 (hSL-A100) comprising derived and/or modified sequence from LASV(GA391;Clade III)__CAA36645__GPCmut10 (opt4)
aggagagucccgcagucggcguccagcggcucugcuuguucgugugugugucguugcaggccuuauucaagcuuaccaugggccagaucgugaccuucuuccaggaggugccccacgugaucgaggaggugaugaacaucgugcugaucgcccugagcauccuggccauccugaagggccuguacaacguggccaccugcggccugaucggccuggugaccuuccugcugcugagcggcagaagcugcagccugaucuacaagggcaccuacgagcugcagacccuggagcugaacauggagacccugaacaugugcaugccccugagcugcaccaagaacaacagccaccacuacaucagagugggcaacgagaccggccuggagcugacccugaccaacaccagcauccugaaccacaaguucugcaaccugagcgacgcccacaagagaaaccuguacgaccacagccugaugagcaucaucagcaccuuccaccugagcauccccaacuucaaccaguacgaggccaugagcugcgacuucaacggcggcaagaucaccgugcaguacaaccugagccacagcuucgccguggacgccgccggccacugcggcacccuggccaacggcgugcugcagaccuucaugagaauggccuggggcggcagcuacaucgcccuggacagcggcagaggcaacugggacugcaucaugaccagcuaccaguaccugaucauccagaacaccaccugggacgaccacugccaguucagcagacccagccccaucggcuaccugggccugcugagccagagaaccagagacaucuacaucagcagaagacugcugggcaccuucaccuggacccugagcgacagcgagggcaacgagacccccggcggcuacugccugaccagauggaugcugaucgaggccgagcugaagugcuucggcaacaccgccguggccaagugcaacgagaagcacgacgaggaguucugcgacaugcugagacuguucgacuucugcaagcaggccaucagaagacugaagaccgaggcccagaugagcauccagcugaucaacaaggccgugaacgcccugaucaacgaccagcugaucaugaagaaccaccugagagacaucaugggcauccccuacugcaacuacagcagauacugguaccugaaccacaccagcaccggcaagaccagccugcccagaugcuggcugaucagcaacggcagcuaccugaacgagaccaaguucagcgacgacaucgagcagcaggccgacaacaugaucaccgagaugcugcagaaggaguacaucgacagacagggcaagaccccccugggccugguggaccuguucguguucagcaccagcuucuaccugaucagcaucuuccugcaccuggugaagauccccacccacagacacaucgugggcaagcccugccccaagccccacagacugaaccacaugggcaucugcagcugcggccuguacaagcagcccggcgugcccgugagauggaagagaugaggacuaguaauaaggaaacuguaugaaugucugugggcaggaagugaagagauccuucuguaaagguuuuuggaauuaugucugcugaauaauaaacuuuuuugaaauaauaaaucugguagaaaaaugagaucucaaaggcucuuuucagagccaccaaaaaaaaaaaaaaaaaaaaaaaaaaaaaaaaaaaaaaaaaaaaaaaaaaaaaaaaaaaaaaaaaaaaaaaaaaaaaaaaaaaaaaaaaaaaaaaaaaaaa

SEQ ID NO: 37641 - RNA, 1812 nt, Artificial Sequence
  mRNA product Design b-4 (hSL-A100) comprising derived and/or modified sequence from LASV(AV;Clade V)__CCA30314__GPCmut10 (opt4)
aggagagucccgcagucggcguccagcggcucugcuuguucgugugugugucguugcaggccuuauucaagcuuaccaugggccagaucgugaccuucuuccaggaggugccccacgugaucgaggaggugaugaacaucgugcugaucgcccugagcauccuggccgugcugaagggccuguacaacaucgccaccugcggccugaucggccugaucaccuuccugcugcugugcggcagaagcugcagcagcaaccuguacaagggcguguacgagcugcagagccuggaccugaacauggagacccugaacaugugcaugccccugagcugcaccaagaacaacagccaccacuacaucagagugggcaacgacaccggccuggagcugacccugaccaacaccagcauccugaaccacaaguucugcaaccugagcgacgcccacaagaaggaccuguacgaccacgcccugaugagcaucaucagcaccuuccaccugagcauccccaacuucaaccaguacgaggccaugagcugcgacuucaacggcggcaagaucagcgugcaguacaaccugagccacagcuacgccaucgacgccgccaaccacugcggcaccguggccaacggcauccugcagaccuucaugagaauggccuggggcggcagcuacaucgcccuggacagcggcagaggcaacugggacugcaucaugaccagcuaccaguaccugaucauccagaacaccaccugggagaaccacugccaguucagcagacccagccccaucggcuaccugggccugcugagccagagaaccagagacaucuacaucagcagaagacugcugggcaccuucaccuggacccugagcgacagcgagggcaacgccacccccggcggcuacugccugaccagauggaugcugaucgaggccgagcugaagugcuucggcaacaccgccguggccaagugcaacgagaagcacgacgaggaguucugcgacaugcugagacuguucgacuucugcaagcaggccaucagcagacugaagagcgaggcccagaugagcauccagcugaucaacaaggccgugaacgcccugaucaacgaccagcugaucaugaagaaccaccugagagacaucaugggcauccccuacugcaacuacagcaaguacugguaccugaaccacaccaucaccggcaagaccagccugcccaagugcuggcuggugagcaacggcagcuaccugaacgagacccacuucagcgacgacaucgagcagcaggccgacaacaugaucaccgagaugcugcagaaggaguacauggagagacagggcaagaccccccugggccugguggaccuguucguguucagcaccagcuucuaccugaucagcaucuuccugagacuggugaagauccccacccacagacacaucgugggcaagcccugccccaagccccacagacugaaccacaugggcaucugcagcugcggccuguacaagcagcccggcgugcccgugagauggaagagaugaggacuaguaauaaggaaacuguaugaaugucugugggcaggaagugaagagauccuucuguaaagguuuuuggaauuaugucugcugaauaauaaacuuuuuugaaauaauaaaucugguagaaaaaugagaucucaaaggcucuuuucagagccaccaaaaaaaaaaaaaaaaaaaaaaaaaaaaaaaaaaaaaaaaaaaaaaaaaaaaaaaaaaaaaaaaaaaaaaaaaaaaaaaaaaaaaaaaaaaaaaaaaaaaa

SEQ ID NO: 37642 - RNA, 1809 nt, Artificial Sequence
  mRNA product Design b-4 (hSL-A100) comprising derived and/or modified sequence from LASV(Togo/2016/7082;Clade VI)__AMR44577__GPCmut10 (opt4)
aggagagucccgcagucggcguccagcggcucugcuuguucgugugugugucguugcaggccuuauucaagcuuaccaugggccagaucaucaccuucuuccaggaggugccccacgugaucgaggaggugaugaacaucgugcugaucgcccugagccugcuggccauccugaagggcguguacaacguggccaccugcggcaucaucggccuggugaccuuccuguuccugugcggcagaagcugcagccugaucuacaagggcagcuacgagcugcagacccuggagcugaacauggagacccugaacaugugcaugccccugagcugcaccaagaacagcagccaccacuacaucagagugggcaacgagaccggccuggagcugacccugaccaacaccagcaucaucaaccacaaguucugcaaccugagcgacgcccacaagagaaaccuguacgaccacgcccugaugagcauccugagcaccuuccaccugagcauccccaacuucaaccaguacgaggccaugagcugcgacuucaacggcggcaagaucagcgugcaguacaaccugagccacgccuacgccguggacgccgccgagcacugcggcaccguggccaacggcgugcugcagaccuucaugagaauggccuggggcggcagcuacaucgcccuggacagcggcagaggcaacugggacugcaucaugaccagcuaccaguaccugaucauccagaacaccaccugggaggaccacugccaguucagcagacccagccccaucggcuaccugggccugcugagccagagaaccagagacaucuacaucagcagaagacugcugggcaccuucaccuggacccugagcgacagcgagggcaacgagacccccggcggcuacugccugaccagauggaugcugaucgaggccgagcugaagugcuucggcaacaccgccguggccaagugcaacgagaagcacgacgaggaguucugcgacaugcugagacuguucgacuucugcaagcaggccauccagagacugaagagcgaggcccagaugagcauccagcugaucaacaaggccgugaacgcccugaucaacgaccagcugaucaugaagaaccaccugagagacaugaugggcauccccuacugcaacuacagcaaguacugguaccugaaccacaccagcagcggcagaaccagccugcccaagugcuggcuggugagcaacggcagcuaccugaacgagacccacuucagcgacgacaucgagcagcaggccgacaacaugaucaccgagaugcugcagaaggaguacaucgacagacagggcaagaccccccugggccugguggaccuguucguguucagcaccagcuucuaccugaucagcaucuuccugcaccugaucaagauccccacccacagacacaucgugggcaagcccugccccaagccccacagacugaaccacaugggcaucugcagcugcggccuguacaagcagcccggcgugcccaccagauggaagagaugaggacuaguaauaaggaaacuguaugaaugucugugggcaggaagugaagagauccuucuguaaagguuuuuggaauuaugucugcugaauaauaaacuuuuuugaaauaauaaaucugguagaaaaaugagaucucaaaggcucuuuucagagccaccaaaaaaaaaaaaaaaaaaaaaaaaaaaaaaaaaaaaaaaaaaaaaaaaaaaaaaaaaaaaaaaaaaaaaaaaaaaaaaaaaaaaaaaaaaaaaaaaaaaaa

SEQ ID NO: 37643 - RNA, 1809 nt, Artificial Sequence
  mRNA product Design b-4 (hSL-A100) comprising derived and/or modified sequence from LASV(KAK-428;Clade n.d. (VII))__ANH09740__GPCmut10 (opt4)
aggagagucccgcagucggcguccagcggcucugcuuguucgugugugugucguugcaggccuuauucaagcuuaccaugggccagaucgugaccuucuuccaggaggugccccacgugaucgaggaggugaugaacaucgugcugaucgcccugagccugcuggccauccugaagggccuguacaacuucgccaccugcggcgugaucggccugaucaccuuccugcugcugugcggcagaagcugcagcgccaccuacaagggccaguacgagcugcagacccuggagcugaacauggagagccugaacaugugcaugccccugagcugcaccaagaacaacagccaccacuacaucagagccggcaacaacaccggccuggagcugacccugaccaacaccagcaucaucagccacaaguucugcaaccugagcgacgcccacaagaagaaccuguacgaccacacccugaugagcaucaucaccaccuuccaccugagcauccccaacuucaaccaguacgaggccaugagcugcgacuucaacggcggcaagaucagcauccaguacaaccugagccacagcuacgccggcgacgccgcccagcacugcggcaccguggccaacggcgugcugcagaccuucaugagaauggccuggggcggcagcuaccuggcccuggacagcggcagaagaggcugggacugcaucaucagcagcuaccaguaccugaucauccagaacaccaccugggacgaccacugccaguucagcagacccagccccaucggcuaccugggcuucgugagccagaagaccagagacaucuacaucagcagaagacugcugggcaccuucaccuggacccugagcgacagcgagggccacgacaugcccggcggcuacugccugaccagauggaugcugaucgaggccgaccugaagugcuucggcaacaccgccguggccaagugcaacgagaagcacgacgaggaguucugcgacauguggagacuguucgacuucugcaagcaggccauccagagacugaaggccgaggcccagaugaacauccagcugaucaacaaggccgugaacgcccugaucaacgaccagcugaugaugaagaaccaccugagagacaucaugggcauccccuacugcaacuacagcaaguucugguaccugaacaacaccaccaccggcagaaccagccugcccagaugcuggcugaucagcaacggcagcuaccugaacgagacccacuucagcgacgacaucgagcagcaggccgacaacaugaucaccgagaugcugcagaaggaguacauggacagacagggcaagaccccccugggccugguggaccuguucguguucagcaccagcuucuaccugaucaccaucuuccugcaccuggugaagauccccacccacagacacaucgugggcaagcccugccccaagccccacagacugaaccacaugggcaucugcagcugcggccuguacaagcagcccggcgugcccgugagauggaagagaugaggacuaguaauaaggaaacuguaugaaugucugugggcaggaagugaagagauccuucuguaaagguuuuuggaauuaugucugcugaauaauaaacuuuuuugaaauaauaaaucugguagaaaaaugagaucucaaaggcucuuuucagagccaccaaaaaaaaaaaaaaaaaaaaaaaaaaaaaaaaaaaaaaaaaaaaaaaaaaaaaaaaaaaaaaaaaaaaaaaaaaaaaaaaaaaaaaaaaaaaaaaaaaaaa

SEQ ID NO: 37644 - RNA, 1809 nt, Artificial Sequence; identical to SEQ ID NO: 37638
  mRNA product Design b-4 (hSL-A100) comprising derived and/or modified sequence from LASV(Pinneo-NIG-1969;Clade I)__AIT17836__GPCmut10 (opt4)

SEQ ID NO: 37645 - RNA, 1809 nt, Artificial Sequence
  mRNA product Design b-4 (hSL-A100) comprising derived and/or modified sequence from LASV(ISTH0009-NIG-2011;Clade II)__AIT17404__GPCmut10 (opt4)
aggagagucccgcagucggcguccagcggcucugcuuguucgugugugugucguugcaggccuuauucaagcuuaccaugggccagaucaucaccuucuuccaggaggugccccacgugaucgaggaggugaugaacaucgugcugaucgcccugagccugcuggccauccugaagggcaucuacaacguggccaccugcggccuguucggccuggugagcuuccugcugcugugcggcagaagcugcagcaccaccuacaagggcguguacgagcugcagacccuggagcuggacauggccagccugaacaugugcaugccccugagcugcaccaagaacaacagccaccacuacaucauggugggcaacgagaccggccuggagcugacccugaccaacaccagcaucaucaaccacaaguucugcaaccugagcgacgcccacaagaagaaccuguacgaccacgcccugaugagcaucaucagcaccuuccaccugagcauccccaacuucaaccaguacgaggccaugagcugcgacuucaacggcggcaagaucagcgugcaguacaaccugagccacgccuacgccguggacgccgccaaccacugcggcaccaucgccaacggcgugcugcagaccuucaugagaauggccuggggcggcagcuacaucgcccuggacagcggcaagggcagcugggacugcaucaugaccagcuaccaguaccugaucauccagaacaccaccugggaggaccacugccaguucagcagacccagccccaucggcuaccugggccugcugagccagagaaccagagacaucuacaucagcagaagacugcugggcaccuucaccuggacccugagcgacagcgagggcaacgagacccccggcggcuacugccugaccagauggaugcugaucgaggccgagcugaagugcuucggcaacaccgccguggccaagugcaacgagaagcacgacgaggaguucugcgacaugcugagacuguucgacuucugcaagcaggccaucagaagacugaagaccgaggcccagaugagcauccagcugaucaacaaggccgugaacgcccugaucaacgaccagcugaucaugaagaaccaccugagagacaucaugggcauccccuacugcaacuacagcaaguacugguaccugaaccacaccgugaccggcaagaccagccugcccagaugcuggcuggugagcaacggcagcuaccugaacgagacccacuucagcgacgacaucgagcagcaggccgacaacaugaucaccgagcugcugcagaaggaguacauggacagacagggcaagaccccccugggccugguggaccuguucguguucagcaccagcuucuaccugaucagcaucuuccugcaccugaucaagauccccacccacagacacaucaccggcaagcccugccccaagccccacagacugaaccacaugggcaucugcagcugcggccuguacaagcaccccggcgugcccgugaaguggaagagaugaggacuaguaauaaggaaacuguaugaaugucugugggcaggaagugaagagauccuucuguaaagguuuuuggaauuaugucugcugaauaauaaacuuuuuugaaauaauaaaucugguagaaaaaugagaucucaaaggcucuuuucagagccaccaaaaaaaaaaaaaaaaaaaaaaaaaaaaaaaaaaaaaaaaaaaaaaaaaaaaaaaaaaaaaaaaaaaaaaaaaaaaaaaaaaaaaaaaaaaaaaaaaaaaa

SEQ ID NO: 37646 - RNA, 1809 nt, Artificial Sequence
  mRNA product Design b-4 (hSL-A100) comprising derived and/or modified sequence from LASV(ISTH2010-NIG-2012;Clade II)__AIT17482__GPCmut10 (opt4)
aggagagucccgcagucggcguccagcggcucugcuuguucgugugugugucguugcaggccuuauucaagcuuaccaugggccagaucaucaccuucuuccaggaggugccccacgugaucgaggaggugaugaacaucgugcugaucgcccugagccugcuggccauccugaagggcaucuacaacguggccaccugcggccuguucggccuggugagcuuccugcugcugugcggcagaagcugcagcaccaccuacaagggcguguacgagcugcagacccuggagcuggacauggccagccugaacaugugcaugccccugagcugcaccaagaacaacagccaccacuacaucauggugggcaacgagaccggccuggagcugacccugaccaacaccagcaucaucaaccacaaguucugcaaccugagcgacgcccacaagaagaaccuguacgaccacgcccugaugagcaucaucagcaccuuccaccugagcauccccaacuucaaccaguacgaggccaugagcugcgacuucaacggcggcaagaucagcgugcaguacaaccugagccacgccuacgccguggacgccgccaaccacugcggcaccaucgccaacggcgugcugcagaccuucaugagaauggccuggggcggcagcuacaucgcccuggacagcggcaagggcagcugggacugcaucaugaccagcuaccaguaccugaucauccagaacaucaccugggaggaccacugccaguucagcagacccagccccaucggcuaccugggccugcugagccagagaaccagagacaucuacaucagcagaagacugcugggcaccuucaccuggacccugagcgacagcgagggcaacgagacccccggcggcuacugccugaccagauggaugcugaucgaggccgagcugaagugcuucggcaacaccgccguggccaagugcaacgagaagcacgacgaggaguucugcgacaugcugagacuguucgacuucugcaagcaggccaucagaagacugaagaccgaggcccagaugagcauccagcugaucaacaaggccgugaacgcccugaucaacgaccagcugaucaugaagaaccaccugagagacaucaugggcauccccuacugcaacuacagcaaguacugguaccugaaccacaccgugaccggcaagaccagccugcccagaugcuggcuggugagcaacggcagcuaccugaacgagacccacuucagcgacgacaucgagcagcaggccgacaacaugaucaccgagcugcugcagaaggaguacaucgacagacagggcaagaccccccugggccugguggaccuguucguguucagcaccagcuucuaccugaucagcaucuuccugcaccuggugaagauccccacccacagacacguggugggcaagcccugccccaagccccacagacugaaccacaugggcaucugcagcugcggccuguacaagcaccccggcgugcccgugaaguggaagagaugaggacuaguaauaaggaaacuguaugaaugucugugggcaggaagugaagagauccuucuguaaagguuuuuggaauuaugucugcugaauaauaaacuuuuuugaaauaauaaaucugguagaaaaaugagaucucaaaggcucuuuucagagccaccaaaaaaaaaaaaaaaaaaaaaaaaaaaaaaaaaaaaaaaaaaaaaaaaaaaaaaaaaaaaaaaaaaaaaaaaaaaaaaaaaaaaaaaaaaaaaaaaaaaaa

SEQ ID NO: 37647 - RNA, 1809 nt, Artificial Sequence
  mRNA product Design b-4 (hSL-A100) comprising derived and/or modified sequence from LASV(Lassa virus/H.sapiens-wt/NGA/2015/ISTH_0543;Clade II)__AVO03639__GPCmut10 (opt4)
aggagagucccgcagucggcguccagcggcucugcuuguucgugugugugucguugcaggccuuauucaagcuuaccaugggccagaucaucaccuucuuccaggaggugccccacgugaucgaggaggugaugaacaucgugcugaucgcccugagccugcuggccauccugaagggcaucuacaacguggccaccugcggccuguucggccuggugagcuuccugcugcugugcggcagaagcugcagcaccaccuacaagggcguguacgagcugcagacccuggagcuggacauggccaaccugaacaugugcaugccccugagcugcaccaagaacaacagccaccacuacaucauggugggcaacgagaccggccuggagcugacccugaccaacaccagcaucaucaaccacaaguucugcaaccugagcgacgcccacaagaagaaccuguacgaccacgcccugaugagcaucaucagcaccuuccaccugagcauccccaacuucaaccaguacgaggccaugagcugcgacuucaacggcggcaagaucagcgugcaguacaaccugagccacaccuacgccguggacgccgccaaccacugcggcaccaucgccaacggcgugcugcagaccuucaugagaauggccuggggcggcagcuacaucgcccuggacagcggcaagggcagcugggacugcaucaugaccagcuaccaguaccuggugauccagaacaccaccugggaggaccacugccaguucagcagacccagccccaucggcuaccugggccugcugagccagagaaccagagacaucuacaucagcagaagacugcugggcaccuucaccuggacccugagcgacagcgagggcaacgagacccccggcggcuacugccugaccagauggaugcugaucgaggccgagcugaagugcuucggcaacaccgccguggccaagugcaacgagaagcacgacgaggaguucugcgacaugcugagacuguucgacuucugcaagcaggccaucagaagacugaagaccgaggcccagaugagcauccagcugaucaacaaggccgugaacgcccugaucaacgaccagcugaucaugaagaaccaccugagagacaucaugggcauccccuacugcaacuacagcaaguacugguaccugaaccacaccgugaccggcaagaccagccugcccagaugcuggcuggugagcaacggcagcuaccugaacgagacccacuucagcgacgacaucgagcagcaggccgacaacaugaucaccgagcugcugcagaaggaguacaucgacagacagggcaagaccccccugggccugguggaccuguucguguucagcaccagcuucuaccugaucagcaucuuccugcaccuggugaagauccccacccacagacacaucaccggcaagcccugccccaagccccacagacugaaccacaugggcaucugcagcugcggccuguacaagcaccccggcgugcccgugaaguggaagagaugaggacuaguaauaaggaaacuguaugaaugucugugggcaggaagugaagagauccuucuguaaagguuuuuggaauuaugucugcugaauaauaaacuuuuuugaaauaauaaaucugguagaaaaaugagaucucaaaggcucuuuucagagccaccaaaaaaaaaaaaaaaaaaaaaaaaaaaaaaaaaaaaaaaaaaaaaaaaaaaaaaaaaaaaaaaaaaaaaaaaaaaaaaaaaaaaaaaaaaaaaaaaaaaaa

SEQ ID NO: 37648 - RNA, 1809 nt, Artificial Sequence
  mRNA product Design b-4 (hSL-A100) comprising derived and/or modified sequence from LASV(Lassa virus/H.sapiens-wt/NGA/2016/ISTH_0009;Clade II)__AVO03571__GPCmut10 (opt4)
aggagagucccgcagucggcguccagcggcucugcuuguucgugugugugucguugcaggccuuauucaagcuuaccaugggccagaucaucaccuucuuccaggaggugccccacgugaucgaggaggugaugaacaucgugcugaucgcccugagccugcuggccauccugaagggcaucuacaacguggccaccugcggccugcugggccuggugagcuuccugcugcugugcggcagaagcugcagcaccaccuacaagggcguguacgagcugcagacccuggagcuggacauggccagccugaacaugugcaugccccugagcugcaccaagaacaacagccaccacuacaucauggugggcaacgagaccggccuggagcugacccugaccaacaccagcaucaucaaccacaaguucugcaaccugagcgacgcccacaagaagaaccuguacgaccacgcccugaugagcaucaucagcaccuuccaccugagcauccccaacuucaaccaguacgaggccaugagcugcgacuucaacggcggcagaaucagcgugcaguacaaccugagccacagcuacgccguggacgccgccaaccacugcggcaccaucgccaacggcgugcugcagaccuucaugagaauggccuggggcggcagcuacaucgcccuggacagcggcaagggcagcugggacugcaucaugaccagcuaccaguaccugaucauccagaacaccaccugggaggaccacugccaguucagcagacccagccccaucggcuaccugggccugcugagccagagaaccagagacaucuacaucagcagaagacugcugggcaccuucaccuggacccugagcgacagcgagggcaacgagacccccggcggcuacugccugaccagauggaugcugaucgaggccgagcugaagugcuucggcaacaccgccguggccaagugcaacgagaagcacgacgaggaguucugcgacaugcugagacuguucgacuucugcaagcaggccaucagaagacugaagaccgaggcccagaugagcauccagcugaucaacaaggccgugaacgcccugaucaacgaccagcugaucaugaagaaccaccugagagacaucaugggcauccccuacugcaacuacagcaaguacugguaccugaaccacaccgugaccggcaagaccagccugcccagaugcuggcuggugagcaacggcagcuaccugaacgagacccacuucagcgacgacaucgagcagcaggccgacaacaugaucaccgagcugcugcagaaggaguacaucgacagacagggcaagaccccccugggccugguggaccuguucguguucagcaccagcuucuaccugaucagcaucuuccugcaccuggugaagauccccacccacagacacaucaccggcaagcccugccccaagccccacagacugaaccacaugggcaucugcagcugcggccuguacaaccaccccggcgugcccgugaaguggaagagaugaggacuaguaauaaggaaacuguaugaaugucugugggcaggaagugaagagauccuucuguaaagguuuuuggaauuaugucugcugaauaauaaacuuuuuugaaauaauaaaucugguagaaaaaugagaucucaaaggcucuuuucagagccaccaaaaaaaaaaaaaaaaaaaaaaaaaaaaaaaaaaaaaaaaaaaaaaaaaaaaaaaaaaaaaaaaaaaaaaaaaaaaaaaaaaaaaaaaaaaaaaaaaaaaa

SEQ ID NO: 37649 - RNA, 1809 nt, Artificial Sequence
  mRNA product Design b-4 (hSL-A100) comprising derived and/or modified sequence from LASV(Lassa virus/H.sapiens-wt/NGA/2016/ISTH_0017;Clade II)__AVO03567__GPCmut10 (opt4)
aggagagucccgcagucggcguccagcggcucugcuuguucgugugugugucguugcaggccuuauucaagcuuaccaugggccagaucaucaccuucuuccaggaggugccccacgugaucgaggaggugaugaacaucgugcugaucgcccugagccugcuggccauccugaagggcaucuacaacguggccaccugcggccuguucggccuggugagcuuccugcugcugugcggcagaagcugcagcaccaccuacaagggcguguacgagcugcagacccuggagcuggacauggccagccugaacaugugcaugccccugagcugcaccaagaacaacagccaccacuacaucauggugggcaacgagaccggccuggagcugacccugaccaacaccagcaucaucaaccacaaguucugcaaccugagcgacgcccacaagaagaaccuguacgaccacgcccugaugagcaucaucagcaccuuccaccugagcauccccaacuucaaccaguacgaggccaugagcugcgacuucaacggcggcaagaucagcgugcaguacaaccugagccacaccuacgccaucgacgccgccaaccacugcggcaccaucgccaacggcgugcugcagaccuucaugagaauggccuggggcggcagcuacaucgcccuggacagcggcaagggcagcugggacugcaucaugaccagcuaccaguaccugaucauccagaacaccaccugggaggaccacugccaguucagcagacccagccccaucggcuaccugggccugcugagccagagaaccagagacaucuacaucagcagaagacugcugggcaccuucaccuggacccugagcgacagcgagggcaacgagacccccggcggcuacugccugaccagauggaugcugaucgaggccgagcugaagugcuucggcaacaccgccguggccaagugcaacgagaagcacgacgaggaguucugcgacaugcugagacuguucgacuucugcaagcaggccaucagaagacugaagaccgaggcccagaugagcauccagcugaucaacaaggccgugaacgcccugaucaacgaccagcugaucaugaagaaccaccugagagacaucaugggcauccccuacugcaacuacagcaaguacugguaccugaaccacaccgugaccggcaagaccagccugcccagaugcuggcuggugagcaacggcagcuaccugaacgagacccacuucagcgacgacaucgagcagcaggccgacaacaugaucaccgagcugcugcagaaggaguacauggacagacagggcaagaccccccugggccugguggaccuguucguguucagcaccagcuucuaccugaucagcaucuuccugcaccuggugagaauccccacccacagacacgugaucggcaagcccugccccaagccccacagacugaaccacaugggcaucugcagcugcggccuguacaagcaccccggcgugcccgugaaguggaagagaugaggacuaguaauaaggaaacuguaugaaugucugugggcaggaagugaagagauccuucuguaaagguuuuuggaauuaugucugcugaauaauaaacuuuuuugaaauaauaaaucugguagaaaaaugagaucucaaaggcucuuuucagagccaccaaaaaaaaaaaaaaaaaaaaaaaaaaaaaaaaaaaaaaaaaaaaaaaaaaaaaaaaaaaaaaaaaaaaaaaaaaaaaaaaaaaaaaaaaaaaaaaaaaaaa

SEQ ID NO: 37650 - RNA, 1809 nt, Artificial Sequence
  mRNA product Design b-4 (hSL-A100) comprising derived and/or modified sequence from LASV(Lassa virus/H.sapiens-wt/NGA/2018/ISTH_0959;Clade II)__AVV65099__GPCmut10 (opt4)
aggagagucccgcagucggcguccagcggcucugcuuguucgugugugugucguugcaggccuuauucaagcuuaccaugggccagaucaucaccuucuuccaggaggugccccacgugaucgaggaggugaugaacaucgugcugaucgcccugagccugcuggccauccugaagggcaucuacaacguggugaccugcggccuguucggccuggugagcuuccugcugcugugcggcagaagcugcagcaccaccuacaagggcguguacgagcugcagacccuggagcuggacauggccagccugaacaugugcaugccccugagcugcaccaagaacaacagccaccacuacaucauggugggcaacgagaccggccuggagcugacccugaccaacaccagcaucaucaaccacaaguucugcaaccugagcgacgcccacaagaagaaccuguacgaccacgcccugaugagcaucaucagcaccuuccaccugagcauccccaacuucaaccaguacgaggccaugagcugcgacuucaacggcggcaagaucagcgugcaguacaaccugagccacgccuacgccaucgacgccgccaaccacugcggcaccaucgccaacggcgugcugcagaccuucaugagaauggccuggggcggcagcuacaucgcccuggacagcggcaagggcagcugggacugcaucaugaccagcuaccaguaccugaucauccagaacaccaccugggaggaccacugccaguucagcagacccagccccaucggcuaccugggccugcugagccagagaaccagagacaucuacaucagcagaagacugcugggcaccuucaccuggacccugagcgacagcgagggcaacgagacccccggcggcuacugccugaccagauggaugcugaucgaggccgagcugaagugcuucggcaacaccgccguggccaagugcaacgagaagcacgacgaggaguucugcgacaugcugagacuguucgacuucugcaagcaggccaucagaagacugaagaccgaggcccagaugagcauccagcugaucaacaaggccgugaacgcccugaucaacgaccagcugaucaugaagaaccaccugagagacaucaugggcauccccuacugcaacuacagcaaguacugguaccugaaccacaccgugaccggcaagaccagccugcccagaugcuggcuggugagcaacggcagcuaccugaacgagacccacuucagcgacgacaucgagcagcaggccgacaacaugaucaccgagcugcugcagaaggaguacaucgacagacagggcaagaccccccugggccugguggaccuguucguguucagcaccagcuucuaccugaucagcaucuuccugcaccuggugaagauccccacccacagacacgugaucggcaagcccugccccaagccccacagacugaaccacaugggcaucugcagcugcggccuguacaagcaccccggcgugcccgugaaguggaagagaugaggacuaguaauaaggaaacuguaugaaugucugugggcaggaagugaagagauccuucuguaaagguuuuuggaauuaugucugcugaauaauaaacuuuuuugaaauaauaaaucugguagaaaaaugagaucucaaaggcucuuuucagagccaccaaaaaaaaaaaaaaaaaaaaaaaaaaaaaaaaaaaaaaaaaaaaaaaaaaaaaaaaaaaaaaaaaaaaaaaaaaaaaaaaaaaaaaaaaaaaaaaaaaaaa

SEQ ID NO: 37651 - RNA, 1809 nt, Artificial Sequence
  mRNA product Design b-4 (hSL-A100) comprising derived and/or modified sequence from LASV(LASV003-NIG-2008;Clade II)__AIT17580__GPCmut10 (opt4)
aggagagucccgcagucggcguccagcggcucugcuuguucgugugugugucguugcaggccuuauucaagcuuaccaugggccagaucaucaccuucuuccaggaggugccccacgugaucgaggaggugaugaacaucgugcugaucgcccugagccugcuggccauccugaagggcaucuacaacguggccaccugcggccuguucggccuggugagcuuccugcugcugugcggcagaagcugcagcaccaccuacaagggcguguacgagcugcagacccuggagcuggacauggccagccugaacaugugcaugccccugagcugcaccaagaacaacagccaccacuacaucauggugggcaacgagaccggccuggagcugacccugaccaacaccagcaucaucaaccacaaguucugcaaccugagcgacgcccacaagaagaaccuguacgaccacgcccugaugagcaucaucagcaccuuccaccugagcauccccaacuucaaccaguacgaggccaugagcugcgacuucaacggcggcaagaucagcgugcaguacaaccugagccacaccuacgccguggacgccgccaaccacugcggcaccaucgccaacggcgugcugcagaccuucaugagaauggccuggggcggcagcuacaucgcccuggacagcggcaagggcagcugggacugcaucaugaccagcuaccaguaccugaucauccagaacaccaccugggaggaccacugccaguucagcagacccagccccaucggcuaccugggccugcugagccagagaaccagagacaucuacaucagcagaagacugcugggcaccuucaccuggacccugagcgacagcgagagcaacgagacccccggcggcuacugccugaccagauggaugcugaucgaggccgagcugaagugcuucggcaacaccgccguggccaagugcaacgagaagcacgacgaggaguucugcgacaugcugagacuguucgacuucugcaagcaggccaucagaagacugaaggccgaggcccagaugagcauccagcugaucaacaaggccgugaacgcccugaucaacgaccagcugaucaugaagaaccaccugagagacaucaugggcauccccuacugcaacuacagcaaguacugguaccugaaccacaccgugaccggcagaaccagccugcccagaugcuggcuggugagcaacggcagcuaccugaacgagacccacuucagcgacgacaucgagcagcaggccgacaacaugaucaccgagcugcugcagaaggaguacauggacagacagggcaagaccccccugggccugguggaccuguucguguucagcaccagcuucuaccugaucagcaucuuccugcaccuggugaagauccccacccacagacacgugaucggcaagcccugccccaagccccacagacugaaccacaugggcaucugcagcugcggccuguacaagcaccccggcgugcccgugaaguggaagagaugaggacuaguaauaaggaaacuguaugaaugucugugggcaggaagugaagagauccuucuguaaagguuuuuggaauuaugucugcugaauaauaaacuuuuuugaaauaauaaaucugguagaaaaaugagaucucaaaggcucuuuucagagccaccaaaaaaaaaaaaaaaaaaaaaaaaaaaaaaaaaaaaaaaaaaaaaaaaaaaaaaaaaaaaaaaaaaaaaaaaaaaaaaaaaaaaaaaaaaaaaaaaaaaaa

SEQ ID NO: 37652 - RNA, 1809 nt, Artificial Sequence
  mRNA product Design b-4 (hSL-A100) comprising derived and/or modified sequence from LASV(LASV035-NIG-2009;Clade II)__AIT17588__GPCmut10 (opt4)
aggagagucccgcagucggcguccagcggcucugcuuguucgugugugugucguugcaggccuuauucaagcuuaccaugggccagaucaucaccuucuuccaggaggugccccacgugaucgaggaggugaugaacaucgugcugaucgcccugagccugcuggccauccugaagggcaucuacaacguggccaccugcggccuguucggccuggugagcuuccugcugcugugcggcagaagcugcagcaccaccuacaagggcguguacgagcugcagacccuggagcuggacauggccagccugaacaugugcaugccccugagcugcaccaagaacaacagccaccacuacaucauggugggcaacgagaccggccuggagcugacccugaccaacaccagcaucaucaaccacaaguucugcaaccugagcgacgcccacaagaagaaccuguacgaccacgcccugaugagcaucaucagcaccuuccaccugagcauccccaacuucaaccaguacgaggccaugagcugcgacuucaacggcggcaagaucagcgugcaguacaaccugagccacgccuacgccguggacgccgccaaccacugcggcaccaucgccaacggcgugcugcagaccuucaugagaauggccuggggcggcagcuacaucgcccuggacagcggcaagggcagcugggacugcaucaugaccagcuaccaguaccugaucauccagaacaccaccugggaggaccacugccaguucagcagacccagccccaucggcuaccugggccugcugagccagagaaccagagacaucuacaucagcagaagacugcugggcaccuucaccuggacccugagcgacagcgagggcaacgagacccccggcggcuacugccugaccagauggaugcugaucgaggccgagcugaagugcuucggcaacaccgccguggccaagugcaacgagaagcacgacgaggaguucugcgacaugcugagacuguucgacuucugcaagcaggccaucagaagacugaaggccgaggcccagaugagcauccagcugaucaacaaggccgugaacgcccugaucaacgaccagcugaucaugaagaaccaccugagagacaucaugggcauccccuacugcaacuacagcaaguacugguaccugaaccacaccgugaccggcaagaccagccugcccagaugcuggcuggugagcaacggcagcuaccugaacgagacccacuucagcgacgacaucgagcagcaggccgacaacaugaucaccgagcugcugcagaaggaguacaucgacagacagggcaagaccccccugggccugguggaccuguucguguucagcaccagcuucuaccugaucagcaucuuccugcaccuggugaagauccccacccacagacacgugaucggcaagcccugccccaagccccacagacugaaccacaugggcaucugcagcugcggccuguacaagcaccccggcgugcccgugaaguggaagagaugaggacuaguaauaaggaaacuguaugaaugucugugggcaggaagugaagagauccuucuguaaagguuuuuggaauuaugucugcugaauaauaaacuuuuuugaaauaauaaaucugguagaaaaaugagaucucaaaggcucuuuucagagccaccaaaaaaaaaaaaaaaaaaaaaaaaaaaaaaaaaaaaaaaaaaaaaaaaaaaaaaaaaaaaaaaaaaaaaaaaaaaaaaaaaaaaaaaaaaaaaaaaaaaaa

SEQ ID NO: 37653 - RNA, 1809 nt, Artificial Sequence
  mRNA product Design b-4 (hSL-A100) comprising derived and/or modified sequence from LASV(LASV1000-NIG-2009;Clade II)__AIT17782__GPCmut10 (opt4)
aggagagucccgcagucggcguccagcggcucugcuuguucgugugugugucguugcaggccuuauucaagcuuaccaugggccagaucaucaccuucuuccaggaggugccccacgugaucgaggaggugaugaacaucgugcugaucgcccugagccugcuggccauccugaagggcaucuacaacguggccaccugcggccuguucggccuggugagcuuccugcugcugugcggcagaagcugcagcaccaccuacaagggcguguacgagcugcagacccuggagcuggacauggccagccugaacaugugcaugccccugagcugcaccaagaacaacagccaccacuacaucauggugggcaacgagaccggccuggagcugacccugaccaacaccagcaucaucaaccacaaguucugcaaccugagcgacgcccacaagaagaaccuguacgaccacgcccugaugagcaucaucagcaccuuccaccugagcauccccaacuucaaccaguacgaggccaugagcugcgacuucaacggcggcaagaucagcgugcaguacaaccugagccacaccuacgccguggacgccgccaaccacugcggcaccaucgccaacggcgugcugcagaccuucaugagaauggccuggggcggcagcuacaucgcccuggacagcggcaagggcagcugggacugcaucaugaccagcuaccaguaccugaucauccagaacaccaccugggaggaccacugccaguucagcagacccagccccaucggcuaccugggccugcugagccagagaaccagagacaucuacaucagcagaagacugcugggcaccuucaccuggacccugagcgacagcgagggcaacgagacccccggcggcuacugccugaccagauggaugcugaucgaggccgagcugaagugcuucggcaacaccgccguggccaagugcaacgagaagcacgacgaggaguucugcgacaugcugagacuguucgacuucugcaagcaggccaucaagagacugaagaccgaggcccagaugagcauccagcugaucaacaaggccgugaacgcccugaucaacgaccagcugaucaugaagaaccaccugagagacaucaugggcauccccuacugcaacuacagcaaguacugguaccugaaccacaccgugaccggcaagaccagccugcccagaugcuggcuggugagcaacggcagcuaccugaacgagacccacuucagcgacgacaucgagcagcaggccgacaacaugaucaccgagcugcugcagaaggaguacaucgacagacagggcaagaccccccugggccugguggaccuguucguguucagcaccagcuucuaccugaucagcaucuuccugcaccuggugaagauccccacccacagacacguggugggcaagcccugccccaagccccacagacugaaccacaugggcaucugcagcugcggccuguacaagcaccccggcgugcccgugaaguggaagagaugaggacuaguaauaaggaaacuguaugaaugucugugggcaggaagugaagagauccuucuguaaagguuuuuggaauuaugucugcugaauaauaaacuuuuuugaaauaauaaaucugguagaaaaaugagaucucaaaggcucuuuucagagccaccaaaaaaaaaaaaaaaaaaaaaaaaaaaaaaaaaaaaaaaaaaaaaaaaaaaaaaaaaaaaaaaaaaaaaaaaaaaaaaaaaaaaaaaaaaaaaaaaaaaaa

SEQ ID NO: 37654 - RNA, 1809 nt, Artificial Sequence
  mRNA product Design b-4 (hSL-A100) comprising derived and/or modified sequence from LASV(LASV221-NIG-2010;Clade II)__AIT17624__GPCmut10 (opt4)
aggagagucccgcagucggcguccagcggcucugcuuguucgugugugugucguugcaggccuuauucaagcuuaccaugggccagaucaucaccuucuuccaggaggugccccacgugaucgaggaggugaugaacaucgugcugaucgcccugagccugcuggccauccugaagggcaucuacaacguggccaccugcggccuguucggccuggugagcuuccugcugcugugcggcagaagcugcagcaccaccuacaagggcguguacgagcugcagacccuggagcuggacauggccagccugaacaugugcaugccccugagcugcaccaagaacaacagccaccacuacaucauggugggcaacgagaccggccuggagcugacccugaccaacaccagcaucaucaaccacaaguucugcaaccugagcgacgcccacaagaagaaccuguacgaccacgcccugaugagcaucaucagcaccuuccaccugagcauccccaacuucaaccaguacgaggccaugagcugcgacuucaacggcggcaagaucagcgugcaguacaaccugagccacaccuacgccaucgacgccgccaaccacugcggcaccaucgccaacggcgugcugcagaccuucaugagaauggccuggggcggcagcuacaucgcccuggacagcggcaagggcagcugggacugcaucaugaccagcuaccaguaccugaucauccagaacaccaccugggaggaccacugccaguucagcagacccagccccaucggcuaccugggccugcugagccagagaaccagagacaucuacaucagcagaagacugcugggcaccuucaccuggacccugagcgacagcgagggcaacgagacccccggcggcuacugccugaccagauggaugcugaucgaggccgagcugaagugcuucggcaacaccgccguggccaagugcaacgagaagcacgacgaggaguucugcgacaugcugagacuguucgacuucugcaagcaggccaucagaagacugaagaccgaggcccagaugagcauccagcugaucaacaaggccgugaacgcccugaucaacgaccagcugaucaugaagaaccaccugagagacaucaugggcauccccuacugcaacuacagcaaguacugguaccugaaccacaccgugaccggcaagaccagccugcccagaugcuggcuggugagcaacggcagcuaccugaacgagacccacuucagcgacgacaucgagcagcaggccgacaacaugaucaccgagaugcugcagaaggaguacauggacagacagggcaagaccccccugggccugguggaccuguucguguucagcaccagcuucuaccugaucagcaucuuccugcaccuggugaagauccccacccacagacacgugaucggcaagcccugccccaagccccacagacugaaccacaugggcaucugcagcugcggccuguacaagcaccccggcgugcccgugaaguggaagagaugaggacuaguaauaaggaaacuguaugaaugucugugggcaggaagugaagagauccuucuguaaagguuuuuggaauuaugucugcugaauaauaaacuuuuuugaaauaauaaaucugguagaaaaaugagaucucaaaggcucuuuucagagccaccaaaaaaaaaaaaaaaaaaaaaaaaaaaaaaaaaaaaaaaaaaaaaaaaaaaaaaaaaaaaaaaaaaaaaaaaaaaaaaaaaaaaaaaaaaaaaaaaaaaaa

SEQ ID NO: 37655 - RNA, 1809 nt, Artificial Sequence
  mRNA product Design b-4 (hSL-A100) comprising derived and/or modified sequence from LASV(LASV237-NIG-2010;Clade II)__AIT17638__GPCmut10 (opt4)
aggagagucccgcagucggcguccagcggcucugcuuguucgugugugugucguugcaggccuuauucaagcuuaccaugggccagaucaucaccuucuuccaggaggugccccacgugaucgaggaggugaugaacaucgugcugaucgcccugagccugcuggccauccugaagggcaucuacaacguggccaccugcggccuguucggccuggugagcuuccugcugcugugcggcagaagcugcagcaccaccuacaagggcguguacgagcugcagacccuggagcuggacauggccagccugaacaugugcaugccccugagcugcaccaagaacaacagccaccacuacaucauggugggcaacgagaccggccuggagcugacccugaccaacaccagcaucaucaaccacaaguucugcaaccugagcgacgcccacaagaaggaccuguacgaccacgcccugaugagcaucaucagcaccuuccaccugagcauccccaacuucaaccaguacgaggccaugagcugcgacuucaacggcggcaagaucagcgugcaguacaaccugagccacaccuacgccguggacgccgccaaccacugcggcaccaucgccaacggcgugcugcagaccuucaugagaauggccuggggcggcagcuacaucgcccuggacagcggcaagggcagcugggacugcaucaugaccagcuaccaguaccugaucauccagaacaccaccugggaggaccacugccaguucagcagacccagccccaucggcuaccugggccugcugagccagagaaccagagacaucuacaucagcagaagacugcugggcaccuucaccuggacccugagcgacagcgagggcaacgagacccccggcggcuacugccugaccagauggaugcugaucgaggccgagcugaagugcuucggcaacaccgccguggccaagugcaacgagaagcacgacgaggaguucugcgacaugcugagacuguucgacuucugcaagcaggccaucagaagacugaagaccgaggcccagaugagcauccagcugaucaacaaggccgugaacgcccugaucaacgaccagcugaucaugaagaaccaccugagagacaucaugggcauccccuacugcaacuacagcaaguacugguaccugaaccacaccgugaccggcaagaccagccugcccagaugcuggcuggugagcaacggcagcuaccugaacgagacccacuucagcgacgacaucgagcagcaggccgacaacaugaucaccgagcugcugcagaaggaguacauggacagacagggcaagaccccccugggccugguggaccuguucguguucagcaccagcuucuaccugaucagcaucuuccugcaccugaucaagauccccacccacagacacaucaccggcaagcccugccccaagccccacagacugaaccacaugggcaucugcagcugcggccuguacaagcaccccggcgugcccgugaaguggaagagaugaggacuaguaauaaggaaacuguaugaaugucugugggcaggaagugaagagauccuucuguaaagguuuuuggaauuaugucugcugaauaauaaacuuuuuugaaauaauaaaucugguagaaaaaugagaucucaaaggcucuuuucagagccaccaaaaaaaaaaaaaaaaaaaaaaaaaaaaaaaaaaaaaaaaaaaaaaaaaaaaaaaaaaaaaaaaaaaaaaaaaaaaaaaaaaaaaaaaaaaaaaaaaaaaa

SEQ ID NO: 37656 - RNA, 1809 nt, Artificial Sequence
  mRNA product Design b-4 (hSL-A100) comprising derived and/or modified sequence from LASV(LASV253-NIG-2011;Clade II)__AIT17670__GPCmut10 (opt4)
aggagagucccgcagucggcguccagcggcucugcuuguucgugugugugucguugcaggccuuauucaagcuuaccaugggccagaucaucaccuucuuccaggaggugccccacgugaucgaggaggugaugaacaucgugcugaucgcccugagccugcuggccauccugaagggcaucuacaacguggccaccugcggccuguucggccuggugagcuuccugcugcugugcggcagaagcugcagcaccaccuacaagggcguguacgagcugcagacccuggagcuggacauggccagccugaacaugugcaugccccugagcugcaccaagaacaacagccaccacuacaucauggugggcaacgagaccggccuggagcugacccugaccaacaccagcaucaucaaccacaaguucugcaaccugagcgacgcccacaagaagaaccuguacgaccacgcccugaugagcaucaucagcaccuuccaccugagcauccccaacuucaaccaguacgaggccaugagcugcgacuucaacggcggcaagaucagcgugcaguacaaccugagccacaccuacgccguggacgccgccaaccacugcggcaccaucgccaacggcgugcugcagaccuucaugagaauggccuggggcggcagcuacaucgcccuggacagcggcaagggcagcugggacugcaucaugaccagcuaccaguaccugaucauccagaacaccaccugggaggaccacugccaguucagcagacccagccccaucggcuaccugggccugcugagccagagaaccagagacaucuacaucagcagaagacugcugggcaccuucaccuggacccugagcgacagcgagggcaacgagacccccggcggcuacugccugaccagauggaugcugaucgaggccgagcugaagugcuucggcaacaccgccguggccaagugcaacgagaagcacgacgaggaguucugcgacaugcugagacuguucgacuucugcaagcaggccaucagaagacugaaggccgaggcccagaugagcauccagcugaucaacaaggccgugaacgcccugaucaacgaccagcugaucaugaagaaccaccugagagacaucaugggcauccccuacugcaacuacagcaaguacugguaccugaaccacaccgugaccggcagaaccagccugcccagaugcuggcuggugagcaacggcagcuaccugaacgagacccacuucagcgacgacaucgagcagcaggccgacaacaugaucaccgagcugcugcagaaggaguacaucgacagacagggcaagaccccccugggccugguggaccuguucguguucagcaccagcuucuaccugaucagcaucuuccugcaccuggugaagauccccacccacagacacaucaucggcaagcccugccccaagccccacagacugaaccacaugggcaucugcagcugcggccuguacaagcaccccggcgugcccgugaaguggaagagaugaggacuaguaauaaggaaacuguaugaaugucugugggcaggaagugaagagauccuucuguaaagguuuuuggaauuaugucugcugaauaauaaacuuuuuugaaauaauaaaucugguagaaaaaugagaucucaaaggcucuuuucagagccaccaaaaaaaaaaaaaaaaaaaaaaaaaaaaaaaaaaaaaaaaaaaaaaaaaaaaaaaaaaaaaaaaaaaaaaaaaaaaaaaaaaaaaaaaaaaaaaaaaaaaa

SEQ ID NO: 37657 - RNA, 1809 nt, Artificial Sequence
  mRNA product Design b-4 (hSL-A100) comprising derived and/or modified sequence from LASV(LASV254-NIG-2011;Clade II)__AIT17674__GPCmut10 (opt4)
aggagagucccgcagucggcguccagcggcucugcuuguucgugugugugucguugcaggccuuauucaagcuuaccaugggccagaucaucaccuucuuccaggaggugccccacgugaucgaggaggugaugaacaucgugcugaucgcccugagccugcuggccauccugaagggcaucuacaacguggccaccugcggccuguucggccuggugagcuuccugcugcugugcggcagaagcugcagcaccaccuacaagggcguguacgagcugcagacccuggagcuggacaugaccaaccugaacaugugcaugccccugagcugcaccaagaacaacagccaccacuacaucauggugggcaacgagaccggccuggagcugacccugaccaacaccagcaucaucaaccacaaguucugcaaccugagcgacgcccacaagaagaaccuguacaaccacgcccugaugagcaucaucagcaccuuccaccugagcauccccaacuucaaccaguacgaggccaugagcugcgacuucaacggcggcaagaucagcgugcaguacaaccugagccacagcuacgccguggacgccgccaaccacugcggcaccaucgccaacggcgugcugcagaccuucaugagaauggccuggggcggcagcuacaucgcccuggacagcggcaagggcaacugggacugcaucaugaccagcuaccaguaccugaucauccagaacaccaccugggaggaccacugccaguucagcagacccagccccaucggcuaccugggccugcugagccagagaaccagagacaucuacaucagcagaagacugcugggcaccuucaccuggacccugagcgacagcgagggcaacgagacccccggcggcuacugccugaccagauggaugcugaucgaggccgagcugaagugcuucggcaacaccgccguggccaagugcaacgagaagcacgacgaggaguucugcgacaugcugagacuguucgacuucugcaagcaggccaucagaagacugaagaccgaggcccaggccaacauccagcugaucaacaaggccgugaacgcccugaucaacgaccagcugaucaugaagaaccaccugagagacaucaugggcauccccuacugcaacuacagcaaguacugguaccugaaccacaccgugaccggcaagaccagccugcccagaugcuggcuggugagcaacggcagcuaccugaacgagacccacuucagcgacgacaucgagcagcaggccgacaacaugaucaccgagcugcugcagaaggaguacauggacagacagggcaagaccccccugggccugguggaccuguucguguucagcaccagcuucuaccugaucagcaucuuccugcaccuggugaagauccccacccacagacacgugaucggcaagcccugccccaagccccacagacugaaccacaugggcaucugcagcugcggccuguacaagcaccccggcgugcccgugaaguggaagagaugaggacuaguaauaaggaaacuguaugaaugucugugggcaggaagugaagagauccuucuguaaagguuuuuggaauuaugucugcugaauaauaaacuuuuuugaaauaauaaaucugguagaaaaaugagaucucaaaggcucuuuucagagccaccaaaaaaaaaaaaaaaaaaaaaaaaaaaaaaaaaaaaaaaaaaaaaaaaaaaaaaaaaaaaaaaaaaaaaaaaaaaaaaaaaaaaaaaaaaaaaaaaaaaaa

SEQ ID NO: 37658 - RNA, 1809 nt, Artificial Sequence
  mRNA product Design b-4 (hSL-A100) comprising derived and/or modified sequence from LASV(Nig08-A19;Clade III)__ADU56618__GPCmut10 (opt4)
aggagagucccgcagucggcguccagcggcucugcuuguucgugugugugucguugcaggccuuauucaagcuuaccaugggccagaucgugaccuucuuccaggaggugccccacgugaucgaggaggugaugaacaucgugcugaucgcccugagcauccuggccauccugaagggccuguacaacaucgccaccugcggccugaucggccuggugaccuuccugcugcugagcggcagaagcugcagcaugaccuacaagggcguguacgagcugcagacccuggagcugaacaugaacacccugaacaugugcaugccccugagcugcaccaagaacaacagccaccacuacaucauggugggcaacgagaccggccuggagcugacccugaccaacaccagccugcugcaccacaaguucugcaaccugagcgacgcccacaagaagaaccuguacgaccacacccugaugagcaucaucagcaccuuccaccugagcauccccaacuucaaccaguacgaggccaugagcugcgacuucaacggcggcaagaucaccgugcaguacaaccugagccacagcuacgccaucgacgccgccaaccacugcggcaccguggccaacggcgugcugcagaccuucaugagaauggccuggggcggcagcuacaucgcccuggacagcggcagaggcaagugggacugcaucaugaccagcuaccaguaccugaucauccagaacaccaccugggaggaccacugccaguucagcagacccagccccaucggcuaccugggccugcugagccagagaaccagagacaucuacaucagcagaagacugcugggcaccuucaccuggacccugagcgacagcgagggcaacgagacccccggcggcuacugccugaccagauggaugcugaucgaggccgagcugaagugcuucggcaacaccgccguggccaagugcaacgagaagcacgacgaggaguucugcgacaugcugagacuguucgacuucugcaagcaggccaucagaagacugaaggccgaggcccagaugagcauccagcugaucaacaaggccgugaacgcccugaucaacgaccagcugaucaugaagaaccaccugagagacaucaugggcauccccuacugcaacuacagcaaguacugguaccugaaccacaccagcaccggcagaaccagccugcccagaugcuggcuggugagcaacggcagcuaccugaacgagacccacuucagcgacgacaucgagcagcaggccgacaacaugaucaccgagaugcugcagaaggaguaccuggacagacagggcaagaccccccugggccugguggaccuguucguguucagcaccagcuucuaccugaucagcaucuuccugcaccuggugaagauccccacccacagacacaucgugggcaagcccugccccaagccccacagacugaaccacaugggcaucugcagcugcggccuguacaagcagcccggcgugcccgugagauggaagagaugaggacuaguaauaaggaaacuguaugaaugucugugggcaggaagugaagagauccuucuguaaagguuuuuggaauuaugucugcugaauaauaaacuuuuuugaaauaauaaaucugguagaaaaaugagaucucaaaggcucuuuucagagccaccaaaaaaaaaaaaaaaaaaaaaaaaaaaaaaaaaaaaaaaaaaaaaaaaaaaaaaaaaaaaaaaaaaaaaaaaaaaaaaaaaaaaaaaaaaaaaaaaaaaaa

SEQ ID NO: 37659 - RNA, 1812 nt, Artificial Sequence
  mRNA product Design b-4 (hSL-A100) comprising derived and/or modified sequence from LASV(G1180-SLE-2010;Clade IV)__AIT17168__GPCmut10 (opt4)
aggagagucccgcagucggcguccagcggcucugcuuguucgugugugugucguugcaggccuuauucaagcuuaccaugggccagaucgugaccuucuuccaggaggugccccacgugaucgaggaggugaugaacaucgugcugaucgcccugagcauccuggccgugcugaagggccuguacaacuucgccaccugcggccuggugggccugcugaccuuccugcugcugugcggcagaagcugcaccgccagcagauacaagggcguguacgagcugcagacccuggagcugaacauggagacccugaacaugugcaugccccugagcugcaccaagaacaacagccaccacuacaucauggugggcaacgagaccggccuggagcugacccugaccaacaccagcaucaucaaccacaaguucugcaaccugagcgacgcccacaagaagaaccuguacgaccacgcccugaugagcaucaucagcaccuuccaccugagcauccccaacuucaaccaguacgaggccaugagcugcgacuucaacggcggcaagaucagcgugcaguacaaccugagccacagcuacgccggcgacgccgccaaccacugcggcaccguggccaacggcgugcugcagaccuucaugagaauggccuggggcggcagcuacaucgcccuggacagcggccacggcagcugggacugcaucaugaccagcuaccaguaccugaucauccagaacaccaccugggaggaccacugccaguucagcagacccagccccaucggcuaccugggccugcugagccagagaaccagagacaucuacaucagcagaagacugcugggcaccuucaccuggacccugagcgacagcgagggcaaggacacccccggcggcuacugccugaccagauggaugcugaucgaggccgagcugaagugcuucggcaacaccgccguggccaagugcaacgagaagcacgacgaggaguucugcgacaugcugagacuguucgacuucugcaagcaggccauccagagacugaaggccgaggcccagaugagcauccagcugaucaacaaggccgugaacgcccugaucaacgaccagcugaucaugaagaaccaccugagagacaucaugggcauccccuacugcaacuacagcaaguacugguaccugaaccacaccaccaccggcaagaccagccugcccaagugcuggcuggugagcaacggcagcuaccugaacgagacccacuucagcgacgacaucgagcagcaggccgacaacaugaucaccgagaugcugcagaaggaguacauggagagacagggcaagaccccccugggccugguggaccuguucguguucagcaccagcuucuaccugaucagcaucuuccugcaccuggugaagauccccacccacagacacaucgugggcaagagcugccccaagccccacagacugaaccacaugggcaucugcagcugcggccuguacaagcagcccggcgugcccgugaaguggaagagaugaggacuaguaauaaggaaacuguaugaaugucugugggcaggaagugaagagauccuucuguaaagguuuuuggaauuaugucugcugaauaauaaacuuuuuugaaauaauaaaucugguagaaaaaugagaucucaaaggcucuuuucagagccaccaaaaaaaaaaaaaaaaaaaaaaaaaaaaaaaaaaaaaaaaaaaaaaaaaaaaaaaaaaaaaaaaaaaaaaaaaaaaaaaaaaaaaaaaaaaaaaaaaaaaa

SEQ ID NO: 37660 - RNA, 1812 nt, Artificial Sequence
  mRNA product Design b-4 (hSL-A100) comprising derived and/or modified sequence from LASV(G1442-SLE-2011;Clade IV)__AIT17180__GPCmut10 (opt4)
aggagagucccgcagucggcguccagcggcucugcuuguucgugugugugucguugcaggccuuauucaagcuuaccaugggccagaucgugaccuucuuccaggaggugccccacgugaucgaggaggugaugaacaucgugcugaucgcccugagcauccuggccgugcugaagggccuguacaacguggccaccugcggccugaucggccuggugaccuuccugcugcugugcggcagaagcugcaccaccacccuguacaagggcguguacgagcugcagacccuggagcugaacauggagacccugaacaugugcaugccccugagcugcaccaagaacaacagccaccacuacaucagagugggcaacgagaccggccuggagcugacccugaccaacaccagcaucaucaaccacaaguucugcaaccugagcgacgcccacaagaagaaccuguacgaccacgcccugaugagcaucaucagcaccuuccaccugagcauccccaacuucaaccaguacgaggccaugagcugcgacuucaacggcggcaagaucagcgugcaguacaaccugagccacagcuacgccggcgacgccgccaaccacugcggcaccguggccaacggcgugcugcagaccuucaugagaauggccuggggcggcagcuacaucgcccuggacagcggcagaggcaacugggacugcaucaugaccagcuaccaguaccugaucauccagaacaccaccugggacgaccacugccaguucagcagacccagccccaucggcuaccugggccugcugagccagagaaccagagacguguacaucagcagaagacugcugggcaccuucaccuggacccugagcgacagcgagggcaaggacacccccggcggcuacugccugaccagauggaugcugaucgaggccgagcugaagugcuucggcaacaccgccguggccaagugcaacgagaagcacgacgaggaguucugcgacaugcugagacuguucgacuucugcaagcaggccauccagagacugaaggccgaggcccagaugagcauccagcugaucaacaaggccgugaacgcccugaucaacgaccagcugaucaugaagaaccaccugagagacaucaugggcauccccuacugcaacuacagcaaguacugguaccugaacaacaccgccaccggcaagaccagccugcccaagugcuggcugaucagcaacggcagcuaccugaacgagacccacuucagcgacgacaucgagcaggaggccgacaacaugaucaccgagaugcugcagaaggaguacauggagagacagggcaagaccccccugggccugguggaccuguucguguucagcaccagcuucuaccugaucagcaucuuccugcaccuggugaagauccccacccacagacacaucgugggcaagagcugccccaagccccacagacugaaccacaugggcaucugcagcugcggccuguacaagcagcccggcgugcccgugagauggaagagaugaggacuaguaauaaggaaacuguaugaaugucugugggcaggaagugaagagauccuucuguaaagguuuuuggaauuaugucugcugaauaauaaacuuuuuugaaauaauaaaucugguagaaaaaugagaucucaaaggcucuuuucagagccaccaaaaaaaaaaaaaaaaaaaaaaaaaaaaaaaaaaaaaaaaaaaaaaaaaaaaaaaaaaaaaaaaaaaaaaaaaaaaaaaaaaaaaaaaaaaaaaaaaaaaa

SEQ ID NO: 37661 - RNA, 1812 nt, Artificial Sequence
  mRNA product Design b-4 (hSL-A100) comprising derived and/or modified sequence from LASV(G3010-SLE-2013;Clade IV)__AIT17344__GPCmut10 (opt4)
aggagagucccgcagucggcguccagcggcucugcuuguucgugugugugucguugcaggccuuauucaagcuuaccaugggccagaucgugaccuucuuccaggaggugccccacgugaucgaggaggugaugaacaucgugcugaucgcccugagcauccuggccgugcugaagggccuguacaacuucgccaccugcggccuggugggccuggugaccuuccugcugcugugcggcagaagcugcaccaccagccuguacaagggcguguacgagcugcagacccuggagcugaacauggagacccugaacaugugcaugccccugagcugcaccaagaacaacagccaccacuacaucauggugggcaacgagaccggccuggagcugacccugaccaacaccagcaucaucaaccacaaguucugcaaccugagcgacgcccacaagaagaaccuguacaaccacgcccugaugagcaucaucagcaccuuccaccugagcauccccaacuucaaccaguacgaggccaugagcugcgacuucaacggcggcaagaucagcgugcaguacaaccugagccacagcuacgccggcgacgccgccagccacugcggcaccguggccaacggcgugcugcagaccuucaugagaauggccuggggcggcagcuacaucgcccuggacagcggcuacggcaagugggacugcaucaugaccagcuaccaguaccugaucauccagaacaccaccugggaggaccacugccaguucagcagacccagccccaucggcuaccugggccugcugagccagagaaccagagacaucuacaucagcagaagacugcugggcaccuucaccuggacccugagcgacagcgagggcaaggacacccccggcggcuacugccugaccagauggaugcugaucgaggccgagcugaagugcuucggcaacaccgccguggccaagugcaacgagaagcacgacgaggaguucugcgacaugcugagacuguucgacuucugcaagcaggccauccagagacugaagaccgaggcccagaugagcauccagcugaucaacaaggccgugaacgcccugaucaacgaccagcugaucaugaagaaccaccugagagacaucaugggcauccccuacugcaacuacagcaaguacugguaccugaaccacaccaccaccggcaagaccagccugcccaagugcuggcuggugagcaacggcagcuaccugaacgagacccacuucagcgacgacaucgagcagcaggccgacaacaugaucaccgagaugcugcagaaggaguacauggagagacagggcaagaccccccugggccugguggaccuguucguguucagcaccagcuucuaccugaucagcaucuuccugcaccuggugaagauccccacccacagacacaucgugggcaagagcugccccaagccccacagacugaaccacaugggcaucugcagcugcggccuguacaagcagcccggcgugcccgugagauggaagagaugaggacuaguaauaaggaaacuguaugaaugucugugggcaggaagugaagagauccuucuguaaagguuuuuggaauuaugucugcugaauaauaaacuuuuuugaaauaauaaaucugguagaaaaaugagaucucaaaggcucuuuucagagccaccaaaaaaaaaaaaaaaaaaaaaaaaaaaaaaaaaaaaaaaaaaaaaaaaaaaaaaaaaaaaaaaaaaaaaaaaaaaaaaaaaaaaaaaaaaaaaaaaaaaaa

SEQ ID NO: 37662 - RNA, 1812 nt, Artificial Sequence
  mRNA product Design b-4 (hSL-A100) comprising derived and/or modified sequence from LASV(G502-SLE-2009;Clade IV)__AIT17126__GPCmut10 (opt4)
aggagagucccgcagucggcguccagcggcucugcuuguucgugugugugucguugcaggccuuauucaagcuuaccaugggccagaucgugaccuucuuccaggaggugccccacgugaucgaggaggugaugaacaucgugcugaucgcccugagcauccuggccgugcugaagggccuguacaacuucgccaccugcggccuggugggccugcugaccuuccugcugcugugcggcagaagcugcaccaccggccuguacaagggcguguacgagcugcagacccuggagcugaacauggagacccugaacaugugcaugccccugagcugcaccaagaacaacagccaccacuacaucauggugggcaacgagaccggccuggagcugacccugaccaacaccagcaucaucaaccacaaguucugcaaccugagcgacgcccacaagaagaaccuguacgaccacgcccugaugagcaucaucagcaccuuccaccugagcauccccaacuucaaccaguacgaggccaugagcugcgacuucaacggcggcaagaucagcgugcaguacaaccugagccacagcuacgccggcgacgccgccgaccacugcggcaccguggccaacggcgugcugcagaccuucaugagaauggccuggggcggcagcuacaucgcccuggacagcggcagaggcagaugggacugcaucaugaccagcuaccaguaccugaucauccagaacaccaccugggaggaccacugccaguucagcagacccagccccaucggcuaccugggccugcugagccagagaaccagagacaucuacaucagcagaagacugcugggcaccuucaccuggacccugagcgacagcgagggcaaggacacccccggcggcuacugccugaccagauggaugcugaucgaggccgagcugaagugcuucggcaacaccgccguggccaagugcaacgagaagcacgacgaggaguucugcgacaugcugagacuguucgacuucugcaagcaggccauccagagacugaaggccgaggcccagaugagcauccagcugaucaacaaggccgugaacgcccugaucaacgaccagcuggugaugaagaaccaccugagagacaucaugggcauccccuacugcaacuacagcagauacugguaccugaaccacaccaccaccggcagaaccagccugcccaagugcuggcuggugagcaacggcagcuaccugaacgagacccacuucagcgacgacaucgagcagcaggccgacaacaugaucaccgagaugcugcagaaggaguacauggagagacagggcaagaccccccugggccugguggaccuguucguguucagcaccagcuucuaccugaucagcaucuuccugcaccuggugaagauccccacccacagacacaucgugggcaagagcugccccaagccccacagacugaaccacaugggcaucugcagcugcggccuguacaagcagcccggcgugcccgugaaguggaagagaugaggacuaguaauaaggaaacuguaugaaugucugugggcaggaagugaagagauccuucuguaaagguuuuuggaauuaugucugcugaauaauaaacuuuuuugaaauaauaaaucugguagaaaaaugagaucucaaaggcucuuuucagagccaccaaaaaaaaaaaaaaaaaaaaaaaaaaaaaaaaaaaaaaaaaaaaaaaaaaaaaaaaaaaaaaaaaaaaaaaaaaaaaaaaaaaaaaaaaaaaaaaaaaaaa

SEQ ID NO: 37663 - RNA, 1812 nt, Artificial Sequence
  mRNA product Design b-4 (hSL-A100) comprising derived and/or modified sequence from LASV(G733-SLE-2010;Clade IV)__AIT17154__GPCmut10 (opt4)
aggagagucccgcagucggcguccagcggcucugcuuguucgugugugugucguugcaggccuuauucaagcuuaccaugggccagaucgugaccuucuuccaggaggugccccacgugaucgaggaggugaugaacaucgugcugaucgcccugagcauccuggccgugcugaagggccuguacaacuucgccaccugcggcaucgugggccuggugagcuuccugcugcugugcggcagaagcugcaccaccagccuguacaagggcguguacgagcugcagacccuggagcugaacauggagacccugaacaugugcaugccccugagcugcaccaagaacaacagccaccacuacaucauggugggcaacgagaccggccuggagcugacccugaccaacaccagcaucaucaaccacaaguucugcaaccugagcgacgcccacaagaagaaccuguacgaccacgcccugaugagcaucaucagcaccuuccaccugagcauccccaacuucaaccaguacgaggccaugagcugcgacuucaacggcggcaagaucagcgugcaguacaaccugagccacagcuacgccggcgacgccgccaaccacugcggcaccaucgccaacggcgugcugcagaccuucaugagaauggccuggggcggcagcuacaucgcccuggacagcggcagagacagaugggacugcaucaugaccagcuaccaguaccugaucauccagaacaccaccugggaggaccacugccaguucagcagacccagccccaucggcuaccugggccugcugagccagagaaccagagacaucuacaucagcagaagacugcugggcaccuucaccuggacccugagcgacagcgagggcaaggacacccccggcggcuacugccugaccagauggaugcugaucgaggccgagcugaagugcuucggcaacaccgccguggccaagugcaacgagaagcacgacgaggaguucugcgacaugcugagacuguucgacuucugcaagcaggccauccagagacugaaggccgaggcccagaugagcauccagcugaucaacaaggccgugaacgcccugaucaacgaccagcugaucaugaagaaccaccugagagacaucaugggcauccccuacugcaacuacagcaaguacugguaccugaaccacaccaccaccggcaagaccagccugcccaagugcuggcuggugagcaacggcagcuaccugaacgagacccacuucagcgacgacaucgagcagcaggccgacaacaugaucaccgagaugcugcagaaggaguacauggagagacagggcaagaccccccugggccugguggaccuguucguguucagcaccagcuucuaccugaucagcaucuuccugcaccuggugaagauccccacccacagacacguggugggcaagagcugccccaagccccacagacugaaccacaugggcaucugcagcugcggccuguacggccagcccggcgugcccgugaaguggaagagaugaggacuaguaauaaggaaacuguaugaaugucugugggcaggaagugaagagauccuucuguaaagguuuuuggaauuaugucugcugaauaauaaacuuuuuugaaauaauaaaucugguagaaaaaugagaucucaaaggcucuuuucagagccaccaaaaaaaaaaaaaaaaaaaaaaaaaaaaaaaaaaaaaaaaaaaaaaaaaaaaaaaaaaaaaaaaaaaaaaaaaaaaaaaaaaaaaaaaaaaaaaaaaaaaa

SEQ ID NO: 37664 - RNA, 1812 nt, Artificial Sequence
  mRNA product Design b-4 (hSL-A100) comprising derived and/or modified sequence from MOPV/LASV reassortant(IGS-1;Clade IV)__AFY05576__GPCmut10 (opt4)
aggagagucccgcagucggcguccagcggcucugcuuguucgugugugugucguugcaggccuuauucaagcuuaccaugggccagaucgugaccuucuuccaggaggugccccacgugaucgaggaggugaugaacaucgugcugaucgcccugagcgugcuggccgugcugaagggccuguacaacuucgccaccugcggccuggugggccuggugaccuuccugcugcugugcggcagaagcugcaccaccagccuguacaagggcguguacgagcugcagacccuggagcugaacauggagacccugaacaugugcaugccccugagcugcaccaagaacaacagccaccacuacaucauggugggcaacgagaccggccuggagcugacccugaccaacaccagcaucaucaaccacaaguucugcaaccugagcgacgcccacaagaagaaccuguacgaccacgcccugaugagcaucaucagcaccuuccaccugagcauccccaacuucaaccaguacgaggccaugagcugcgacuucaacggcggcaagaucagcgugcaguacaaccugagccacagcuacgccggcgacgccgccaaccacugcggcaccguggccaacggcgugcugcagaccuucaugagaauggccuggggcggcagcuacaucgcccuggacagcggcagaggcaacugggacugcaucaugaccagcuaccaguaccugaucauccagaacaccaccugggaggaccacugccaguucagcagacccagccccaucggcuaccugggccugcugagccagagaaccagagacaucuacaucagcagaagacugcugggcaccuucaccuggacccugagcgacagcgagggcgaggacacccccggcggcuacugccugaccagauggaugcugaucgaggccgagcugaagugcuucggcaacaccgccguggccaagugcaacgagaagcacgacgaggaguucugcgacaugcugagacuguucgacuucugcaagcaggccauccagagacugaaggccgaggcccagaugagcauccagcugaucaacaaggccgugaacgcccugaucaacgaccagcugaucaugaagaaccaccugagagacaucaugggcauccccuacugcaacuacagcaaguacugguaccugaaccacaccaccaccggcagaaccagccugcccaagugcuggcuggugagcaacggcagcuaccugaacgagacccacuucagcgacgacaucgagcagcaggccgacaacaugaucaccgagaugcugcagaaggaguacauggagagacagggcaagaccccccugggccugguggaccuguucguguucagcaccagcuucuaccugaucagcaucuuccugcaccuggugaagauccccacccacagacacaucgugggcaagagcugccccaagccccacagacugaaccacaugggcaucugcagcugcggccuguacaagcagcccggcgugcccgugaaguggaagagaugaggacuaguaauaaggaaacuguaugaaugucugugggcaggaagugaagagauccuucuguaaagguuuuuggaauuaugucugcugaauaauaaacuuuuuugaaauaauaaaucugguagaaaaaugagaucucaaaggcucuuuucagagccaccaaaaaaaaaaaaaaaaaaaaaaaaaaaaaaaaaaaaaaaaaaaaaaaaaaaaaaaaaaaaaaaaaaaaaaaaaaaaaaaaaaaaaaaaaaaaaaaaaaaaa

SEQ ID NO: 37665 - RNA, 1812 nt, Artificial Sequence
  mRNA product Design b-4 (hSL-A100) comprising derived and/or modified sequence from LASV(LM765-SLE-2012;Clade IV)__AIT17814__GPCmut10 (opt4)
aggagagucccgcagucggcguccagcggcucugcuuguucgugugugugucguugcaggccuuauucaagcuuaccaugggccagaucgugaccuucuuccaggaggugccccacgugaucgaggaggugaugaacaucgugcugaucgcccugagcauccuggccgugcugaagggccuguacaacuucgccaccugcggccuggugggccuggugaccuuccugcugcugugcggcagaagcugcaccaccagccuguacaagggcguguacgagcugcagacccuggagcugaacauggagacccugaacaugugcaugccccugagcugcaccaagaacaacagccaccacuacaucauggugggcaacgagaccggccuggagcugacccugaccaacaccagcaucaucgaccacaaguucugcaaccugagcgacgcccacagaaagaaccuguacgaccacgcccugaugagcaucaucagcaccuuccaccugagcauccccaacuucaaccaguacgaggccaugagcugcgacuucaacggcggcaagaucagcgugcaguacaaccugagccacagcuacgccaaggacgccgccgaccacugcggcaccguggccaacggcgugcugcagaccuucaugagaauggccuggggcggcagcuacaucgcccuggacagcggcagaggcagaugggacugcaucaugaccagcuaccaguaccugaucauccagaacaccaccugggaggaccacugccaguucagcagacccagccccaucggcuaccugggccugcugagccagagaaccagagacaucuacaucagcagaagacugcugggcaccuucaccuggacccugagcgacagcgagggcaaggacacccccggcggcuacugccugaccagauggaugcugaucgaggccgagcugaagugcuucggcaacaccgccguggccaagugcaacgagaagcacgacgaggaguucugcgacaugcugagacuguucgacuucugcaagcaggccauccagagacugaaggccgaggcccagaugagcauccagcugaucaacaaggccgugaacgcccugaucaacgaccagcugaucaugaagaaccaccugagagacaucaugggcauccccuacugcaacuacagcaaguacugguaccugaaccacaccaccaccggcaagaccagccugcccaagugcuggcuggugagcaacggcagcuaccugaacgagacccacuucagcgacgacaucgagcagcaggccgacaacaugaucaccgagaugcugcagaaggaguacauggagagacagggcaagaccccccugggccugguggaccuguucguguucagcaccagcuucuaccugaucagcaucuuccugcaccuggugaagauccccacccacagacacaucgugggcaagcccugccccaagccccacagacugaaccacaugggcaucugcagcugcggccuguacaagcagcccggcgugcccgugaaguggaagagaugaggacuaguaauaaggaaacuguaugaaugucugugggcaggaagugaagagauccuucuguaaagguuuuuggaauuaugucugcugaauaauaaacuuuuuugaaauaauaaaucugguagaaaaaugagaucucaaaggcucuuuucagagccaccaaaaaaaaaaaaaaaaaaaaaaaaaaaaaaaaaaaaaaaaaaaaaaaaaaaaaaaaaaaaaaaaaaaaaaaaaaaaaaaaaaaaaaaaaaaaaaaaaaaaa

SEQ ID NO: 37666 - RNA, 1812 nt, Artificial Sequence
  mRNA product Design b-4 (hSL-A100) comprising derived and/or modified sequence from LASV(LM776-SLE-2012;Clade IV)__AIT17824__GPCmut10 (opt4)
aggagagucccgcagucggcguccagcggcucugcuuguucgugugugugucguugcaggccuuauucaagcuuaccaugggccagaucgugaccuucuuccaggaggugccccacgugaucgaggaggugaugaacaucgugcugaucgcccugagcauccuggccgugcugaagggccuguacaacuucgccaccugcggccuggugggccuggugaccuuccugcugcugugcggcagaagcugcaccaccagcguguacaagggcguguacgagcugcagacccuggagcugaacauggagacccugaacaugugcaugccccugagcugcaccaagaacaacagccaccacuacaucauggugggcaacgagaccggccuggagcugacccugaccaacaccagcaucaucaaccacaaguucugcaaccugagcgacgcccacaagaagaaccuguacgaccacgcccugaugagcaucaucagcaccuuccaccugagcauccccaacuucaaccaguacgaggccaugagcugcgacuucaacggcggcaagaucagcgugcaguacaaccugagccacagcuacgccggcgacgccgccaaccacugcggcaccguggccaacggcgugcugcagaccuucaugagaauggccuggggcggcagcuacaucgcccuggacagcggccacggcaagugggacugcaucaugaccagcuaccaguaccugaucauccagaacaccaccugggaggaccacugccaguucagcagacccagccccaucggcuaccugggccugcugagccagagaaccagagacaucuacaucagcagaagacugcugggcaccuucaccuggacccugagcgacagcgagggcaaggacacccccggcggcuacugccugaccagauggaugcugaucgaggccgagcugaagugcuucggcaacaccgccguggccaagugcaacgagaagcacgacgaggaguucugcgacaugcugagacuguucgacuucugcaagcaggccauccagagacugaaggccgaggcccagaugagcauccagcugaucaacaaggccgugaacgcccugaucaacgaccagcugaucaugaagaaccaccugagagacaucaugggcauccccuacugcaacuacagcaaguacugguaccugaaccacaccaccaccggcaagaccagccugcccaagugcuggcuggugagcaacggcagcuaccugaacgagacccacuucagcgacgacaucgagcagcaggccgacaacaugaucaccgagaugcugcagaaggaguacauggagagacagggcaagaccccccugggccugguggaccuguucguguucagcaccagcuucuaccugaucagcaucuuccugcaccuggugaagauccccacccacagacacaucgugggcaagagcugccccaagccccacagacugaaccacaugggcaucugcagcugcggccuguacaagcagcccggcgugcccgugagauggaagagaugaggacuaguaauaaggaaacuguaugaaugucugugggcaggaagugaagagauccuucuguaaagguuuuuggaauuaugucugcugaauaauaaacuuuuuugaaauaauaaaucugguagaaaaaugagaucucaaaggcucuuuucagagccaccaaaaaaaaaaaaaaaaaaaaaaaaaaaaaaaaaaaaaaaaaaaaaaaaaaaaaaaaaaaaaaaaaaaaaaaaaaaaaaaaaaaaaaaaaaaaaaaaaaaaa

SEQ ID NO: 37667 - RNA, 1812 nt, Artificial Sequence
  mRNA product Design b-4 (hSL-A100) comprising derived and/or modified sequence from LASV(Mad39;Clade IV)__ANH09722__GPCmut10 (opt4)
aggagagucccgcagucggcguccagcggcucugcuuguucgugugugugucguugcaggccuuauucaagcuuaccaugggccagaucgugaccuucuuccaggaggugccccacgugaucgaggaggugaugaacaucgugcugaucgcccugagcauccuggccgugcugaagggccuguacaacguggccaccugcggccugaucggccuggugaccuuccugcugcugugcggcagaagcugcaccaccacccuguacaagggcguguacgagcugcaggcccuggagcugaacauggagacccugaacaugugcaugccccugagcugcaccaagaacaacagccaccacuacaucagagugggcaacgagaccggccuggagcugacccugaccaacaccagccugaucaaccacaaguucugcaaccugagcgacgcccacaagaagaaccuguacgaccacgcccugaugagcaucaucagcaccuuccaccugagcauccccaacuucaaccaguacgaggccaugagcugcgacuucaacgacggcaagaucagcgugcaguacaaccugagccacaccuacgccggcgacaccgccaaccacugcggcaccguggccaacggcgugcugcagaccuucaugagaauggccuggggcggcagcuacaucgcccuggacagcggcagaggcggcugggacugcaucaugaccagcuaccaguaccugaucauccagaacaccaccugggaggaccacugccaguucagcagacccagccccaucggcuaccugggccugcugagccagagaaccagagacaucuacaucagcagaagacugcugggcaccuucaccuggacccugagcgacagcgagggcaaggacacccccggcggcuacugccugaccagauggaugcugaucgaggccgagcugaagugcuucggcaacaccgccguggccaagugcaacgagaagcacgacgaggaguucugcgacaugcugagacuguucgacuucugcaagcaggccauccagagacugaaggccgaggcccagaugagcauccagcugaucaacaaggccgugaacgcccugaucaacgaccagcugaucaugaagaaccaccugagagacaucaugggcauccccuacugcaacuacagcaaguacugguaccugaaccacaccgugaccggcaagaccagccugcccaagugcuggcuggugagcaacggcagcuaccugaacgagacccacuucagcgacgacaucgagcagcaggccgacaacaugaucaccgagaugcugcagaaggaguacauggagagacagggcaagaccccccugggccugguggaccuguucguguucagcaccagcuucuaccugaucagcaucuuccugcaccuggugaagauccccacccacagacacguggugggcaagcccugccccaagccccacagacugaaccacaugggcaucugcagcugcggcuucuacaagcagcccggcgugcccgugagauggaagagaugaggacuaguaauaaggaaacuguaugaaugucugugggcaggaagugaagagauccuucuguaaagguuuuuggaauuaugucugcugaauaauaaacuuuuuugaaauaauaaaucugguagaaaaaugagaucucaaaggcucuuuucagagccaccaaaaaaaaaaaaaaaaaaaaaaaaaaaaaaaaaaaaaaaaaaaaaaaaaaaaaaaaaaaaaaaaaaaaaaaaaaaaaaaaaaaaaaaaaaaaaaaaaaaaa

SEQ ID NO: 37668 - RNA, 1812 nt, Artificial Sequence
  mRNA product Design b-4 (hSL-A100) comprising derived and/or modified sequence from LASV(Z0947-SLE-2011;Clade IV)__AIT17840__GPCmut10 (opt4)
aggagagucccgcagucggcguccagcggcucugcuuguucgugugugugucguugcaggccuuauucaagcuuaccaugggccagaucgugaccuucuuccaggaggugccccacgugaucgaggaggugaugaacaucgugcugaucgcccugagcauccuggccgugcugaagggccuguacaacuucgccaccugcggccuggugggccuggugaccuuccugcugcugugcggcagaagcugcaccaucagccuguacaagggcguguacgagcugcagacccuggagcugaacauggagacccugaacaugugcaugccccugagcugcaccaagaacaacagccaccacuacaucauggugggcaacgagaccggccuggagcugacccugaccaacaccagcaucaucaaccacaaguucugcaaccugagcgacgcccacaagaagaaccuguacgaccacgcccugaugagcaucaucagcaccuuccaccugagcauccccaacuucaaccaguacgaggccaugagcugcgacuucaacggcggcaagaucagcgugcaguacaaccugagccacagcuacgccggcgacgccgccaaccacugcggcaccguggccaacggcgugcugcagaccuucaugagaauggccuggggcggcagcuacaucgcccuggacagcggcagagacagaugggacugcaucaugaccagcuaccaguaccugaucauccagaacaccaccugggaggaccacugccaguucagcagacccagccccaucggcuaccugggccugcugagccagagaaccagagacaucuacaucagcagaagacugcugggcaccuucaccuggacccugagcgacagcgagggcaaggacacccccggcggcuacugccugaccagauggaugcugaucgaggccgagcugaagugcuucggcaacaccgccguggccaagugcaacgagaagcacgacgaggaguucugcgacaugcugagacuguucgacuucugcaagcaggccauccagagacugaaggccgaggcccagaugagcauccagcugaucaacaaggccgugaacgcccugaucaacgaccagcugaucaugaagaaccaccugagagacaucaugggcauccccuacugcaacuacagcaaguacugguaccugaaccacaccaccaccggcaagaccagccugcccaagugcuggcuggugagcaacggcagcuaccugaacgagacccacuucagcgacgacaucgagcagcaggccgacaacaugaucaccgagaugcugcagaaggaguacauggagagacagggcaagaccccccugggccugguggaccuguucguguucagcaccagcuucuaccugaucagcaucuuccugcaccuggugaagauccccacccacagacacaucgugggcaagcccugccccaagccccacagacugaaccacaugggcaucugcagcugcggccuguacaagcagcccggcgugcccgugaaguggaagagaugaggacuaguaauaaggaaacuguaugaaugucugugggcaggaagugaagagauccuucuguaaagguuuuuggaauuaugucugcugaauaauaaacuuuuuugaaauaauaaaucugguagaaaaaugagaucucaaaggcucuuuucagagccaccaaaaaaaaaaaaaaaaaaaaaaaaaaaaaaaaaaaaaaaaaaaaaaaaaaaaaaaaaaaaaaaaaaaaaaaaaaaaaaaaaaaaaaaaaaaaaaaaaaaaa

SEQ ID NO: 37669 - RNA, 1812 nt, Artificial Sequence
  mRNA product Design b-4 (hSL-A100) comprising derived and/or modified sequence from LASV(Josiah;Clade IV)__NP_694870__GPCmut10 (opt5)
aggagagucccgcagucggcguccagcggcucugcuuguucgugugugugucguugcaggccuuauucaagcuuaccaugggccagaucgugaccuucuuucaagaggucccccacguuauugaagaggugaugaacaucgugcugauugcccucagcguccuggcugugcuuaaggggcuguacaauuucgccacaugcggacucguuggccuggugacguuucuucugcucugugggagauccugcaccacaucucuguauaaaggagucuacgaacugcagacccucgagcugaacauggaaacacuuaauauguguaugccucugagcugcaccaagaacaauucccaucacuauaucauggugggcaacgagacagggcucgagcugacccuuacgaauaccucuauuaucaaccauaaauucuguaaucugagcgacgcgcacaagaaaaaccucuacgaucaugcucugauguccaucauuucuacauuucaccugagcaucccgaauuucaaccaguaugaagccauguccugcgacuuuaauggaggcaagauuagcguucaguacaaccucucucacuccuaugccggcgaugcugccaaucauugugggaccguggcuaacggaguccugcaaacauucaugcggauggccuggggcgggagcuacaucgcgcuugacucuggacgcggcaacugggauugcauuaugaccuccuaccaguaucugaucauucagaauacgacaugggaggaccacugucaguuuagcagacccucuccuaucggguaccucggacugcuuucccaacggacccgcgauaucuauauuagcagacggcugcucggcacauucaccuggacccuguccgacucugaaggcaaggauacacccgggggauacugccugacgcgcuggaugcucaucgaggccgagcugaaauguuuuggcaacaccgcuguggccaagugcaaugaaaaacaugacgaggaguucugcgauaugcuuagacuguuugacuucuguaagcaggcuauucagcggcucaaagccgaagcgcagaugagcauccaacugauuaacaaggccgugaaugcucuuaucaacgaucagcugaucaugaagaaucaccuccgcgacauuauggggaucccuuauugcaacuacuccaaauauugguaccugaaucacacaaccacaggaagaaccagccugcccaaguguuggcucgucucuaacggcuccuaccugaaugaaacgcauuucagcgacgauauugagcagcaagccgacaacaugaucacagagaugcuucagaaagaauauauggagcggcaggggaagaccccucugggacucguugaucuguuuguguucucuaccagcuuuuaccugauuuccaucuuccuucaccucgugaaaaucccgacacaucgccacauugucggcaagucuugccccaaaccucauagacugaaucacaugggcaucuguagcugcgggcuguauaagcagcccggagugccuguuaaguggaaacggugaggacuaguaauaaggaaacuguaugaaugucugugggcaggaagugaagagauccuucuguaaagguuuuuggaauuaugucugcugaauaauaaacuuuuuugaaauaauaaaucugguagaaaaaugagaucucaaaggcucuuuucagagccaccaaaaaaaaaaaaaaaaaaaaaaaaaaaaaaaaaaaaaaaaaaaaaaaaaaaaaaaaaaaaaaaaaaaaaaaaaaaaaaaaaaaaaaaaaaaaaaaaaaaaa

SEQ ID NO: 37670 - RNA, 1809 nt, Artificial Sequence
  mRNA product Design b-4 (hSL-A100) comprising derived and/or modified sequence from LASV(LP;Clade I)__AAF86701__GPCmut10 (opt5)
aggagagucccgcagucggcguccagcggcucugcuuguucgugugugugucguugcaggccuuauucaagcuuaccaugggccagaucauuaccuucuuucaagaggugccccacgucaucgaagagguuaugaacauugugcugaucgcccucagccugcuugcuauucugaaggggcucuacaauaucgccacaugcggaaucauuggccugguggcguuccuuuuucugugugggaaauccugcucucucacgcugaagggaggcuaugaacugcagacccucgagcugaacauggaaacacuuaauauguguaugccucugagcugcaccaaaaacuccucucaucacuacaucagagucgggaaugagacaggacucgagcugacccuuacaaacaccagcauuaucaaucauaaguucuguaaccuguccgacgcucacaaaaagaaucucuaugaucaugcccugaugucuauuaucagcacguuucaccuguccauuccgaacuucaaucaguacgaagccaugagcugcgacuuuaacggcggcaagaucucugugcaguauaaucucucccacagcuacgcuggggaugccgcugagcauuguggaaccguugccaacggcgugcugcaaacauucaugcggauggcguggggagggcgcuauaucgcccuugacucuggcaaagggaauugggauugcauuaugaccuccuaccaguaccugaucauucagaacacaaccugggaagaccacugucaguuuagcagacccucuccuaucggauaucucggccugcuuucccaacggacgcgcgauauuuacaucagcagacggcugcucggcacauucaccuggacacuguccgacucugaggggaacgagacccccggaggcuauugccugacccgcuggaugcucaucgaagcugagcugaaguguuuugggaauacagccgucgcuaaaugcaacgaaaagcaugaugaggaguucugcgacaugcuuagacuguuugauuucuguaaacaggccauucggcgccucaaggcggaagcccagaugagcauccagcugauuaauaaggcugugaacgcccuuaucaaugaccaacugauuaugaaaaaccaccucagagauaucaugggaaucccuuacugcaauuauuccaaguacugguaucugaaccacacgagcucuggccggaccucccugcccaaauguuggcucauuagcaaugggucuuaccugaacgagacacaguucagcgacgacaucgaacagcaagcugauaauaugauuaccgagaugcuucagaaggaauacaucgagcgccagggaaaaacaccucugggccucguugacauuuuuaucuucuccaccucuuuuuaucugauuagcaucuuccugcaucuuaucaagauuccgacgcacagacauaucgugggcaaacccugcccuaagccccaccggcucaaccauaugggggucuguuccugcggacuguacaagcacccuggcgugcccacaaaauggaagcgcugaggacuaguaauaaggaaacuguaugaaugucugugggcaggaagugaagagauccuucuguaaagguuuuuggaauuaugucugcugaauaauaaacuuuuuugaaauaauaaaucugguagaaaaaugagaucucaaaggcucuuuucagagccaccaaaaaaaaaaaaaaaaaaaaaaaaaaaaaaaaaaaaaaaaaaaaaaaaaaaaaaaaaaaaaaaaaaaaaaaaaaaaaaaaaaaaaaaaaaaaaaaaaaaaa

SEQ ID NO: 37671 - RNA, 1809 nt, Artificial Sequence
  mRNA product Design b-4 (hSL-A100) comprising derived and/or modified sequence from LASV(803213;Clade II)__AAF86703__GPCmut10 (opt5)
aggagagucccgcagucggcguccagcggcucugcuuguucgugugugugucguugcaggccuuauucaagcuuaccaugggccagaucauuaccuucuuucaagaggugccccacgucaucgaagagguuaugaacauugugcugaucgcccucagccugcuugcuauucugaaggggaucuacaauguggccacaugcggacucuucggccugaucuccuuucuucugcucugugggagaucuugcagcgucacguauaaaggaguguacgaacugcagacccuggagcucaacauggcgaaucugaacauguguaugccucuuuccugcacaaagaauaacucucaucacuauauuaugguuggcaaugaaaccgggcuggagcucacacugaccaacacaagcaucauuaaucauaaauucuguaaccuuuccgacgcucacaagaaaaaucuguacgaucaugcccucaugucuaucauuagcaccuuucaccuguccaucccgaacuucaaucaguaugaggccaugagcugcgacuuuaacggaggcaagauuucugugcaguacaaucugucccacagcuucgcugucgaugccgcuaaccauuguggcacgaucgccaacggggugcuccaaaccuuuaugcggauggcguggggaggcucuuauaucgcccuggacuccgggaagggaaauugggauugcauuaugacaagcuaccaguaccuuaucauucagaacaccacaugggaagaccacugucaguucucucgccccuccccuaucggcuaucuggggcuccugagccaaagaacccgggauauuuacaucucccgcagacuucugggaacguuuacauggacccucucugacagcgagggcaaugaagcucccggcggguauugccugacacgguggaugcugaucgaggccgagcucaaauguuucggaaacaccgcuguugccaagugcaaugaaaaacaugaugaggaauuuugcgacaugcugcgccuuuucgauuucuguaagcaggcgauuaaaagacugaagaccgaggcccagauguccauccagcucauuaacaaggcugugaaugcccugaucaacgaccaacuuauuaugaaaaaucaucugcgggauaucaugggcaucccuuacugcaacuauagccgcuacugguaucucaaucacacagucacggggaagaccucucugcccagauguuggcugguguccaacggaagcuaccucaaugaaacacacuuuucugacgacauugagcagcaggcugauaacaugaucaccgagaugcugcaaaaagaauacauggaccggcagggcaagacaccucuugggcugguggaucucuucgucuuuagcaccuccuucuaucugauuucuaucuuucugcaccuuguuaaaauuccgacgcaucgccacaucgugggaaagcccugcccuaaaccccauagacucaaucacaugggcauuuguagcugcggccuguacaagcacccuggggugcccgucaaguggaaacggugaggacuaguaauaaggaaacuguaugaaugucugugggcaggaagugaagagauccuucuguaaagguuuuuggaauuaugucugcugaauaauaaacuuuuuugaaauaauaaaucugguagaaaaaugagaucucaaaggcucuuuucagagccaccaaaaaaaaaaaaaaaaaaaaaaaaaaaaaaaaaaaaaaaaaaaaaaaaaaaaaaaaaaaaaaaaaaaaaaaaaaaaaaaaaaaaaaaaaaaaaaaaaaaaa

SEQ ID NO: 37672 - RNA, 1809 nt, Artificial Sequence
  mRNA product Design b-4 (hSL-A100) comprising derived and/or modified sequence from LASV(GA391;Clade III)__CAA36645__GPCmut10 (opt5)
aggagagucccgcagucggcguccagcggcucugcuuguucgugugugugucguugcaggccuuauucaagcuuaccaugggccagaucgugaccuucuuucaagaggucccccacguuauugaagaggugaugaacaucgugcugauugcccucagcauccuggcuauucuuaaggggcuguacaaugucgccacaugcggacucaucggccuggugacguuccuucugcucuccgggagaucuuguagccugaucuauaaaggaaccuacgaacugcagacacucgagcugaacauggaaacccuuaauaugugcaugccucuguccuguacaaagaacaauucucaucacuauauucggguuggcaacgagaccgggcucgagcugacacuuaccaauacgagcauccugaaccauaaauuuugcaaucucuccgacgcgcacaagcgcaaccuguacgaucauucucugaugagcauuaucuccaccuuccaccucagcauuccgaauuuuaaccaguaugaagcuaugucuugugacuucaauggaggcaaaaucacagugcaguacaaccugucccacagcuuugccgucgaugccgcuggccauugcgggacccuugccaauggagugcugcaaacauucaugagaauggcuuggggcgggucuuauauugcccucgacuccggacggggcaacugggauuguaucaugaccagcuaccaguaccugaucauucagaacacgacaugggacgaucacugccaguuuucucgccccuccccuaucggguaucuuggacugcucagccaaagaacccgggacauuuacaucucccgcagacugcugggcacauucaccuggacccucucugauagcgagggcaaugaaacacccgggggauauugucugacgcgguggaugcuuauugaggcggagcugaagugcuuuggcaacaccgccguugcuaaguguaaugaaaaacaugacgaggaguucugcgauaugcuccgccuguuugacuucugcaagcaggccaucagacggcuuaaaacagaagcucagauguccauccagcugauuaacaaggccgugaaugcgcucaucaacgaucaacugauuaugaaaaaucaucugcgcgacaucauggggauuccuuacuguaacuauagcagauacugguaucucaaucacaccucuacaggaaagaccucccugccccggugcuggcuuaucagcaacggcucuuaccugaaugaaacgaaguucagcgacgauaucgagcagcaggccgacaacaugauuacagagaugcuccaaaaagaauacaucgaucgccaggggaagaccccucugggacuggucgaccuuuuuguguucuccaccucuuuuuaucucauuagcaucuuccugcaccuggugaaaauuccgacacacagacauaucgucggcaagcccuguccuaaaccccaccggcucaaucauaugggcauuugcuccugugggcuguacaagcagccuggaguucccgugagauggaaacgcugaggacuaguaauaaggaaacuguaugaaugucugugggcaggaagugaagagauccuucuguaaagguuuuuggaauuaugucugcugaauaauaaacuuuuuugaaauaauaaaucugguagaaaaaugagaucucaaaggcucuuuucagagccaccaaaaaaaaaaaaaaaaaaaaaaaaaaaaaaaaaaaaaaaaaaaaaaaaaaaaaaaaaaaaaaaaaaaaaaaaaaaaaaaaaaaaaaaaaaaaaaaaaaaaa

SEQ ID NO: 37673 - RNA, 1812 nt, Artificial Sequence
  mRNA product Design b-4 (hSL-A100) comprising derived and/or modified sequence from LASV(AV;Clade V)__CCA30314__GPCmut10 (opt5)
aggagagucccgcagucggcguccagcggcucugcuuguucgugugugugucguugcaggccuuauucaagcuuaccaugggccagaucgugaccuucuuucaagaggucccccacguuauugaagaggugaugaacaucgugcugauugcccucagcauccuggcuguccuuaaggggcuguacaauauugccacaugcggacucaucggccugaucacguuccuucugcucugugggagauccugcucuagcaaccuguauaaaggaguguacgaacugcagucccucgaccugaauauggagacccuuaacauguguaugccucugucuugcacaaagaauaacagccaucacuauauucggguuggcaaugauaccgggcucgaacugacacuuaccaacacauccauccugaaucauaaauuuuguaaccucucugacgcgcacaagaaagaucuguacgaccaugcucugaugagcauuaucuccaccuuccaccucagcauuccgaauuuuaaccaguaugaggccaugucuugcgauuucaauggaggcaagaucuccgugcaguacaaccugagccacucuuaugccauugacgcugccaaucauuguggcacggucgcuaacgggauccuucaaaccuuuaugcgcauggccuggggaggcuccuacaucgcgcuggauagcgggagaggaaacugggacugcauuaugacaucuuaccaguaucucaucauucagaauaccacaugggagaaccacugucaguucucccggcccagcccuaucggcuaccuggggcuucugucccaacgcaccagagauauuuauaucucucggcgccuccugggaacguuuacauggacccugagcgacuccgaaggcaaugccacacccggcggguacugccucaccagauggaugcugaucgaggcugaacuuaaguguuucggaaacaccgccguggcuaaaugcaaugagaagcaugaugaggaauuuugcgacaugcugcgccucuucgauuuuuguaaacaggccauuagccggcugaagucugaggcgcagauguccauccagcuuauuaacaaagccguuaaugcucugaucaacgaccaacucauuaugaagaaucaccugagagacaucaugggcaucccuuauugcaacuacagcaaguauugguaccugaaucacacaauuacggggaaaaccucucuccccaaguguuggcuggugagcaacggauccuaccuuaaugaaacacauuucucugaugacaucgagcagcaggccgauaacaugauuaccgaaaugcugcaaaaagaguauauggagcggcagggcaagacaccucucgggcuggucgaccuguucguguuuagcaccuccuucuaccuuaucagcauuuuucuccgccuggugaaaaucccgacgcacagacauauugucggaaagcccugcccuaaaccccaccggcugaaucauaugggcaucuguucuugcggccucuauaagcagccugggguucccgugcgcuggaagagaugaggacuaguaauaaggaaacuguaugaaugucugugggcaggaagugaagagauccuucuguaaagguuuuuggaauuaugucugcugaauaauaaacuuuuuugaaauaauaaaucugguagaaaaaugagaucucaaaggcucuuuucagagccaccaaaaaaaaaaaaaaaaaaaaaaaaaaaaaaaaaaaaaaaaaaaaaaaaaaaaaaaaaaaaaaaaaaaaaaaaaaaaaaaaaaaaaaaaaaaaaaaaaaaaa

SEQ ID NO: 37674 - RNA, 1809 nt, Artificial Sequence
  mRNA product Design b-4 (hSL-A100) comprising derived and/or modified sequence from LASV(Togo/2016/7082;Clade VI)__AMR44577__GPCmut10 (opt5)
aggagagucccgcagucggcguccagcggcucugcuuguucgugugugugucguugcaggccuuauucaagcuuaccaugggccagaucauuaccuucuuucaagaggugccccacgucaucgaagagguuaugaacauugugcugaucgcccucagccugcuugcuauucugaaggggguguacaaugucgccacaugcggaaucaucggccucgugacguuccuguuucuuugugggagauccugcucucugauuuauaaaggaagcuacgaacuccagacccuggagcugaacauggaaacacucaauauguguaugccucuguccugcaccaagaacucuagccaucacuauauccggguuggcaaugagacagggcuugagcugacccucacaaacaccuccauuaucaaucauaaauucuguaaccugucugacgcgcacaagcgcaaucuuuacgaucaugcucugaugagcauucucuccacguuucaccugagcaucccgaacuucaaucaguaugaagccaugucuugcgacuuuaacggaggcaaaauuuccgugcaguacaaucugagccacgccuaugcugucgaugccgcugagcauuguggcaccguggccaacgggguucuccaaacauucaugagaauggcguggggaggcucuuacaucgcccuggacuccgggcggggaaauugggauugcaucaugaccagcuaccaguaucuuauuauccagaacacaaccugggaagaccacugucaguuuucucgccccuccccuauuggcuaccuggggcuccugagccaaagaacgcgggauaucuauauuucccgcagacuucugggaacauucaccuggacacucucugacagcgagggcaacgagacccccggcggguacugccugacccgguggaugcugaucgaagcugagcucaaguguuuuggaaauacagccguggcuaagugcaacgaaaaacaugaugaggaguucugcgacaugcugcgccuuuuugauuucuguaagcaggccauccagagacugaaauccgaagcgcagaugagcauucaacucaucaauaaggccgucaacgcucugauuaaugaccagcuuaucaugaaaaaccaucugcgggauaugaugggcauuccuuauugcaauuacucuaaguauugguaccucaaccacacguccagcgggcgcaccucucugcccaaguguuggcuggugagcaauggauccuaccucaacgagacacacuucucugacgacaucgaacagcaagccgauaauaugaucaccgagaugcugcagaaagaauauauugacagacagggcaagacaccucuugggcugguggaucucuuugucuucagcaccuccuuuuaccugaucagcauuuuccugcaccuuaucaaaauuccgacgcaucggcacaucguuggaaagcccugcccuaaaccccaucgccucaaccacaugggcauuuguucuugcggccuguauaagcagccuggggugcccacaagauggaaacggugaggacuaguaauaaggaaacuguaugaaugucugugggcaggaagugaagagauccuucuguaaagguuuuuggaauuaugucugcugaauaauaaacuuuuuugaaauaauaaaucugguagaaaaaugagaucucaaaggcucuuuucagagccaccaaaaaaaaaaaaaaaaaaaaaaaaaaaaaaaaaaaaaaaaaaaaaaaaaaaaaaaaaaaaaaaaaaaaaaaaaaaaaaaaaaaaaaaaaaaaaaaaaaaaa

SEQ ID NO: 37675 - RNA, 1809 nt, Artificial Sequence
  mRNA product Design b-4 (hSL-A100) comprising derived and/or modified sequence from LASV(KAK-428;Clade n.d. (VII))__ANH09740__GPCmut10 (opt5)
aggagagucccgcagucggcguccagcggcucugcuuguucgugugugugucguugcaggccuuauucaagcuuaccaugggccagaucgugaccuucuuucaagaggucccccacguuauugaagaggugaugaacaucgugcugauugcccucagccugcuugcuauccugaaggggcucuacaauuucgccacaugcggagucauuggccugaucacguuucuucugcucugugggagauccugcucugcgaccuauaaaggacaguacgaacugcagacacuggagcucaacauggaaagccugaauauguguaugccucuuuccugcaccaagaacaauucucaucacuauauccgggcuggcaacaauacagggcuggagcucacccugacaaacaccagcauuaucucccauaaauucuguaaucuuucugacgcccacaagaaaaaccuguacgaucauacgcucaugagcauuaucaccacauuucaccuguccauuccgaauuucaaccaguaugaggccaugagcugcgacuuuaauggaggcaagaucucuauucaauacaaccugucccacagcuaugcuggcgaugccgcucagcauugugggaccguggccaauggaguucuccagacauucaugcgcauggcguggggcgggucuuaccuggcccuugacuccggaagacggggcugggauugcaucaucagcucuuaccaguaucugauuauccaaaacaccacgugggacgaucacugucaguuuucccgccccagcccuauuggguaccucggauucgugucccagaagacaagagacaucuauauuucucggcgccugcuuggcaccuuuacauggacccugagcgauuccgaaggccaugacaugcccgggggauacugccucaccagauggaugcugaucgaggcugaucugaaauguuucggcaacacagccgucgcuaagugcaaugaaaaacacgacgaggaguuuugcgauauguggcgccucuucgacuucuguaagcaggccauccaacggcugaaagcggaagcccagaugaacauucagcuuaucaauaaggcugugaacgcccugauuaaugaccaacucaugaugaagaaccaccugagagauaucauggggauuccuuauugcaauuacagcaaauuuugguaucuuaacaauacgaccacaggacggaccucucugccccgcuguuggcucaucuccaacggcagcuaccugaaugagacacauuucucugacgauaucgaacagcaggcugacaacaugauuaccgagaugcugcagaaggaauacauggauagacaagggaaaacgccucucggacugguugaccuuuuuguguucagcacauccuuuuaucugaucaccauuuuccuccaccuggucaagaucccgacccaucggcacauugugggcaaacccugcccuaagccccaucgccugaaucacaugggcaucuguucuugcgggcuuuacaaacagccuggagugcccgucagauggaagcggugaggacuaguaauaaggaaacuguaugaaugucugugggcaggaagugaagagauccuucuguaaagguuuuuggaauuaugucugcugaauaauaaacuuuuuugaaauaauaaaucugguagaaaaaugagaucucaaaggcucuuuucagagccaccaaaaaaaaaaaaaaaaaaaaaaaaaaaaaaaaaaaaaaaaaaaaaaaaaaaaaaaaaaaaaaaaaaaaaaaaaaaaaaaaaaaaaaaaaaaaaaaaaaaaa

SEQ ID NO: 37676 - RNA, 1809 nt, Artificial Sequence; identical to SEQ ID NO: 37670
  mRNA product Design b-4 (hSL-A100) comprising derived and/or modified sequence from LASV(Pinneo-NIG-1969;Clade I)__AIT17836__GPCmut10 (opt5)

SEQ ID NO: 37677 - RNA, 1809 nt, Artificial Sequence
  mRNA product Design b-4 (hSL-A100) comprising derived and/or modified sequence from LASV(ISTH0009-NIG-2011;Clade II)__AIT17404__GPCmut10 (opt5)
aggagagucccgcagucggcguccagcggcucugcuuguucgugugugugucguugcaggccuuauucaagcuuaccaugggccagaucauuaccuucuuucaagaggugccccacgucaucgaagagguuaugaacauugugcugaucgcccucagccugcuugcuauucugaaggggaucuacaauguggccacaugcggacucuucggccuggucuccuuucuucugcucugugggagaucuugcagcacgaccuauaaaggaguguacgaacugcagacacuggagcucgacauggcgucccugaacauguguaugccucuuucuugcaccaagaauaacagccaucacuauaucaugguuggcaaugaaacagggcuggagcucacccugacaaacaccuccauuaucaaucauaaauucuguaaccuuucugaugcucacaagaaaaaucuguacgaccaugcccucaugagcauuaucuccacguuucaccugagcauuccgaacuucaaucaguaugaggccaugucuugcgauuuuaacggaggcaagaucuccgugcaguacaaucugagccacgcuuaugccgucgacgcugccaaccauuguggcaccauugcgaauggggugcuccaaacauucaugcggauggccuggggaggcucuuacaucgcucuggauuccgggaagggaagcugggacugcaucaugaccucuuaccaguaucuuauuauccagaacacaaccugggaagaucacugucaguuuucccgccccagcccuauuggcuaccuggggcuccugucccaaagaacgcgggacaucuauauuucucgcagacuucugggaacauucaccuggacacucagcgauuccgagggcaacgaaacccccggcggguacugccugacccgguggaugcugaucgaggccgagcucaaauguuuuggaaauacagcuguugccaagugcaacgaaaaacaugacgaggaguucugcgauaugcugcgccuuuuugacuucuguaagcaggcgaucagacggcugaaaacggaagcccagaugagcauucagcucaucaauaaggcugugaacgcccugauuaaugaucaacuuaucaugaagaaccaucugcgcgacauuaugggcaucccuuauugcaauuacucuaaauauugguaccucaaccacaccgucacagggaagaccucccugcccagauguuggcuggugagcaauggaucuuaccucaacgaaacacacuucagcgacgauaucgagcagcaggcugacaauaugauuaccgagcugcuucaaaaagaauauauggaucggcagggcaagacgccucuggggcucguggaccuguuugucuucuccacaucuuuuuaccugaucagcauuuuccuucaccucaucaaaauuccgacccaucgccacaucaccggaaagcccugcccuaaaccccauagacugaaccacaugggcauuuguuccugcggccuguauaagcacccugggguucccgugaaguggaaacggugaggacuaguaauaaggaaacuguaugaaugucugugggcaggaagugaagagauccuucuguaaagguuuuuggaauuaugucugcugaauaauaaacuuuuuugaaauaauaaaucugguagaaaaaugagaucucaaaggcucuuuucagagccaccaaaaaaaaaaaaaaaaaaaaaaaaaaaaaaaaaaaaaaaaaaaaaaaaaaaaaaaaaaaaaaaaaaaaaaaaaaaaaaaaaaaaaaaaaaaaaaaaaaaaa

SEQ ID NO: 37678 - RNA, 1809 nt, Artificial Sequence
  mRNA product Design b-4 (hSL-A100) comprising derived and/or modified sequence from LASV(ISTH2010-NIG-2012;Clade II)__AIT17482__GPCmut10 (opt5)
aggagagucccgcagucggcguccagcggcucugcuuguucgugugugugucguugcaggccuuauucaagcuuaccaugggccagaucauuaccuucuuucaagaggugccccacgucaucgaagagguuaugaacauugugcugaucgcccucagccugcuugcuauucugaaggggaucuacaauguggccacaugcggacucuucggccuggucuccuuucuucugcucugugggagaucuugcagcacgaccuauaaaggaguguacgaacugcagacacuggagcucgacauggcgucccugaacauguguaugccucuuucuugcaccaagaauaacagccaucacuauaucaugguuggcaaugaaacagggcuggagcucacccugacaaacaccuccauuaucaaucauaaauucuguaaccuuucugaugcucacaagaaaaaucuguacgaccaugcccucaugagcauuaucuccacguuucaccugagcauuccgaacuucaaucaguaugaggccaugucuugcgauuuuaacggaggcaagaucuccgugcaguacaaucugagccacgcuuaugccgucgacgcugccaaccauuguggcaccauugcgaauggggugcuccaaacauucaugcggauggccuggggaggcucuuacaucgcucuggauuccgggaagggaagcugggacugcaucaugaccucuuaccaguaucuuauuauccagaacauuacaugggaagaucacugucaguuuucccgccccagcccuaucggcuaccuggggcuccugucccaaagaacccgggacauuuauaucucucgcagacuucugggaacguucacauggacccucagcgauuccgagggcaacgaaacacccggcggguacugccugacccgguggaugcugaucgaggccgagcucaaauguuuuggaaauaccgcuguugccaagugcaacgaaaaacaugacgaggaguucugcgauaugcugcgccuuuuugacuucuguaagcaggcgauuagacggcugaaaacagaagcccagaugagcauccagcucauuaauaaggcugugaacgcccugaucaaugaucaacuuauuaugaagaaccaucugcgcgacaucaugggcaucccuuauugcaauuacucuaaauauugguaccucaaccacacggucaccgggaagacaucccugcccagauguuggcuggugagcaauggaucuuaccucaacgaaacccacuucagcgacgauauugagcagcaggcugacaauaugaucacagagcugcuucaaaaagaauauauugaucggcagggcaagaccccucuggggcucguggaccuguuugucuucuccacgucuuuuuaccugaucagcauuuuccuucaccucguuaaaaucccgacacaucgccacguggugggaaagcccugcccuaaaccccauagacugaaccacaugggcauuuguuccugcggccuguauaagcacccugggguccccgugaaguggaaacggugaggacuaguaauaaggaaacuguaugaaugucugugggcaggaagugaagagauccuucuguaaagguuuuuggaauuaugucugcugaauaauaaacuuuuuugaaauaauaaaucugguagaaaaaugagaucucaaaggcucuuuucagagccaccaaaaaaaaaaaaaaaaaaaaaaaaaaaaaaaaaaaaaaaaaaaaaaaaaaaaaaaaaaaaaaaaaaaaaaaaaaaaaaaaaaaaaaaaaaaaaaaaaaaaa

SEQ ID NO: 37679 - RNA, 1809 nt, Artificial Sequence
  mRNA product Design b-4 (hSL-A100) comprising derived and/or modified sequence from LASV(Lassa virus/H.sapiens-wt/NGA/2015/ISTH_0543;Clade II)__AVO03639__GPCmut10 (opt5)
aggagagucccgcagucggcguccagcggcucugcuuguucgugugugugucguugcaggccuuauucaagcuuaccaugggccagaucauuaccuucuuucaagaggugccccacgucaucgaagagguuaugaacauugugcugaucgcccucagccugcuugcuauucugaaggggaucuacaauguggccacaugcggacucuucggccuggucuccuuucuucugcucugugggagaucuugcagcacgaccuauaaaggaguguacgaacugcagacacuggagcucgacauggcgaaccugaauauguguaugccucuuuccugcaccaagaacaauucucaucacuauaucaugguuggcaacgaaacagggcuggagcucacccugacaaauaccagcauuaucaaccauaaauucuguaaucuuuccgaugcucacaagaaaaaccuguacgaccaugcccucaugucuauuaucagcacguuucaccuguccauuccgaauuucaaccaguaugaggccaugagcugcgauuuuaauggaggcaagaucucugugcaguacaaccugucccacaccuaugcugucgacgccgcuaaucauuguggcacaauugccaacggggugcuccaaaccuucaugcggauggcguggggaggcagcuacaucgcccuggauucugggaagggauccugggacugcaucaugacaagcuaccaguaucuuguuauucagaacaccacgugggaagaucacugucaguuuucucgccccuccccuaucggcuaccuggggcuccugagccaaagaacacgggacauuuauaucucccgcagacuucugggaaccuucacauggacccucucugauagcgagggcaaugaaacccccggcggguacugccugacacgguggaugcugauugaggcugagcucaaauguuuuggaaacacggccguggcuaagugcaaugaaaaacaugacgaggaguucugcgauaugcugcgccuuuuugacuucuguaagcaggccaucagacggcugaaaaccgaagcgcagauguccauccagcucauuaacaaggccgucaaugcucugaucaacgaucaacuuauuaugaagaaucaucugcgcgacaucaugggcauuccuuauugcaacuacagcaaauauugguaccucaaucacacagugaccgggaagacaucucugcccagauguuggcugguguccaacggaagcuaccucaaugaaacccacuucucugacgauaucgagcagcaggccgacaacaugaucacggagcugcuucaaaaagaauauauugaucggcagggcaagacaccucuggggcucgucgaccuguuuguuuucagcaccuccuuuuaccugaucucuauuuuccuucaccucgugaaaaucccgacccaucgccacauuacaggaaagcccugcccuaaaccccauagacugaaucacaugggcaucuguagcugcggccuguauaagcacccuggggugcccgucaaguggaaacggugaggacuaguaauaaggaaacuguaugaaugucugugggcaggaagugaagagauccuucuguaaagguuuuuggaauuaugucugcugaauaauaaacuuuuuugaaauaauaaaucugguagaaaaaugagaucucaaaggcucuuuucagagccaccaaaaaaaaaaaaaaaaaaaaaaaaaaaaaaaaaaaaaaaaaaaaaaaaaaaaaaaaaaaaaaaaaaaaaaaaaaaaaaaaaaaaaaaaaaaaaaaaaaaaa

SEQ ID NO: 37680 - RNA, 1809 nt, Artificial Sequence
  mRNA product Design b-4 (hSL-A100) comprising derived and/or modified sequence from LASV(Lassa virus/H.sapiens-wt/NGA/2016/ISTH_0009;Clade II)__AVO03571__GPCmut10 (opt5)
aggagagucccgcagucggcguccagcggcucugcuuguucgugugugugucguugcaggccuuauucaagcuuaccaugggccagaucauuaccuucuuucaagaggugccccacgucaucgaagagguuaugaacauugugcugaucgcccucagccugcuugcuauucugaaggggaucuacaauguggccacaugcggacuccugggccuugucuccuuccugcuccugugugggagaucuugcagcacgaccuauaaaggaguguacgaacugcagacacucgagcuggacauggcgucccuuaacauguguaugccucugucuugcaccaagaauaacagccaucacuauaucaugguuggcaaugaaacagggcucgagcugacccuuacaaacaccuccauuaucaaucauaaauuuuguaaccugucugaugcucacaagaaaaaucucuacgaccaugcccugaugagcauuaucuccacguuccaccugagcauuccgaacuuuaaucaguaugaggccaugucuugcgauuucaacggaggccggaucuccgugcaguacaaucucagccacucuuaugcugucgacgccgcuaaccauuguggcaccauugccaauggggugcugcaaacauuuaugcgcauggcguggggaggcuccuacaucgcccuugauagcgggaagggaucuugggacugcaucaugaccuccuaccaguaucugauuauccagaacacaaccugggaagaucacugucaguucagcagacccuccccuauuggcuaccucgggcugcuuucucaacggacgcgcgacaucuauauuagcagacggcugcucggaacauuuaccuggacacuguccgauagcgagggcaacgaaacccccggcggguacugccugacccgcuggaugcucaucgaggcugagcugaaguguuucggaaauacagccguugcuaaaugcaacgaaaagcaugacgaggaauuuugcgauaugcuuagacuguucgacuuuuguaaacaggccauccggcgccucaagacggaggcgcagaugucuauucagcugaucaauaaagccgugaacgcucuuauuaaugaucaacugaucaugaagaaccaccucagagacauuaugggcaucccuuauugcaauuacuccaaguauugguaccugaaccacaccgucacagggaaaaccagccugccccgguguuggcucgugucuaauggaagcuaccugaacgaaacacauuucuccgacgauaucgagcagcaggccgacaauaugauuaccgagcuucugcaaaaggaauauaucgaucgccagggcaaaacgccucucgggcugguggaccuguucgucuuuucuaccagcuucuaccuuauuuccaucuuucuccaccugguuaagauuccgacacauagacacaucaccggaaaacccugcccuaagccccaucggcugaaccacaugggcauuuguagcugcggccucuauaaucacccuggggugcccgugaaauggaagcgcugaggacuaguaauaaggaaacuguaugaaugucugugggcaggaagugaagagauccuucuguaaagguuuuuggaauuaugucugcugaauaauaaacuuuuuugaaauaauaaaucugguagaaaaaugagaucucaaaggcucuuuucagagccaccaaaaaaaaaaaaaaaaaaaaaaaaaaaaaaaaaaaaaaaaaaaaaaaaaaaaaaaaaaaaaaaaaaaaaaaaaaaaaaaaaaaaaaaaaaaaaaaaaaaaa

SEQ ID NO: 37681 - RNA, 1809 nt, Artificial Sequence
  mRNA product Design b-4 (hSL-A100) comprising derived and/or modified sequence from LASV(Lassa virus/H.sapiens-wt/NGA/2016/ISTH_0017;Clade II)__AVO03567__GPCmut10 (opt5)
aggagagucccgcagucggcguccagcggcucugcuuguucgugugugugucguugcaggccuuauucaagcuuaccaugggccagaucauuaccuucuuucaagaggugccccacgucaucgaagagguuaugaacauugugcugaucgcccucagccugcuugcuauucugaaggggaucuacaauguggccacaugcggacucuucggccuggucuccuuucuucugcucugugggagaucuugcagcacgaccuauaaaggaguguacgaacugcagacacuggagcucgacauggcgucccugaacauguguaugccucuuucuugcaccaagaauaacagccaucacuauaucaugguuggcaaugaaacagggcuggagcucacccugacaaacaccuccauuaucaaucauaaauucuguaaccuuucugaugcucacaagaaaaaucuguacgaccaugcccucaugagcauuaucuccacguuucaccugagcauuccgaacuucaaucaguaugaggccaugucuugcgauuuuaacggaggcaagaucuccgugcaguacaaucugagccacaccuaugcuauugacgccgcuaaccauuguggcacaaucgccaaugggguccuccaaaccuucaugcggauggcguggggaggcucuuacaucgcccuggauuccgggaagggaagcugggacugcauuaugacaucuuaccaguaucuuaucauucagaacaccacgugggaagaucacugucaguuuucccgccccagcccuaucggcuaccuggggcuccugucccaaagaacacgggacauuuauaucucucgcagacuucugggaaccuucacauggacccucagcgauuccgagggcaacgaaacccccggcggguacugccugacacgguggaugcugaucgaggcugagcucaaauguuuuggaaauacggccguggcuaagugcaacgaaaaacaugacgaggaguucugcgauaugcugcgccuuuuugacuucuguaagcaggccauuagacggcugaaaaccgaagcgcagaugagcauccagcucauuaauaaggccguuaacgcucugaucaaugaucaacuuauuaugaagaaccaucugcgcgacaucaugggcaucccuuauugcaauuacucuaaauauugguaccucaaccacacagugaccgggaagacaucccugcccagauguuggcuggucagcaauggaucuuaccucaacgaaacccacuucagcgacgauauugagcagcaggccgacaauaugaucacggagcugcuucaaaaagaauauauggaucggcagggcaagacaccucuggggcucguggaccuguuuguguucuccaccucuuuuuaccugauuagcaucuuccuucaccucguccgcauuccgacccauagacacguuaucggaaaacccugcccuaagccccaucggcugaaccacaugggcauuuguuccugcggccuguauaaacacccuggggugcccgugaaguggaagcgcugaggacuaguaauaaggaaacuguaugaaugucugugggcaggaagugaagagauccuucuguaaagguuuuuggaauuaugucugcugaauaauaaacuuuuuugaaauaauaaaucugguagaaaaaugagaucucaaaggcucuuuucagagccaccaaaaaaaaaaaaaaaaaaaaaaaaaaaaaaaaaaaaaaaaaaaaaaaaaaaaaaaaaaaaaaaaaaaaaaaaaaaaaaaaaaaaaaaaaaaaaaaaaaaaa

SEQ ID NO: 37682 - RNA, 1809 nt, Artificial Sequence
  mRNA product Design b-4 (hSL-A100) comprising derived and/or modified sequence from LASV(Lassa virus/H.sapiens-wt/NGA/2018/ISTH_0959;Clade II)__AVV65099__GPCmut10 (opt5)
aggagagucccgcagucggcguccagcggcucugcuuguucgugugugugucguugcaggccuuauucaagcuuaccaugggccagaucauuaccuucuuucaagaggugccccacgucaucgaagagguuaugaacauugugcugaucgcccucagccugcuugcuauucugaaggggaucuacaauguggucacaugcggacucuucggccugguguccuuucuucugcucugugggagaucuugcagcacgaccuauaaaggaguuuacgaacugcagacacuggagcucgacauggccucccugaacauguguaugccucuuucuugcaccaagaauaacagccaucacuauaucauggugggcaaugaaacagggcuggagcucacccugacaaacaccuccauuaucaaucauaaauucuguaaccuuucugaugcgcacaagaaaaaucuguacgaccaugcucucaugagcauuaucuccacguuucaccugagcauuccgaacuucaaucaguaugaggccaugucuugcgauuuuaacggaggcaagaucuccguccaguacaaucugagccacgccuaugcuauugacgccgcuaaccauuguggcaccaucgccaauggggugcuccaaacauucaugcggauggcguggggaggcucuuacaucgcccuggauuccgggaagggaagcugggacugcauuaugaccucuuaccaguaucuuaucauucagaacacaaccugggaagaucacugucaguuuucccgccccagcccuaucggcuaccuggggcuccugucccaaagaacgcgggacauuuauaucucucgcagacuucugggaacauucaccuggacacucagcgauuccgagggcaacgaaacccccggcggguacugccugacccgguggaugcugaucgaggcugagcucaaauguuuuggaaauacagccguugcuaagugcaacgaaaaacaugacgaggaguucugcgauaugcugcgccuuuuugacuucuguaagcaggccauuagacggcugaaaacggaagcgcagaugagcauccagcucauuaauaaggccgugaacgcucugaucaaugaucaacuuauuaugaagaaccaucugcgcgacaucaugggcaucccuuauugcaauuacucuaaauauugguaccucaaccacaccgucacagggaagaccucccugcccagauguuggcuggugagcaauggaucuuaccucaacgaaacacacuucagcgacgauauugagcagcaggccgacaauaugaucaccgagcugcuucaaaaagaauauauugaucggcagggcaagacgccucuggggcucguggaccuguuugucuucuccacaucuuuuuaccugaucagcauuuuccuucaccucguuaaaaucccgacccaucgccacgugauuggaaagcccugcccuaaaccccauagacugaaccacaugggcaucuguuccugcggccuguauaagcacccuggggugcccgucaaguggaaacggugaggacuaguaauaaggaaacuguaugaaugucugugggcaggaagugaagagauccuucuguaaagguuuuuggaauuaugucugcugaauaauaaacuuuuuugaaauaauaaaucugguagaaaaaugagaucucaaaggcucuuuucagagccaccaaaaaaaaaaaaaaaaaaaaaaaaaaaaaaaaaaaaaaaaaaaaaaaaaaaaaaaaaaaaaaaaaaaaaaaaaaaaaaaaaaaaaaaaaaaaaaaaaaaaa

SEQ ID NO: 37683 - RNA, 1809 nt, Artificial Sequence
  mRNA product Design b-4 (hSL-A100) comprising derived and/or modified sequence from LASV(LASV003-NIG-2008;Clade II)__AIT17580__GPCmut10 (opt5)
aggagagucccgcagucggcguccagcggcucugcuuguucgugugugugucguugcaggccuuauucaagcuuaccaugggccagaucauuaccuucuuucaagaggugccccacgucaucgaagagguuaugaacauugugcugaucgcccucagccugcuugcuauucugaaggggaucuacaauguggccacaugcggacucuucggccuggucuccuuucuucugcucugugggagaucuugcagcacgaccuauaaaggaguguacgaacugcagacacuggagcucgacauggcgucccugaacauguguaugccucuuucuugcaccaagaauaacagccaucacuauaucaugguuggcaaugaaacagggcuggagcucacccugacaaacaccuccauuaucaaucauaaauucuguaaccuuucugaugcucacaagaaaaaucuguacgaccaugcccucaugagcauuaucuccacguuucaccugagcauuccgaacuucaaucaguaugaggccaugucuugcgauuuuaacggaggcaagaucuccgugcaguacaaucugagccacaccuaugcugucgacgccgcuaaccauuguggcacaauugccaauggggugcuccaaaccuucaugcggauggcguggggaggcucuuacaucgcccuggauuccgggaagggaagcugggacugcaucaugacaucuuaccaguaucuuauuauccagaacaccacgugggaagaucacugucaguuuucccgccccagcccuauuggcuaccuggggcuccugucccaaagaacacgggacaucuauauuucucgcagacuucugggaaccuucacauggacccucagcgauuccgagagcaacgaaacccccggcggcuacugccugacacgguggaugcugaucgaggcugagcucaaauguuuugggaauacggccguugcuaagugcaacgaaaaacaugacgaggaguucugcgauaugcugcgccuuuuugacuucuguaagcaggccaucagacggcugaaagcggaagcccagaugucuauucagcucaucaauaaggcugugaacgcccugauuaaugaucaacuuaucaugaagaaccaucugcgcgacauuaugggaaucccuuauugcaauuacuccaaauauugguaccucaaccacaccgucacaggcagaaccagccugccccgguguuggcuggugucuaaugggagcuaccucaacgaaacacacuucuccgacgauaucgagcagcaggcugacaauaugauuaccgagcugcuucaaaaggaauauauggaucgccagggaaaaacgccucugggccucguggaccuguuugucuucucuaccagcuuuuaccugaucuccauuuuccuucaccucguuaagaucccgacacauagacacgugauugggaaacccugcccuaagccccaucggcugaaccacaugggaaucuguagcugcggccuguauaaacacccuggcgugcccgucaaguggaagcgcugaggacuaguaauaaggaaacuguaugaaugucugugggcaggaagugaagagauccuucuguaaagguuuuuggaauuaugucugcugaauaauaaacuuuuuugaaauaauaaaucugguagaaaaaugagaucucaaaggcucuuuucagagccaccaaaaaaaaaaaaaaaaaaaaaaaaaaaaaaaaaaaaaaaaaaaaaaaaaaaaaaaaaaaaaaaaaaaaaaaaaaaaaaaaaaaaaaaaaaaaaaaaaaaaa

SEQ ID NO: 37684 - RNA, 1809 nt, Artificial Sequence
  mRNA product Design b-4 (hSL-A100) comprising derived and/or modified sequence from LASV(LASV035-NIG-2009;Clade II)__AIT17588__GPCmut10 (opt5)
aggagagucccgcagucggcguccagcggcucugcuuguucgugugugugucguugcaggccuuauucaagcuuaccaugggccagaucauuaccuucuuucaagaggugccccacgucaucgaagagguuaugaacauugugcugaucgcccucagccugcuugcuauucugaaggggaucuacaauguggccacaugcggacucuucggccuggucuccuuucuucugcucugugggagaucuugcagcacgaccuauaaaggaguguacgaacugcagacacuggagcucgacauggcgucccugaacauguguaugccucuuucuugcaccaagaauaacagccaucacuauaucaugguuggcaaugaaacagggcuggagcucacccugacaaacaccuccauuaucaaucauaaauucuguaaccuuucugaugcucacaagaaaaaucuguacgaccaugcccucaugagcauuaucuccacguuucaccugagcauuccgaacuucaaucaguaugaggccaugucuugcgauuuuaacggaggcaagaucuccgugcaguacaaucugagccacgcuuaugccgucgacgcugccaaccauuguggcaccauugcgaauggggugcuccaaacauucaugcggauggccuggggaggcucuuacaucgcucuggauuccgggaagggaagcugggacugcaucaugaccucuuaccaguaucuuauuauccagaacacaaccugggaagaucacugucaguuuucccgccccagcccuauuggcuaccuggggcuccugucccaaagaacgcgggacaucuauauuucucgcagacuucugggaacauucaccuggacacucagcgauuccgagggcaacgaaacccccggcggguacugccugacccgguggaugcugaucgaggccgagcucaaauguuuuggaaauacagcuguugccaagugcaacgaaaaacaugacgaggaguucugcgauaugcugcgccuuuuugacuucuguaagcaggcgaucagacggcugaaagccgaagcucagaugagcauucagcucaucaauaaggccgugaacgcucugauuaaugaucaacuuaucaugaagaaccaucugcgcgacauuaugggcaucccuuauugcaauuacucuaaauauugguaccucaaccacacggucaccgggaagacaucccugcccagauguuggcuggugagcaauggaucuuaccucaacgaaacccacuucagcgacgauaucgagcagcaggccgacaauaugauuacagagcugcuucaaaaagaauauaucgaucggcagggcaagaccccucuggggcucguggaccuguuugucuucuccacgucuuuuuaccugauuagcaucuuccuucaccucguuaaaauuccgacacaucgccacgugaucggaaagcccugcccuaaaccccauagacugaaccacaugggcauuuguuccugcggccuguauaagcacccuggggugcccgucaaguggaaacggugaggacuaguaauaaggaaacuguaugaaugucugugggcaggaagugaagagauccuucuguaaagguuuuuggaauuaugucugcugaauaauaaacuuuuuugaaauaauaaaucugguagaaaaaugagaucucaaaggcucuuuucagagccaccaaaaaaaaaaaaaaaaaaaaaaaaaaaaaaaaaaaaaaaaaaaaaaaaaaaaaaaaaaaaaaaaaaaaaaaaaaaaaaaaaaaaaaaaaaaaaaaaaaaaa

SEQ ID NO: 37685 - RNA, 1809 nt, Artificial Sequence
  mRNA product Design b-4 (hSL-A100) comprising derived and/or modified sequence from LASV(LASV1000-NIG-2009;Clade II)__AIT17782__GPCmut10 (opt5)
aggagagucccgcagucggcguccagcggcucugcuuguucgugugugugucguugcaggccuuauucaagcuuaccaugggccagaucauuaccuucuuucaagaggugccccacgucaucgaagagguuaugaacauugugcugaucgcccucagccugcuugcuauucugaaggggaucuacaauguggccacaugcggacucuucggccuggucuccuuucuucugcucugugggagaucuugcagcacgaccuauaaaggaguguacgaacugcagacacuggagcucgacauggcgucccugaacauguguaugccucuuucuugcaccaagaauaacagccaucacuauaucaugguuggcaaugaaacagggcuggagcucacccugacaaacaccuccauuaucaaucauaaauucuguaaccuuucugaugcucacaagaaaaaucuguacgaccaugcccucaugagcauuaucuccacguuucaccugagcauuccgaacuucaaucaguaugaggccaugucuugcgauuuuaacggaggcaagaucuccgugcaguacaaucugagccacaccuaugcugucgacgccgcuaaccauuguggcacaauugccaauggggugcuccaaaccuucaugcggauggcguggggaggcucuuacaucgcccuggauuccgggaagggaagcugggacugcaucaugacaucuuaccaguaucuuauuauccagaacaccacgugggaagaucacugucaguuuucccgccccagcccuauuggcuaccuggggcuccugucccaaagaacacgggacaucuauauuucucgcagacuucugggaaccuucacauggacccucagcgauuccgagggcaacgaaacccccggcggguacugccugacacgguggaugcugaucgaggcugagcucaaauguuuuggaaauacggccguugcuaagugcaacgaaaaacaugacgaggaguucugcgauaugcugcgccuuuuugacuucuguaagcaggccaucaaaagacugaagaccgaagcgcagaugagcauucagcucaucaauaaggccgugaacgcucugauuaaugaucaacuuaucaugaaaaaccaucugcgggacauuaugggcaucccuuauugcaauuacucuaaguauugguaccucaaccacacagucaccgggaaaacaucccugccccgcuguuggcuggugagcaauggaucuuaccucaacgaaacccacuucagcgacgauaucgagcagcaggccgacaauaugauuacggagcugcuucaaaaggaauauaucgauagacagggcaaaacaccucuggggcucguggaccuguuugucuucuccaccucuuuuuaccugauuagcaucuuccuucaccucguuaagauuccgacccaucggcacguggugggaaaacccugcccuaagccccaucgccugaaccacaugggcaucuguuccugcggccuguauaagcacccugggguccccgugaaauggaagagaugaggacuaguaauaaggaaacuguaugaaugucugugggcaggaagugaagagauccuucuguaaagguuuuuggaauuaugucugcugaauaauaaacuuuuuugaaauaauaaaucugguagaaaaaugagaucucaaaggcucuuuucagagccaccaaaaaaaaaaaaaaaaaaaaaaaaaaaaaaaaaaaaaaaaaaaaaaaaaaaaaaaaaaaaaaaaaaaaaaaaaaaaaaaaaaaaaaaaaaaaaaaaaaaaa

SEQ ID NO: 37686 - RNA, 1809 nt, Artificial Sequence
  mRNA product Design b-4 (hSL-A100) comprising derived and/or modified sequence from LASV(LASV221-NIG-2010;Clade II)__AIT17624__GPCmut10 (opt5)
aggagagucccgcagucggcguccagcggcucugcuuguucgugugugugucguugcaggccuuauucaagcuuaccaugggccagaucauuaccuucuuucaagaggugccccacgucaucgaagagguuaugaacauugugcugaucgcccucagccugcuugcuauucugaaggggaucuacaauguggccacaugcggacucuucggccuggucuccuuucuucugcucugugggagaucuugcagcacgaccuauaaaggaguguacgaacugcagacacuggagcucgacauggcgucccugaacauguguaugccucuuucuugcaccaagaauaacagccaucacuauaucaugguuggcaaugaaacagggcuggagcucacccugacaaacaccuccauuaucaaucauaaauucuguaaccuuucugaugcucacaagaaaaaucuguacgaccaugcccucaugagcauuaucuccacguuucaccugagcauuccgaacuucaaucaguaugaggccaugucuugcgauuuuaacggaggcaagaucuccgugcaguacaaucugagccacaccuaugcuauugacgccgcuaaccauuguggcacaaucgccaaugggguccuccaaaccuucaugcggauggcguggggaggcucuuacaucgcccuggauuccgggaagggaagcugggacugcauuaugacaucuuaccaguaucuuaucauucagaacaccacgugggaagaucacugucaguuuucccgccccagcccuaucggcuaccuggggcuccugucccaaagaacacgggacauuuauaucucucgcagacuucugggaaccuucacauggacccucagcgauuccgagggcaacgaaacccccggcggguacugccugacacgguggaugcugaucgaggcugagcucaaauguuuuggaaauacggccguggcuaagugcaacgaaaaacaugacgaggaguucugcgauaugcugcgccuuuuugacuucuguaagcaggccauuagacggcugaaaaccgaagcgcagaugagcauccagcucauuaauaaggccguuaacgcucugaucaaugaucaacuuauuaugaagaaccaucugcgcgacaucaugggcaucccuuauugcaauuacucuaaauauugguaccucaaccacacagugaccgggaagacaucccugcccagauguuggcuggucagcaauggaucuuaccucaacgaaacccacuucagcgacgauauugagcagcaggccgacaauaugaucacggagaugcugcaaaaagaauauauggaucggcagggcaagacaccucuugggcugguggaccucuuuguguucuccaccucuuuuuaccugauuagcaucuuccugcaccuugucaaaauuccgacccaucgccacguuaucggaaagcccugcccuaaaccccauagacucaaccacaugggcauuuguuccugcggccuguauaagcacccuggggugcccgugaaguggaaacggugaggacuaguaauaaggaaacuguaugaaugucugugggcaggaagugaagagauccuucuguaaagguuuuuggaauuaugucugcugaauaauaaacuuuuuugaaauaauaaaucugguagaaaaaugagaucucaaaggcucuuuucagagccaccaaaaaaaaaaaaaaaaaaaaaaaaaaaaaaaaaaaaaaaaaaaaaaaaaaaaaaaaaaaaaaaaaaaaaaaaaaaaaaaaaaaaaaaaaaaaaaaaaaaaa

SEQ ID NO: 37687 - RNA, 1809 nt, Artificial Sequence
  mRNA product Design b-4 (hSL-A100) comprising derived and/or modified sequence from LASV(LASV237-NIG-2010;Clade II)__AIT17638__GPCmut10 (opt5)
aggagagucccgcagucggcguccagcggcucugcuuguucgugugugugucguugcaggccuuauucaagcuuaccaugggccagaucauuaccuucuuucaagaggugccccacgucaucgaagagguuaugaacauugugcugaucgcccucagccugcuugcuauucugaaggggaucuacaauguggccacaugcggacucuucggccuggucuccuuucuucugcucugugggagaucuugcagcacgaccuauaaaggaguguacgaacugcagacacuggagcucgacauggcgucccugaacauguguaugccucuuucuugcaccaagaauaacagccaucacuauaucaugguuggcaaugaaacagggcuggagcucacccugacaaacaccuccauuaucaaucauaaauucuguaaccuuucugaugcucacaagaaagaccuguacgaucaugcccucaugagcauuaucuccacguuucaccugagcauuccgaauuucaaccaguaugaggccaugucuugcgacuuuaauggaggcaagaucuccgugcaguacaaccugagccacaccuaugcugucgaugccgcuaaucauuguggcacaauugccaacggggugcuccaaaccuucaugcggauggcguggggaggcucuuacaucgcccuggacuccgggaagggaagcugggauugcaucaugacaucuuaccaguaucuuauuauccagaauaccacgugggaagaccacugucaguuuucccgccccagcccuauuggcuaccuggggcuccugucccaaagaacacgggauaucuauauuucucgcagacuucugggaaccuucacauggacccucagcgacuccgagggcaacgaaacccccggcggguacugccugacacgguggaugcugaucgaggcugagcucaaauguuuuggaaacacggccguugcuaagugcaaugaaaaacaugaugaggaguucugcgacaugcugcgccuuuuugauuucuguaagcaggccaucagacggcugaaaaccgaagcgcagaugagcauucagcucaucaacaaggccgugaaugcucugauuaacgaccaacuuaucaugaagaaucaucugcgcgacauuaugggcaucccuuauugcaacuacucuaaauauugguaccucaaucacacagucaccgggaagacaucccugcccagauguuggcuggugagcaacggaucuuaccucaaugaaacccacuucagcgaugacaucgagcagcaggccgauaacaugauuacggagcugcuucaaaaagaauauauggaccggcagggcaagacaccucuggggcucguggaucuguuugucuucuccaccucuuuuuaccugaucagcauuuuccuucaccucaucaaaauuccgacccaucgccacaucacaggaaagcccugcccuaaaccccauagacugaaucacaugggcauuuguuccugcggccuguauaagcacccugggguucccgugaaguggaaacggugaggacuaguaauaaggaaacuguaugaaugucugugggcaggaagugaagagauccuucuguaaagguuuuuggaauuaugucugcugaauaauaaacuuuuuugaaauaauaaaucugguagaaaaaugagaucucaaaggcucuuuucagagccaccaaaaaaaaaaaaaaaaaaaaaaaaaaaaaaaaaaaaaaaaaaaaaaaaaaaaaaaaaaaaaaaaaaaaaaaaaaaaaaaaaaaaaaaaaaaaaaaaaaaaa

SEQ ID NO: 37688 - RNA, 1809 nt, Artificial Sequence
  mRNA product Design b-4 (hSL-A100) comprising derived and/or modified sequence from LASV(LASV253-NIG-2011;Clade II)__AIT17670__GPCmut10 (opt5)
aggagagucccgcagucggcguccagcggcucugcuuguucgugugugugucguugcaggccuuauucaagcuuaccaugggccagaucauuaccuucuuucaagaggugccccacgucaucgaagagguuaugaacauugugcugaucgcccucagccugcuugcuauucugaaggggaucuacaauguggccacaugcggacucuucggccuggucuccuuucuucugcucugugggagaucuugcagcacgaccuauaaaggaguguacgaacugcagacacuggagcucgacauggcgucccugaacauguguaugccucuuucuugcaccaagaauaacagccaucacuauaucaugguuggcaaugaaacagggcuggagcucacccugacaaacaccuccauuaucaaucauaaauucuguaaccuuucugaugcucacaagaaaaaucuguacgaccaugcccucaugagcauuaucuccacguuucaccugagcauuccgaacuucaaucaguaugaggccaugucuugcgauuuuaacggaggcaagaucuccgugcaguacaaucugagccacaccuaugcugucgacgccgcuaaccauuguggcacaauugccaauggggugcuccaaaccuucaugcggauggcguggggaggcucuuacaucgcccuggauuccgggaagggaagcugggacugcaucaugacaucuuaccaguaucuuauuauccagaacaccacgugggaagaucacugucaguuuucccgccccagcccuauuggcuaccuggggcuccugucccaaagaacacgggacaucuauauuucucgcagacuucugggaaccuucacauggacccucagcgauuccgagggcaacgaaacccccggcggguacugccugacacgguggaugcugaucgaggcugagcucaaauguuuuggaaauacggccguugcuaagugcaacgaaaaacaugacgaggaguucugcgauaugcugcgccuuuuugacuucuguaagcaggccaucagacggcugaaagcggaagcccagaugagcauucagcucaucaauaaggcugugaacgcccugauuaaugaucaacuuaucaugaagaaccaucugcgcgacauuaugggcaucccuuauugcaauuacucuaaauauugguaccucaaccacaccgucacagggagaaccucccugccccgguguuggcuggugagcaauggaucuuaccucaacgaaacacacuucagcgacgauaucgagcagcaggcugacaauaugauuaccgagcugcuucaaaaggaauauaucgaucgccagggcaaaacgccucuggggcucguggaccuguuugucuucuccacaucuuuuuaccugauuagcaucuuccuucaccucguuaagauuccgacccauagacacaucauuggaaaacccugcccuaagccccaucggcugaaccacaugggcaucuguuccugcggccuguauaaacacccuggggugcccgugaaguggaagcgcugaggacuaguaauaaggaaacuguaugaaugucugugggcaggaagugaagagauccuucuguaaagguuuuuggaauuaugucugcugaauaauaaacuuuuuugaaauaauaaaucugguagaaaaaugagaucucaaaggcucuuuucagagccaccaaaaaaaaaaaaaaaaaaaaaaaaaaaaaaaaaaaaaaaaaaaaaaaaaaaaaaaaaaaaaaaaaaaaaaaaaaaaaaaaaaaaaaaaaaaaaaaaaaaaa

SEQ ID NO: 37689 - RNA, 1809 nt, Artificial Sequence
  mRNA product Design b-4 (hSL-A100) comprising derived and/or modified sequence from LASV(LASV254-NIG-2011;Clade II)__AIT17674__GPCmut10 (opt5)
aggagagucccgcagucggcguccagcggcucugcuuguucgugugugugucguugcaggccuuauucaagcuuaccaugggccagaucauuaccuucuuucaagaggugccccacgucaucgaagagguuaugaacauugugcugaucgcccucagccugcuugcuauucugaaggggaucuacaauguggccacaugcggacucuucggccuggucuccuuucuucugcucugugggagaucuugcagcacgaccuauaaaggaguguacgaacugcagacacuggagcucgacaugaccaaccugaauauguguaugccucuuuccugcacaaagaacaauucucaucacuauaucaugguuggcaacgaaaccgggcuggagcucacacugaccaauacgagcauuaucaaccauaaauucuguaaucuuuccgaugcgcacaagaaaaaccuguacaaucaugcucucaugucuauuaucagcaccuuucaccuguccauuccgaacuucaaucaguaugaggccaugagcugcgacuuuaacggaggcaagaucucugugcaguacaaucugucccacagcuaugccgucgaugcugccaaccauuguggcacaauugcuaacggggugcuccaaaccuucaugcggauggccuggggaggcucuuacaucgcgcuggacuccgggaagggaaauugggauugcaucaugacaagcuaccaguaucuuauuauccagaacaccacgugggaagaccacugucaguuuucucgccccuccccuauuggcuaccuggggcuccugagccaaagaacacgggauaucuauauuucccgcagacuucugggaaccuucacauggacccucucugacagcgagggcaaugaaacccccggcggguacugccugacacgguggaugcugaucgaggccgagcucaaauguuuuggaaacacggcuguugccaagugcaaugaaaaacaugaugaggaguucugcgacaugcugcgccuuuuugauuucuguaagcaggcuaucagacggcugaaaaccgaagcccaggcgaacauucagcucaucaauaaggccgugaacgcucugauuaaugaccaacuuaucaugaagaaccaucugcgcgauauuaugggcaucccuuauugcaauuacuccaaauauugguaccucaaccacacagucaccgggaagacaagccugcccagauguuggcuggugucuaauggauccuaccucaacgaaacccacuucagcgacgacaucgagcagcaggccgauaauaugauuacggagcugcuucaaaaagaauauauggaccggcagggcaagacaccucuggggcucguggaucuguuugucuucucuaccagcuuuuaccugaucuccauuuuccuucaccucguuaaaaucccgacccaucgccacgugauuggaaagcccugcccuaaaccccauagacugaaccacaugggcaucuguucuugcggccuguauaagcacccuggggugcccgucaaguggaaacggugaggacuaguaauaaggaaacuguaugaaugucugugggcaggaagugaagagauccuucuguaaagguuuuuggaauuaugucugcugaauaauaaacuuuuuugaaauaauaaaucugguagaaaaaugagaucucaaaggcucuuuucagagccaccaaaaaaaaaaaaaaaaaaaaaaaaaaaaaaaaaaaaaaaaaaaaaaaaaaaaaaaaaaaaaaaaaaaaaaaaaaaaaaaaaaaaaaaaaaaaaaaaaaaaa

SEQ ID NO: 37690 - RNA, 1809 nt, Artificial Sequence
  mRNA product Design b-4 (hSL-A100) comprising derived and/or modified sequence from LASV(Nig08-A19;Clade III)__ADU56618__GPCmut10 (opt5)
aggagagucccgcagucggcguccagcggcucugcuuguucgugugugugucguugcaggccuuauucaagcuuaccaugggccagaucgugaccuucuuucaagaggucccccacguuauugaagaggugaugaacaucgugcugauugcccucagcauccuggcuauucuuaaggggcuguacaauaucgccacaugcggacucaucggccuggucacguuccuucugcucuccgggagaucuuguagcaugaccuauaaaggaguguacgaacugcagacacuggagcucaacaugaauacccugaacaugugcaugccucuuuccuguacaaagaauaacucucaucacuauauuaugguuggcaaugaaaccgggcuggagcucacacugaccaacacgagccuucugcaucacaaauuuugcaaucucuccgacgcgcauaagaaaaaccuguacgaucacacccugaugucuaucauuagcacauuccaccucuccaucccgaauuuuaaccaguaugaggcuaugagcugugacuucaauggaggcaagauuaccgugcaguacaaccugucucauuccuaugccaucgaugccgcuaaucacugcggcacagucgccaacggggugcuucaaaccuuuaugcggauggcuuggggaggcagcuacauugcccuggacucugggcgcggaaagugggauuguaucaugacguccuaccaguaucucaucauucagaacacaaccugggaagaccauugccaguucagcagacccucuccuaucggcuaccuggggcuucugucccaacggacacgcgauauuuauaucagcagacggcuccugggaaccuuuaccuggacacuguccgacucugagggcaaugaaacgcccggcggguacugucucacccgcuggaugcugauugaggcggagcuuaaaugcuucggaaacacagccguugcuaaguguaaugaaaaacacgaugaggaauuuugcgacaugcugagacucuucgauuuuugcaagcaggccauccggcgccugaaagcugaggcccagaugagcauccagcuuauuaacaaggcggugaaugcccugaucaacgaccaacucauuaugaagaaucaccugagagauaucaugggcauuccuuauuguaacuacuccaaauauugguaccugaaucauaccagcacagggcggaccucucucccccgcugcuggcuggucuccaacggaagcuaccuuaaugaaacgcacuucucugacgacaucgagcagcaggcugauaacaugaucacagagaugcugcaaaaggaauaucucgacagacagggcaaaaccccucuggggcugguggaucuuuucguguuuagcaccuccuucuaccucauuucuaucuuucugcaucuggucaagauuccgacacaccggcauaucguuggaaaacccuguccuaagccccaccgccucaaucacaugggcauuugcagcuguggccuguauaaacagccuggggugcccgugagauggaagcggugaggacuaguaauaaggaaacuguaugaaugucugugggcaggaagugaagagauccuucuguaaagguuuuuggaauuaugucugcugaauaauaaacuuuuuugaaauaauaaaucugguagaaaaaugagaucucaaaggcucuuuucagagccaccaaaaaaaaaaaaaaaaaaaaaaaaaaaaaaaaaaaaaaaaaaaaaaaaaaaaaaaaaaaaaaaaaaaaaaaaaaaaaaaaaaaaaaaaaaaaaaaaaaaaa

SEQ ID NO: 37691 - RNA, 1812 nt, Artificial Sequence
  mRNA product Design b-4 (hSL-A100) comprising derived and/or modified sequence from LASV(G1180-SLE-2010;Clade IV)__AIT17168__GPCmut10 (opt5)
aggagagucccgcagucggcguccagcggcucugcuuguucgugugugugucguugcaggccuuauucaagcuuaccaugggccagaucgugaccuucuuucaagaggucccccacguuauugaagaggugaugaacaucgugcugauugcccucagcauccuggcuguccuuaaggggcuguacaauuucgccacaugcggacucgugggccugcuuacguuucugcuccugugugggagauccugcaccgcgucucgguauaaaggaguuuacgaacugcagacacucgagcugaacauggaaacccuuaauauguguaugccucugagcugcacaaagaacaauucccaucacuauauuauggugggcaacgagaccgggcucgagcugacacuuaccaauacgucuaucaucaaccauaaauucuguaaucugagcgacgcucacaagaaaaaccucuacgaucaugcccugauguccauuaucucuaccuuucaccugagcauuccgaauuucaaccaguaugaagccauguccugcgacuuuaauggaggcaagaucagcguccaguacaaccucucucacuccuaugcuggcgaugccgcuaaucauugugggacaguggccaacggaguucugcaaaccuucaugcgcauggcguggggcgggagcuacauugcccuugacucuggacacggcuccugggauugcaucaugacaagcuaccaguaucugauuauccagaacaccacgugggaggaccauugucaguuuucuagacccuccccuaucggguaccucggacugcuuagccaacggacacgcgauauuuauaucuccagacggcugcucggcaccuucacauggacccugucugacagcgaaggcaaggauacccccgggggauacugccugacacgcuggaugcucauugaggcugagcugaaauguuuuggcaauacggccguggcuaagugcaacgaaaaacacgacgaggaguucugcgauaugcuuagacuguuugacuucuguaagcaggccauccagcggcucaaagcggaagcccagauguccauucaacugaucaauaaggcugucaacgcccuuaucaaugaucagcugauuaugaagaaccaccuccgcgacaucauggggauuccuuauugcaauuacagcaaauauugguaccugaaccauaccacaaccggaaagacaucucugcccaaauguuggcucguguccaauggcagcuaccugaacgaaacccacuucucugacgauaucgagcagcaagcugacaauaugauuacggagaugcuucagaaggaauauauggagagacaggggaaaacaccucugggacucguggaucuguuugucuucagcaccuccuuuuaccugaucucuaucuuccuucaucucguuaagauuccgacccaccggcauaucgugggcaaaagcugccccaagccucaccgccugaaccacaugggcauuuguuccugcgggcuguauaagcagcccggagugccugucaaauggaagagaugaggacuaguaauaaggaaacuguaugaaugucugugggcaggaagugaagagauccuucuguaaagguuuuuggaauuaugucugcugaauaauaaacuuuuuugaaauaauaaaucugguagaaaaaugagaucucaaaggcucuuuucagagccaccaaaaaaaaaaaaaaaaaaaaaaaaaaaaaaaaaaaaaaaaaaaaaaaaaaaaaaaaaaaaaaaaaaaaaaaaaaaaaaaaaaaaaaaaaaaaaaaaaaaaa

SEQ ID NO: 37692 - RNA, 1812 nt, Artificial Sequence
  mRNA product Design b-4 (hSL-A100) comprising derived and/or modified sequence from LASV(G1442-SLE-2011;Clade IV)__AIT17180__GPCmut10 (opt5)
aggagagucccgcagucggcguccagcggcucugcuuguucgugugugugucguugcaggccuuauucaagcuuaccaugggccagaucgugaccuucuuucaagaggucccccacguuauugaagaggugaugaacaucgugcugauugcccucagcauccuggcuguccuuaaggggcuguacaauguggccacaugcggacucauuggccugguuacguuccuucugcucugugggagauccugcaccacaacccuguauaaaggaguguacgaacugcagacacucgagcugaacauggaaacccuuaauauguguaugccucugucuugcacaaagaacaauagccaucacuauauccgggucggcaacgagaccgggcucgagcugacgcuuaccaauacauccaucauuaaccauaaauuuuguaaucugucugacgcgcacaagaaaaaccucuacgaucaugcucugaugagcaucauuuccaccuuccaccugucuaucccgaauuuuaaccaguaugaagccaugagcugcgacuucaauggaggcaagauuuccgugcaguacaaccucagccacucuuaugccggcgaugcugccaaucauugugggacaguugcuaacggagugcugcaaaccuuuaugcgcauggccuggggcggguccuacaucgcgcuugacagcggaagaggcaacugggauugcauuaugacgucuuaccaguaucugaucauccagaauacaaccugggacgaucacugucaguucucccggcccagcccuauuggguaccucggacugcuuucucaacgcacaagagacgucuauaucucccggcgccugcucggcaccuuuaccuggacacugagcgauuccgagggcaaggacacgcccgggggauacugccugaccagauggaugcucauugaagccgagcugaaauguuucggcaacacagcuguggccaagugcaaugagaaacaugaugaagaguuuugcgacaugcuucggcuguucgauuuuuguaagcaggcuauccagcgccucaaagccgaagcgcagaugucuauucaacugaucaacaaggccgugaaugcucuuaucaacgaccagcugauuaugaagaaucaccucagagacaucauggggauuccuuauugcaacuacagcaaauauugguaccugaauaacaccgccacaggaaagaccucccugcccaaauguuggcucaucagcaauggcucuuaccugaacgagacgcacuucuccgaugacauugaacaggaggcugauaauaugaucacagagaugcuucaaaaggaauauauggagcggcaggggaaaaccccucugggacucgucgaccuguucguuuuuagcaccucuuucuaccugaucagcauuuuucuucaucucgugaagaucccgacacaccgccauauugugggcaaauccugccccaagccucacagacugaaccauaugggcaucuguucuugcgggcuguauaagcagcccggagucccugugcgguggaaacgcugaggacuaguaauaaggaaacuguaugaaugucugugggcaggaagugaagagauccuucuguaaagguuuuuggaauuaugucugcugaauaauaaacuuuuuugaaauaauaaaucugguagaaaaaugagaucucaaaggcucuuuucagagccaccaaaaaaaaaaaaaaaaaaaaaaaaaaaaaaaaaaaaaaaaaaaaaaaaaaaaaaaaaaaaaaaaaaaaaaaaaaaaaaaaaaaaaaaaaaaaaaaaaaaaa

SEQ ID NO: 37693 - RNA, 1812 nt, Artificial Sequence
  mRNA product Design b-4 (hSL-A100) comprising derived and/or modified sequence from LASV(G3010-SLE-2013;Clade IV)__AIT17344__GPCmut10 (opt5)
aggagagucccgcagucggcguccagcggcucugcuuguucgugugugugucguugcaggccuuauucaagcuuaccaugggccagaucgugaccuucuuucaagaggucccccacguuauugaagaggugaugaacaucgugcugauugcccucagcauccuggcuguccuuaaggggcuguacaauuucgccacaugcggacucgugggccugguuacguuucuucugcucugugggagauccugcaccacaucucuguauaaaggaguguacgaacugcagacccucgagcugaacauggaaacacuuaauauguguaugccucugagcugcaccaagaacaauucccaucacuauauuauggucggcaacgagacagggcucgagcugacccuuacgaauaccucuaucaucaaccauaaauucuguaaucugagcgacgcgcacaagaaaaaccucuacaaucaugcucugauguccauuaucucuacauuucaccugagcauuccgaacuucaaucaguaugaagccauguccugcgauuuuaacggaggcaagaucagcgugcaguacaaucucucucacuccuaugccggcgacgcugccagccauugugggaccguugcuaacggagugcugcaaacauucaugcggauggccuggggcgggucuuacauugcgcuugauuccggauacggcaagugggacugcaucaugaccagcuaucaguaccugauuauccagaacacgacaugggaggaucacugucaguuuucucgccccuccccuaucggguaucucggacugcuuagccaaagaacccgggacauuuacaucucccgcagacugcucggcacauucaccuggacccugucugauagcgaaggcaaagacacacccgggggauauugccugacgcgguggaugcucauugaggccgagcugaaguguuuuggcaauaccgcugucgccaaaugcaacgaaaagcaugaugaggaguucugcgacaugcuucgccuguuugauuucuguaaacaggcuauccagagacucaagacagaagcccagauguccauucaacugaucaauaaggcggugaacgcccuuaucaaugaccagcugauuaugaaaaaccaccuccgggauaucauggggauuccuuacugcaauuauagcaaguacugguaccugaaccacaccacaaccggaaaaacgucucugcccaaguguuggcucguguccaauggcagcuaucugaacgaaacacauuucucugacgacaucgagcagcaagcugauaauaugauuaccgagaugcuucagaaagaauacauggagcgccaggggaagaccccucugggacucgucgaccuguuuguuuucagcacauccuuuuaucugaucucuaucuuccuucaccucgugaaaauuccgacccauagacacaucgugggcaagagcugccccaagccucaucggcugaaccacaugggcauuuguuccugcgggcuguacaaacagcccggagucccugugcgcuggaagagaugaggacuaguaauaaggaaacuguaugaaugucugugggcaggaagugaagagauccuucuguaaagguuuuuggaauuaugucugcugaauaauaaacuuuuuugaaauaauaaaucugguagaaaaaugagaucucaaaggcucuuuucagagccaccaaaaaaaaaaaaaaaaaaaaaaaaaaaaaaaaaaaaaaaaaaaaaaaaaaaaaaaaaaaaaaaaaaaaaaaaaaaaaaaaaaaaaaaaaaaaaaaaaaaaa

SEQ ID NO: 37694 - RNA, 1812 nt, Artificial Sequence
  mRNA product Design b-4 (hSL-A100) comprising derived and/or modified sequence from LASV(G502-SLE-2009;Clade IV)__AIT17126__GPCmut10 (opt5)
aggagagucccgcagucggcguccagcggcucugcuuguucgugugugugucguugcaggccuuauucaagcuuaccaugggccagaucgugaccuucuuucaagaggucccccacguuauugaagaggugaugaacaucgugcugauugcccucagcauccuggcuguccuuaaggggcuguacaauuucgccacaugcggacucgugggccugcuuacguuucugcuccugugugggagauccugcaccacaggacuguauaaaggcguuuacgaacuccagacccuggagcuuaacauggaaacacugaauauguguaugccucucucuugcaccaagaacaauagccaucacuauauuaugguggggaacgagacaggacuggagcuuacccugacgaauaccuccaucaucaaccauaaauucuguaaucucucugacgcgcacaagaaaaaccuguacgaucaugcucugaugagcauuaucuccacauuucaccucucuauuccgaauuucaaccaguaugaagccaugagcugcgacuuuaauggcggcaagaucuccguccaguacaaccugagccacucuuaugccggggaugcugccgaccauuguggaaccguggcuaauggcguucuucaaacauucaugcggauggccuggggaggguccuacauugcgcuggauagcggccgcgggagaugggacugcaucaugaccucuuaccaguaucucauuauccagaacacgacaugggaggaucacugucaguuuucccggcccagcccuaucggauaccugggccuucugucucaacgcaccagagacauuuauaucucccggcgccuccugggcacauucaccuggacccugagcgauuccgaagggaaggacacacccggaggcuacugccucacgagauggaugcugauugaggccgagcuuaaauguuuugggaacaccgcuguggccaagugcaaugaaaaacaugaugaggaguucugcgacaugcugcggcucuuugauuucuguaagcaggcuauccagcgccugaaagccgaagcgcagaugucuauucaacuuaucaacaaggccgucaaugcucugaucaacgaccagcucgugaugaagaaucaccugagagacauuaugggaaucccuuauugcaacuacagccgguauugguaccugaaucacacaaccacaggccgcaccucccuccccaaauguuggcuggugagcaacgggucuuaccuuaaugaaacgcauuucuccgaugacauugagcagcaagccgauaacaugaucacagagaugcugcagaaggaauauauggagagacagggaaaaaccccucucggccuggucgaccuguuuguuuucagcaccucuuuuuaccuuauuagcaucuuccuccaccuggugaagaucccgacacaucggcacauugugggcaaauccugccccaagccucaucgccugaaucacauggggaucuguucuugcggacucuauaaacagcccggcgucccugugaaguggaagagaugaggacuaguaauaaggaaacuguaugaaugucugugggcaggaagugaagagauccuucuguaaagguuuuuggaauuaugucugcugaauaauaaacuuuuuugaaauaauaaaucugguagaaaaaugagaucucaaaggcucuuuucagagccaccaaaaaaaaaaaaaaaaaaaaaaaaaaaaaaaaaaaaaaaaaaaaaaaaaaaaaaaaaaaaaaaaaaaaaaaaaaaaaaaaaaaaaaaaaaaaaaaaaaaaa

SEQ ID NO: 37695 - RNA, 1812 nt, Artificial Sequence
  mRNA product Design b-4 (hSL-A100) comprising derived and/or modified sequence from LASV(G733-SLE-2010;Clade IV)__AIT17154__GPCmut10 (opt5)
aggagagucccgcagucggcguccagcggcucugcuuguucgugugugugucguugcaggccuuauucaagcuuaccaugggccagaucgugaccuucuuucaagaggucccccacguuauugaagaggugaugaacaucgugcugauugcccucagcauccuggcuguccuuaaggggcuguacaauuucgccacaugcggaauugugggccucguuuccuuucugcuucugugugggagaucuugcacgaccagccucuauaaaggaguguacgaacugcagacacuggagcucaacauggaaacccugaauauguguaugccucuuuccugcacaaagaacaauucucaucacuauaucauggucggcaacgagaccgggcuggagcucacacugaccaauacgagcaucauuaaccauaaauucuguaaucuuuccgacgcgcacaagaaaaaccuguacgaucaugcucucaugucuaucauuagcaccuuucaccuguccaucccgaauuucaaccaguaugaagccaugagcugcgacuuuaauggaggcaagauuucugugcaguacaaccugucccacagcuaugccggcgaugcugccaaucauugugggacaaucgcuaacggaguucuccaaaccuucaugcggauggccuggggcgggucuuacauugcgcuggacuccggacgcgauagaugggacugcaucaugacaagcuaccaguaucuuaucauucagaacaccacgugggaggaucacugucaguuuucucggcccuccccuaucggcuaccuggggcuccugagccaacgcacaagagacauuuauaucucccggcgccuucugggaaccuucacauggacccucucugauagcgaaggcaaggacacccccggcggguacugccugacaagauggaugcugauugaggccgagcucaaauguuuuggaaauacggcuguggccaagugcaacgaaaaacaugaugaggaguucugcgacaugcugcggcuuuuugauuucuguaagcaggcuauccagcgccugaaagccgaagcgcagauguccauccaacucauuaauaaggccgucaacgcucugaucaaugaccagcuuauuaugaagaaccaccugagagacaucaugggcauuccuuauugcaauuacagcaaauauugguaccucaaccacaccacaaccgggaagacaucucugcccaaauguuggcugguguccaauggaagcuaccucaacgaaacccauuucucugaugacaucgagcagcaagccgauaauaugaucacggagaugcugcagaaggaauauauggagcggcagggcaaaacaccucuugggcugguggaccucuuugucuucagcaccuccuuuuaccugauuucuaucuuccugcaccuuguuaagauuccgacccaucgccacguggugggaaaaagcugccccaagccucauagacucaaccacaugggcaucuguuccugcggccuguaugggcagcccggagucccugugaaguggaaacggugaggacuaguaauaaggaaacuguaugaaugucugugggcaggaagugaagagauccuucuguaaagguuuuuggaauuaugucugcugaauaauaaacuuuuuugaaauaauaaaucugguagaaaaaugagaucucaaaggcucuuuucagagccaccaaaaaaaaaaaaaaaaaaaaaaaaaaaaaaaaaaaaaaaaaaaaaaaaaaaaaaaaaaaaaaaaaaaaaaaaaaaaaaaaaaaaaaaaaaaaaaaaaaaaa

SEQ ID NO: 37696 - RNA, 1812 nt, Artificial Sequence
  mRNA product Design b-4 (hSL-A100) comprising derived and/or modified sequence from MOPV/LASV reassortant(IGS-1;Clade IV)__AFY05576__GPCmut10 (opt5)
aggagagucccgcagucggcguccagcggcucugcuuguucgugugugugucguugcaggccuuauucaagcuuaccaugggccagaucgugaccuucuuucaagaggucccccacguuauugaagaggugaugaacaucgugcugauugcccucagcguccuggcugugcuuaaggggcuguacaauuucgccacaugcggacucguuggccuggugacguuucuucugcucugugggagauccugcaccacaucucuguauaaaggagucuacgaacugcagacccucgagcugaacauggaaacacuuaauauguguaugccucugagcugcaccaagaacaauucccaucacuauaucauggugggcaacgagacagggcucgagcugacccuuacgaauaccucuauuaucaaccauaaauucuguaaucugagcgacgcgcacaagaaaaaccucuacgaucaugcucugauguccaucauuucuacauuucaccugagcaucccgaauuucaaccaguaugaagccauguccugcgacuuuaauggaggcaagauuagcguucaguacaaccucucucacuccuaugccggcgaugcugccaaucauugugggaccguggcuaacggaguccugcaaacauucaugcggauggccuggggcgggagcuacaucgcgcuugacucuggacgcggcaacugggauugcauuaugaccuccuaccaguaucugaucauucagaauacgacaugggaggaccacugucaguuuagcagacccucuccuaucggguaccucggacugcuuucccaacggacccgcgauaucuauauuagcagacggcugcucggcacauucaccuggacccuguccgacucugaaggcgaggauacacccgggggauacugccugacgcgcuggaugcucaucgaggccgaacugaaguguuuuggcaacaccgcuguggccaaaugcaaugagaagcaugacgaagaguucugcgauaugcuuagacuguuugacuucuguaaacaggcuauucagcggcucaaggccgaagcgcagaugagcauccaacugauuaacaaagccgugaaugcucuuaucaacgaucagcugaucaugaagaaucaccuccgcgacauuauggggaucccuuauugcaacuacuccaaguauugguaccugaaucacacaaccacaggaagaaccagccugcccaaauguuggcucgucucuaacggcuccuaccugaaugagacgcauuucagcgacgauauugagcagcaagccgacaacaugaucacagaaaugcuucagaaggaguauauggaacggcaggggaaaaccccucugggacucguugaucuguuuguguucucuaccagcuuuuaccugauuuccaucuuccuucaccucgugaagaucccgacacaucgccacauugucggcaaaucuugccccaagccucauagacugaaucacaugggcaucuguagcugcgggcuguauaaacagcccggagugccuguuaaguggaagcggugaggacuaguaauaaggaaacuguaugaaugucugugggcaggaagugaagagauccuucuguaaagguuuuuggaauuaugucugcugaauaauaaacuuuuuugaaauaauaaaucugguagaaaaaugagaucucaaaggcucuuuucagagccaccaaaaaaaaaaaaaaaaaaaaaaaaaaaaaaaaaaaaaaaaaaaaaaaaaaaaaaaaaaaaaaaaaaaaaaaaaaaaaaaaaaaaaaaaaaaaaaaaaaaaa

SEQ ID NO: 37697 - RNA, 1812 nt, Artificial Sequence
  mRNA product Design b-4 (hSL-A100) comprising derived and/or modified sequence from LASV(LM765-SLE-2012;Clade IV)__AIT17814__GPCmut10 (opt5)
aggagagucccgcagucggcguccagcggcucugcuuguucgugugugugucguugcaggccuuauucaagcuuaccaugggccagaucgugaccuucuuucaagaggucccccacguuauugaagaggugaugaacaucgugcugauugcccucagcauccuggcuguccuuaaggggcuguacaauuucgccacaugcggacucgugggccugguuacguuucuucugcucugugggagauccugcaccacaucucuguauaaaggaguguacgaacugcagacccucgagcugaacauggaaacacuuaauauguguaugccucugagcugcaccaagaacaauucccaucacuauauuauggucggcaacgagacagggcucgagcugacccuuacgaauaccucuaucaucgaccauaaauucuguaaccugagcgaugcgcaccggaagaaucucuacgaccaugcucugauguccauuaucucuacauuucaccugagcauuccgaacuucaaucaguaugaagccauguccugcgauuuuaacggaggcaaaaucagcgugcaguacaaucucucucacuccuaugccaaggacgcugccgaucauuguggcaccguugcuaacggggugcugcaaacauucaugcgcauggccuggggaggcagcuacauugcgcuugacucugggagaggacggugggauugcaucaugaccuccuaccaguaucugauuauccagaauacgacaugggaggaccacugucaguuuagccgccccucuccuaucggcuaccucgggcugcuuucccaaagaacccgggauauuuauaucagccgcagacugcucggaacauucaccuggacccuguccgacucugaaggcaaggauacacccggcggguacugccugacgcgguggaugcucauugaggccgagcugaaauguuuuggaaacaccgcugucgccaagugcaacgaaaaacaugacgaggaguucugcgauaugcuucgccuguuugacuucuguaagcaggcuauccagagacucaaagccgaagcgcagaugagcauucaacugaucaauaaggccgugaacgcucuuaucaaugaccagcugauuaugaagaaccaccuccgggauaucaugggcauuccuuauugcaauuacuccaaauauugguaccugaaccacacaaccacagggaagaccagccugcccaaauguuggcucgugucuaauggauccuaccugaacgaaacgcauuucagcgacgauaucgagcagcaagccgacaauaugauuacagagaugcuucagaaggaauauauggagcgccagggcaaaaccccucuggggcucgucgaucuguuuguuuucucuaccagcuuuuaccugaucuccaucuuccuucaccucgugaagauuccgacacauagacacaucgugggaaaacccugcccuaagccccaucggcugaaccacaugggcauuuguucuugcggccuguauaagcagccugggguccccgugaaauggaagcgcugaggacuaguaauaaggaaacuguaugaaugucugugggcaggaagugaagagauccuucuguaaagguuuuuggaauuaugucugcugaauaauaaacuuuuuugaaauaauaaaucugguagaaaaaugagaucucaaaggcucuuuucagagccaccaaaaaaaaaaaaaaaaaaaaaaaaaaaaaaaaaaaaaaaaaaaaaaaaaaaaaaaaaaaaaaaaaaaaaaaaaaaaaaaaaaaaaaaaaaaaaaaaaaaaa

SEQ ID NO: 37698 - RNA, 1812 nt, Artificial Sequence
  mRNA product Design b-4 (hSL-A100) comprising derived and/or modified sequence from LASV(LM776-SLE-2012;Clade IV)__AIT17824__GPCmut10 (opt5)
aggagagucccgcagucggcguccagcggcucugcuuguucgugugugugucguugcaggccuuauucaagcuuaccaugggccagaucgugaccuucuuucaagaggucccccacguuauugaagaggugaugaacaucgugcugauugcccucagcauccuggcuguccuuaaggggcuguacaauuucgccacaugcggacucgugggccugguuacguuucuucugcucugugggagauccugcaccacaucuguguauaaaggagucuacgaacugcagacccuggagcucaacauggaaacacugaauauguguaugccucuuagcugcaccaagaacaauucccaucacuauauuauggugggcaacgagacagggcuggagcucacccugacgaauaccucuaucaucaaccauaaauucuguaaucuuagcgacgcgcacaagaaaaaccuguacgaucaugcucucauguccauuaucucuacauuucaccugagcauuccgaauuucaaccaguaugaagccauguccugcgacuuuaauggaggcaagaucagcguucaguacaaccugucucacuccuaugccggcgaugcugccaaucauugugggaccguggcuaacggaguccuccaaacauucaugcggauggccuggggcgggagcuacauugcgcuggacucuggacacggcaagugggauugcaucaugaccuccuaccaguaucuuauuauccagaacacgacaugggaggaccauugucaguuuagccgccccucuccuaucggguaccugggacuccugucccaaagaacccgggauauuuauaucagccgcagacuucugggcacauucaccuggacccucuccgacucugaaggcaaagauacacccgggggauacugccugacgcgguggaugcugauugaggccgagcucaaguguuuuggcaauaccgcuguggccaaaugcaacgaaaagcacgacgaggaguucugcgauaugcugcgccuuuuugacuucuguaaacaggcuauccagagacugaaggccgaagcgcagaugagcauucaacucaucaauaaggccgugaacgcucugaucaaugaucagcuuauuaugaaaaaccaucugcgggacaucauggggauuccuuauugcaauuacuccaaguauugguaccucaaccacacaaccacaggaaaaaccagccugcccaaguguuggcuggucucuaauggcuccuaccucaacgaaacgcacuucagcgacgauaucgagcagcaagccgacaauaugauuacagagaugcugcagaaagaauauauggagcgccaggggaagaccccucuuggacugguugaucucuuuguguucucuaccagcuuuuaccugaucuccaucuuccugcaucuugugaaaauuccgacacacagacauaucgucggcaagucuugccccaagccucaccggcucaaccacaugggcauuuguagcugcgggcuguauaaacagcccggagugccuguucgcuggaagagaugaggacuaguaauaaggaaacuguaugaaugucugugggcaggaagugaagagauccuucuguaaagguuuuuggaauuaugucugcugaauaauaaacuuuuuugaaauaauaaaucugguagaaaaaugagaucucaaaggcucuuuucagagccaccaaaaaaaaaaaaaaaaaaaaaaaaaaaaaaaaaaaaaaaaaaaaaaaaaaaaaaaaaaaaaaaaaaaaaaaaaaaaaaaaaaaaaaaaaaaaaaaaaaaaa

SEQ ID NO: 37699 - RNA, 1812 nt, Artificial Sequence
  mRNA product Design b-4 (hSL-A100) comprising derived and/or modified sequence from LASV(Mad39;Clade IV)__ANH09722__GPCmut10 (opt5)
aggagagucccgcagucggcguccagcggcucugcuuguucgugugugugucguugcaggccuuauucaagcuuaccaugggccagaucgugaccuucuuucaagaggucccccacguuauugaagaggugaugaacaucgugcugauugcccucagcauccuggcuguccuuaaggggcuguacaauguggccacaugcggacucauuggccugguuacguuccuucugcucugugggagauccugcaccacaacccuguauaaaggaguguacgaacugcaggcgcucgagcugaacauggaaacacuuaauauguguaugccucugucuugcaccaagaacaauagccaucacuauauccgggucggcaacgagacagggcucgagcugacccuuacgaauaccucccugaucaaccauaaauuuuguaaucucucugacgcucacaagaaaaaccuguacgaucaugcccugaugagcauuaucuccacauuccaccucucuauuccgaauuuuaaccaguaugaagccaugagcugcgacuucaaugauggaaagaucuccgugcaguacaaccugagccacaccuaugcuggcgacacagccaaucauuguggcaccguugcuaacggggugcuucaaacguuuaugcgcauggccuggggaggcucuuacauugcgcuggauuccgggagaggaggcugggacugcaucaugacaagcuaccaguaucucauuauccagaacaccacaugggaggaucacugucaguucucucggcccuccccuaucggguaccugggacuucugagccaacgcaccagagacauuuauaucucucggcgccuccugggcaccuuuacauggacgcuguccgauagcgaaggcaaggacacccccgggggauacugccucacaagauggaugcugauugaggccgagcuuaaauguuucggcaauaccgcugucgccaagugcaacgaaaaacaugaugaggaauuuugcgacaugcugcgccucuucgauuuuuguaagcaggcuauccagcggcugaaagccgaggcgcagauguccauucaacuuaucaauaaggccgugaacgcucugaucaaugaccagcucauuaugaagaaccaccugagagacaucauggggauuccuuauugcaauuacucuaaauauugguaccugaaccacacagugaccggaaagacgagccuccccaaauguuggcuggucuccaauggcagcuaccuuaacgaaacacauuucucugaugacaucgagcagcaagccgauaauaugauuaccgagaugcugcagaaggaauauauggagcggcaggggaaaaccccucucggacugguugaccuguucguguuuuccaccagcuucuaccuuaucucuaucuuucuccaccuggugaagauuccgacacaucgccacgucgugggcaaacccugcccuaagccccauagacugaaccacaugggcaucuguagcugcggguucuauaagcagccuggaguucccgugcgguggaaacgcugaggacuaguaauaaggaaacuguaugaaugucugugggcaggaagugaagagauccuucuguaaagguuuuuggaauuaugucugcugaauaauaaacuuuuuugaaauaauaaaucugguagaaaaaugagaucucaaaggcucuuuucagagccaccaaaaaaaaaaaaaaaaaaaaaaaaaaaaaaaaaaaaaaaaaaaaaaaaaaaaaaaaaaaaaaaaaaaaaaaaaaaaaaaaaaaaaaaaaaaaaaaaaaaaa

SEQ ID NO: 37700 - RNA, 1812 nt, Artificial Sequence
  mRNA product Design b-4 (hSL-A100) comprising derived and/or modified sequence from LASV(Z0947-SLE-2011;Clade IV)__AIT17840__GPCmut10 (opt5)
aggagagucccgcagucggcguccagcggcucugcuuguucgugugugugucguugcaggccuuauucaagcuuaccaugggccagaucgugaccuucuuucaagaggucccccacguuauugaagaggugaugaacaucgugcugauugcccucagcauccuggcuguccuuaaggggcuguacaauuucgccacaugcggacucgugggccugguuacguuucuucugcucugugggagauccugcaccauuucucuguauaaaggaguguacgaacugcagacacucgagcugaacauggaaacccuuaauauguguaugccucugagcugcacaaagaacaauucccaucacuauaucauggucggcaacgagaccgggcucgagcugacacuuaccaauacgucuaucauuaaccauaaauucuguaaucugagcgacgcgcacaagaaaaaccucuacgaucaugcucugauguccaucauuucuaccuuucaccugagcaucccgaauuucaaccaguaugaagccauguccugcgacuuuaauggaggcaagauuagcgugcaguacaaccucucucacuccuaugccggcgaugcugccaaucauugugggacaguugcuaacggagugcugcaaaccuucaugcggauggccuggggcgggagcuacaucgcgcuugacucuggacgcgauagaugggacugcauuaugacauccuaccaguaucugaucauccagaacaccacgugggaggaucacugucaguuuagccggcccucuccuauuggcuaccucgggcugcuuucccaacgcacaagagacaucuauauuagccggcgccugcucggaaccuucacauggacccuguccgauucugaaggcaaggacacccccggcggguacugccugacaagauggaugcucaucgaggccgagcugaaauguuuuggaaauacggcugucgccaagugcaacgaaaaacaugaugaggaguucugcgacaugcuucggcuguuugauuucuguaagcaggcuauucagcgccucaaagccgaagcgcagaugagcauccaacugaucaauaaggccgugaacgcucuuauuaaugaccagcugaucaugaagaaccaccucagagacauuaugggcaucccuuauugcaauuacuccaaauauugguaccugaaccacaccacaaccgggaagacaagccugcccaaauguuggcucgugucuaauggauccuaccugaacgaaacccauuucagcgaugacauugagcagcaagccgauaauaugaucacggagaugcuucagaaggaauauauggagcggcagggcaaaacaccucuggggcucgucgaccuguuuguuuucucuaccagcuuuuaccugaucuccauuuuccuucaccucgugaagaucccgacccaucgccacauugugggaaaacccugcccuaagccccauagacugaaccacaugggcaucuguucuugcggccuguauaagcagccugggguccccgugaaauggaagcggugaggacuaguaauaaggaaacuguaugaaugucugugggcaggaagugaagagauccuucuguaaagguuuuuggaauuaugucugcugaauaauaaacuuuuuugaaauaauaaaucugguagaaaaaugagaucucaaaggcucuuuucagagccaccaaaaaaaaaaaaaaaaaaaaaaaaaaaaaaaaaaaaaaaaaaaaaaaaaaaaaaaaaaaaaaaaaaaaaaaaaaaaaaaaaaaaaaaaaaaaaaaaaaaaa

SEQ ID NO: 37701 - RNA, 1788 nt, Artificial Sequence
  mRNA product Design b-4 (A100) comprising derived and/or modified sequence from LASV(Josiah;Clade IV)__NP_694870__GPCmut10 (opt1)
aggagagucccgcagucggcguccagcggcucugcuuguucgugugugugucguugcaggccuuauucaagcuuaccaugggccagaucgugaccuucuuccaggaggucccccacgugaucgaggaggugaugaacaucguccugaucgcccucagcgugcuggccgugcugaaggggcucuacaacuucgcgaccugcggccuggucgggcuggugacguuccuccugcugugcggccgcuccugcaccaccagccucuacaaggggguguacgagcugcagacccuggagcucaacauggagacgcugaacaugugcaugccgcuguccugcaccaagaacaacagccaccacuacaucauggucggcaacgagaccggccucgagcugacgcugaccaacaccuccaucaucaaccacaaguucugcaaccucagcgacgcccacaagaagaaccuguacgaccacgcccugauguccaucaucagcaccuuccaccucuccauccccaacuucaaccaguacgaggccaugagcugcgacuucaacgggggcaagaucuccgugcaguacaaccugagccacuccuacgccggggacgcggccaaccacugcggcacgguggccaacgggguccugcagaccuucaugcggauggccuggggcggcagcuacaucgcgcucgacuccgggcgcggcaacugggacugcaucaugaccagcuaccaguaccugaucauccagaacaccacgugggaggaccacugccaguucucccggcccagccccaucggguaccugggccuccugucccagcgcacccgggacaucuacaucagccgccggcugcucggcaccuucaccuggacgcugagcgacuccgaggggaaggacaccccgggcggguacugccugacccgcuggaugcucaucgaggccgagcugaagugcuucggcaacaccgccguggccaagugcaacgagaagcacgacgaggaguucugcgacaugcugcggcuguucgacuucugcaagcaggccauccagcgccugaaggcggaggcccagaugagcauccagcugaucaacaaggccgugaacgcccucaucaacgaccagcugaucaugaagaaccaccuccgggacaucauggggauccccuacugcaacuacuccaaguacugguaccucaaccacacgaccaccggccgcaccagccugcccaagugcuggcuggucuccaacggcagcuaccucaacgagacgcacuucuccgacgacaucgagcagcaggccgacaacaugaucaccgagaugcugcagaaggaguacauggagcggcaggggaagacgccccugggccucguggaccuguucguguucagcaccuccuucuaccugaucagcaucuuccugcaccucgucaagaucccgacccaccgccacaucguggggaaguccugccccaagccccaccggcugaaccacaugggcaucugcagcugcgggcuguacaagcagcccggcgugccggucaaguggaagcgcugaggacuaguaauaaggaaacuguaugaaugucugugggcaggaagugaagagauccuucuguaaagguuuuuggaauuaugucugcugaauaauaaacuuuuuugaaauaauaaaucugguagaaaaaugagaucuaaaaaaaaaaaaaaaaaaaaaaaaaaaaaaaaaaaaaaaaaaaaaaaaaaaaaaaaaaaaaaaaaaaaaaaaaaaaaaaaaaaaaaaaaaaaaaaaaaaa

SEQ ID NO: 37702 - RNA, 1785 nt, Artificial Sequence
  mRNA product Design b-4 (A100) comprising derived and/or modified sequence from LASV(LP;Clade I)__AAF86701__GPCmut10 (opt1)
aggagagucccgcagucggcguccagcggcucugcuuguucgugugugugucguugcaggccuuauucaagcuuaccaugggccagaucaucaccuucuuccaggaggugccccacgucaucgaggaggugaugaacaucgugcugaucgcccucagccugcuggccauccucaaggggcuguacaacaucgcgaccugcggcaucaucgggcuggucgccuuccucuuccugugcggcaaguccugcagccugacgcucaagggcggguacgagcugcagacccuggagcucaacauggagacccugaacaugugcaugccgcuguccugcacgaagaacagcucccaccacuacauccgcgugggcaacgagaccgggcucgagcugacccugaccaacacgagcaucaucaaccacaaguucugcaaccucuccgacgcccacaagaagaaccuguacgaccacgcccugaugagcaucaucuccaccuuccaccucagcauccccaacuucaaccaguacgaggccauguccugcgacuucaacggcgggaagaucagcgugcaguacaaccugucccacagcuacgcgggcgacgccgccgagcacugcgggaccgucgccaacggcgugcugcagaccuucaugcggauggcguggggcgggcgcuacaucgcccucgacuccggcaaggggaacugggacugcaucaugacgagcuaccaguaccugaucauccagaacaccaccugggaggaccacugccaguucucccggcccagccccaucggcuaccugggccuccugucccagcgcacccgggacaucuacaucagccgccggcugcucgggacguucaccuggacccugagcgacuccgagggcaacgagacccccgggggcuacugccugacgcgcuggaugcucaucgaggccgagcugaagugcuucgggaacaccgccguggccaagugcaacgagaagcacgacgaggaguucugcgacaugcugcggcuguucgacuucugcaagcaggcgauccgccggcugaaggccgaggcccagaugagcauccagcugaucaacaaggccgucaacgcccucaucaacgaccagcugaucaugaagaaccaccuccgcgacaucaugggcauccccuacugcaacuacuccaaguacugguaccucaaccacaccagcuccggccggaccagccugcccaagugcuggcugaucuccaacgggagcuaccucaacgagacgcaguucuccgacgacaucgagcagcaggcggacaacaugaucaccgagaugcugcagaaggaguacaucgagcgccagggcaagaccccgcuggggcucguggacaucuucaucuucagcaccuccuucuaccugaucagcaucuuccugcaccugaucaagaucccgacgcaccggcacaucgugggcaagcccugccccaagccccaccgccucaaccacaugggggucugcuccugcggccuguacaagcacccgggcgugcccaccaaguggaagcggugaggacuaguaauaaggaaacuguaugaaugucugugggcaggaagugaagagauccuucuguaaagguuuuuggaauuaugucugcugaauaauaaacuuuuuugaaauaauaaaucugguagaaaaaugagaucuaaaaaaaaaaaaaaaaaaaaaaaaaaaaaaaaaaaaaaaaaaaaaaaaaaaaaaaaaaaaaaaaaaaaaaaaaaaaaaaaaaaaaaaaaaaaaaaaaaaa

SEQ ID NO: 37703 - RNA, 1785 nt, Artificial Sequence
  mRNA product Design b-4 (A100) comprising derived and/or modified sequence from LASV(803213;Clade II)__AAF86703__GPCmut10 (opt1)
aggagagucccgcagucggcguccagcggcucugcuuguucgugugugugucguugcaggccuuauucaagcuuaccaugggccagaucaucaccuucuuccaggaggugccccacgucaucgaggaggugaugaacaucgugcugaucgcccucagccugcuggccauccucaaggggaucuacaacgucgcgaccugcggccuguucgggcugaucuccuuccuccugcugugcggccgcagcugcuccgugacguacaaggggguguacgagcuccagacccuggagcugaacauggccaaccucaacaugugcaugccgcugagcugcaccaagaacaacucccaccacuacaucauggucggcaacgagacgggccuggagcucacccugaccaacaccagcaucaucaaccacaaguucugcaaccuguccgacgcccacaagaagaaccucuacgaccacgcccugaugagcaucaucuccacguuccaccugagcauccccaacuucaaccaguacgaggccauguccugcgacuucaacgggggcaagaucagcgugcaguacaaccucucccacagcuucgcgguggacgccgccaaccacugcgggaccaucgccaacggcguccugcagaccuucaugcggauggcguggggcggguccuacaucgcccuggacagcggcaaggggaacugggacugcaucaugaccuccuaccaguaccucaucauccagaacacgaccugggaggaccacugccaguucagccgccccucccccaucggcuaccuggggcugcucagccagcggacccgcgacaucuacaucagccggcgccugcugggcaccuucacguggacccucuccgacagcgagggcaacgaggcccccgggggcuacugccugacccgguggaugcugaucgaggccgagcucaagugcuucgggaacaccgccguggcgaagugcaacgagaagcacgacgaggaguucugcgacaugcugcgccuguucgacuucugcaagcaggccaucaagcggcucaagacggaggcccagauguccauccagcugaucaacaaggccgugaacgcccugaucaacgaccagcucaucaugaagaaccaccuccgcgacaucaugggcauccccuacugcaacuacagccgguacugguaccugaaccacaccgucaccgggaagaccucccugccccgcugcuggcuggugagcaacggcuccuaccugaacgagacgcacuucagcgacgacaucgagcagcaggcggacaacaugaucaccgagaugcuccagaaggaguacauggaccggcagggcaagaccccgcuggggcugguggaccucuucgucuucuccaccagcuucuaccugaucuccaucuuccugcaccuggugaagaucccgacgcaccgccacaucgugggcaagcccugccccaagccccaccggcucaaccacauggggaucugcagcugcggccuguacaagcacccggggguccccgugaaguggaagcgcugaggacuaguaauaaggaaacuguaugaaugucugugggcaggaagugaagagauccuucuguaaagguuuuuggaauuaugucugcugaauaauaaacuuuuuugaaauaauaaaucugguagaaaaaugagaucuaaaaaaaaaaaaaaaaaaaaaaaaaaaaaaaaaaaaaaaaaaaaaaaaaaaaaaaaaaaaaaaaaaaaaaaaaaaaaaaaaaaaaaaaaaaaaaaaaaaa

SEQ ID NO: 37704 - RNA, 1785 nt, Artificial Sequence
  mRNA product Design b-4 (A100) comprising derived and/or modified sequence from LASV(GA391;Clade III)__CAA36645__GPCmut10 (opt1)
aggagagucccgcagucggcguccagcggcucugcuuguucgugugugugucguugcaggccuuauucaagcuuaccaugggccagaucgugaccuucuuccaggaggucccccacgugaucgaggaggugaugaacaucguccugaucgcccucagcauccuggccauccugaaggggcucuacaacguggcgaccugcggccugaucgggcuggugacguuccuccugcuguccggccgcagcugcucccucaucuacaaggggaccuacgagcugcagacccuggagcucaacauggagacccugaacaugugcaugccgcugagcugcaccaagaacaacucccaccacuacauccgggucggcaacgagaccggccucgagcugacccugacgaacaccagcauccucaaccacaaguucugcaaccuguccgacgcccacaagcgcaaccuguacgaccacagccucauguccaucaucagcaccuuccaccuguccauccccaacuucaaccaguacgaggccaugagcugcgacuucaacgggggcaagaucaccgugcaguacaaccugucccacagcuucgccguggacgccgcggggcacugcggcacgcucgccaacgggguccugcagaccuucaugcggauggccuggggcggcuccuacaucgcccuggacagcgggcgcggcaacugggacugcaucaugaccuccuaccaguaccucaucauccagaacaccacgugggacgaccacugccaguucagccggcccucccccaucggguaccugggccugcucagccagcgcacccgggacaucuacaucagccgccggcugcugggcaccuucaccuggacgcucuccgacagcgaggggaacgagaccccgggcggguacugccugacccgcuggaugcugaucgaggcggagcucaagugcuucggcaacaccgccguggccaagugcaacgagaagcacgacgaggaguucugcgacaugcugcggcuguucgacuucugcaagcaggccauccgccggcucaagacggaggcccagauguccauccagcugaucaacaaggcggugaacgcccugaucaacgaccagcucaucaugaagaaccaccuccgcgacaucauggggauccccuacugcaacuacagccgguacugguaccugaaccacaccuccaccggcaagaccagccugccccgcugcuggcugaucuccaacggcagcuaccugaacgagacgaaguucuccgacgacaucgagcagcaggccgacaacaugaucaccgagaugcuccagaaggaguacaucgaccggcaggggaagacgccccugggccuggucgaccuguucguguucagcaccuccuucuaccucaucagcaucuuccugcaccuggugaagaucccgacccaccgccacaucgucgggaagcccugccccaagccccaccggcucaaccacaugggcaucugcuccugcgggcuguacaagcagccgggcgugcccgugcgcuggaagcggugaggacuaguaauaaggaaacuguaugaaugucugugggcaggaagugaagagauccuucuguaaagguuuuuggaauuaugucugcugaauaauaaacuuuuuugaaauaauaaaucugguagaaaaaugagaucuaaaaaaaaaaaaaaaaaaaaaaaaaaaaaaaaaaaaaaaaaaaaaaaaaaaaaaaaaaaaaaaaaaaaaaaaaaaaaaaaaaaaaaaaaaaaaaaaaaaa

SEQ ID NO: 37705 - RNA, 1788 nt, Artificial Sequence
  mRNA product Design b-4 (A100) comprising derived and/or modified sequence from LASV(AV;Clade V)__CCA30314__GPCmut10 (opt1)
aggagagucccgcagucggcguccagcggcucugcuuguucgugugugugucguugcaggccuuauucaagcuuaccaugggccagaucgugaccuucuuccaggaggucccccacgugaucgaggaggugaugaacaucguccugaucgcccucagcauccuggccgugcugaaggggcucuacaacaucgcgaccugcggccugaucgggcugaucacguuccuccugcugugcggccgcuccugcagcuccaaccucuacaaggggguguacgagcugcagagccuggaccucaacauggagacccugaacaugugcaugccgcuguccugcaccaagaacaacagccaccacuacauccgggucggcaacgacacgggccucgagcugacccugaccaacaccuccauccucaaccacaaguucugcaaccugagcgacgcccacaagaaggaccuguacgaccacgcccucauguccaucaucagcacguuccaccuguccauccccaacuucaaccaguacgaggccaugagcugcgacuucaacgggggcaagaucuccgugcaguacaaccugagccacuccuacgccaucgacgcggccaaccacugcgggaccguggccaacggcauccuccagaccuucaugcgcauggccuggggcgggagcuacaucgcgcuggacuccggccgggggaacugggacugcaucaugaccagcuaccaguaccugaucauccagaacacgaccugggagaaccacugccaguucucccgccccagccccaucggcuaccucgggcugcugagccagcggacccgcgacaucuacaucucccggcgccuccugggcaccuucacguggacccugagcgacuccgagggcaacgccacccccgggggcuacugccucacccgguggaugcugaucgaggccgagcugaagugcuucgggaacacggccgucgccaagugcaacgagaagcacgacgaggaguucugcgacaugcuccgccuguucgacuucugcaagcaggcgaucagccggcugaaguccgaggcccagaugagcauccagcucaucaacaaggccgugaacgcccugaucaacgaccagcugaucaugaagaaccaccuccgcgacaucaugggcauccccuacugcaacuacuccaaguacugguaccugaaccacaccaucaccgggaagaccagccugcccaagugcuggcucguguccaacggcagcuaccugaacgagacgcacuucuccgacgacaucgagcagcaggccgacaacaugaucaccgagaugcugcagaaggaguacauggagcggcagggcaagaccccgcucgggcuggucgaccuguucguguucagcaccuccuucuaccugaucagcaucuuccuccgccuggugaagaucccgacgcaccggcacaucgucggcaagcccugccccaagccccaccgccugaaccacauggggaucugcuccugcggccucuacaagcagccgggggugcccgugcgguggaagcgcugaggacuaguaauaaggaaacuguaugaaugucugugggcaggaagugaagagauccuucuguaaagguuuuuggaauuaugucugcugaauaauaaacuuuuuugaaauaauaaaucugguagaaaaaugagaucuaaaaaaaaaaaaaaaaaaaaaaaaaaaaaaaaaaaaaaaaaaaaaaaaaaaaaaaaaaaaaaaaaaaaaaaaaaaaaaaaaaaaaaaaaaaaaaaaaaaa

SEQ ID NO: 37706 - RNA, 1785 nt, Artificial Sequence
  mRNA product Design b-4 (A100) comprising derived and/or modified sequence from LASV(Togo/2016/7082;Clade VI)__AMR44577__GPCmut10 (opt1)
aggagagucccgcagucggcguccagcggcucugcuuguucgugugugugucguugcaggccuuauucaagcuuaccaugggccagaucaucaccuucuuccaggaggugccccacgucaucgaggaggugaugaacaucgugcugaucgcccucagccugcuggccauccucaagggggucuacaacguggcgaccugcggcaucaucgggcuggugacguuccuguuccucugcggccgcuccugcagccugaucuacaagggguccuacgagcugcagacccucgagcugaacauggagacccugaacaugugcaugccgcucagcugcacgaagaacuccagccaccacuacauccgggucggcaacgagaccggccuggagcugacccucaccaacacguccaucaucaaccacaaguucugcaaccugagcgacgcccacaagcgcaaccuguacgaccacgcccucauguccauccugagcaccuuccaccuguccauccccaacuucaaccaguacgaggccaugagcugcgacuucaacgggggcaagaucuccgugcaguacaaccucagccacgccuacgcgguggacgccgccgagcacugcgggaccgucgccaacggcgugcugcagaccuucaugcggauggcguggggcggguccuacaucgcccuggacagcggccgcgggaacugggacugcaucaugacguccuaccaguaccucaucauccagaacaccaccugggaggaccacugccaguucagccggcccucccccaucggcuaccuggggcugcucagccagcgcacccgggacaucuacaucagccgccggcugcugggcacguucaccuggacccucuccgacagcgagggcaacgagacccccgggggcuacugccugacgcgcuggaugcugaucgaggccgagcucaagugcuucgggaacaccgccguggccaagugcaacgagaagcacgacgaggaguucugcgacaugcugcggcuguucgacuucugcaagcaggcgauccagcgccucaaguccgaggcccagaugagcauccagcugaucaacaaggccgucaacgcccugaucaacgaccagcucaucaugaagaaccaccuccgggacaugaugggcauccccuacugcaacuacuccaaguacugguaccugaaccacaccagcuccgggcgcaccagccugcccaagugcuggcugguguccaacggcagcuaccugaacgagacgcacuucuccgacgacaucgagcagcaggccgacaacaugaucaccgagaugcuccagaaggaguacaucgaccggcagggcaagaccccgcuggggcugguggaccucuucgucuucagcaccuccuucuaccugaucagcaucuuccugcaccugaucaagaucccgacgcaccgccacaucgugggcaagcccugccccaagccccaccggcucaaccacauggggaucugcuccugcggccuguacaagcagccgggggugcccacccgcuggaagcggugaggacuaguaauaaggaaacuguaugaaugucugugggcaggaagugaagagauccuucuguaaagguuuuuggaauuaugucugcugaauaauaaacuuuuuugaaauaauaaaucugguagaaaaaugagaucuaaaaaaaaaaaaaaaaaaaaaaaaaaaaaaaaaaaaaaaaaaaaaaaaaaaaaaaaaaaaaaaaaaaaaaaaaaaaaaaaaaaaaaaaaaaaaaaaaaaa

SEQ ID NO: 37707 - RNA, 1785 nt, Artificial Sequence
  mRNA product Design b-4 (A100) comprising derived and/or modified sequence from LASV(KAK-428;Clade n.d. (VII))__ANH09740__GPCmut10 (opt1)
aggagagucccgcagucggcguccagcggcucugcuuguucgugugugugucguugcaggccuuauucaagcuuaccaugggccagaucgugaccuucuuccaggaggucccccacgugaucgaggaggugaugaacaucguccugaucgcccucagccugcuggccauccucaaggggcuguacaacuucgcgaccugcggcgugaucgggcugaucacguuccuccugcugugcggccgcuccugcagcgccaccuacaaggggcaguacgagcuccagacccuggagcugaacauggagucccucaacaugugcaugccgcugagcugcacgaagaacaacucccaccacuacauccgggccggcaacaacaccggccuggagcucacccugaccaacacgagcaucaucucccacaaguucugcaaccugagcgacgcccacaagaagaaccucuacgaccacacccugauguccaucaucaccaccuuccaccugagcauccccaacuucaaccaguacgaggccauguccugcgacuucaacgggggcaagaucagcauccaguacaaccucucccacagcuacgcgggggacgccgcccagcacugcggcacgguggccaacgggguccugcagaccuucaugcgcauggcguggggcggcuccuaccuggcccucgacagcgggcggcgcggcugggacugcaucaucuccagcuaccaguaccugaucauccagaacaccaccugggacgaccacugccaguucucccggcccagccccaucggguaccugggcuucgugagccagaagacgcgcgacaucuacaucucccggcgccuccugggcaccuucaccuggacccugagcgacuccgaggggcacgacaugccgggcggguacugccucacgcgguggaugcugaucgaggccgaccugaagugcuucggcaacaccgccguggccaagugcaacgagaagcacgacgaggaguucugcgacauguggcgccucuucgacuucugcaagcaggcgauccagcggcugaaggccgaggcccagaugaacauccagcugaucaacaaggccgucaacgcccucaucaacgaccagcugaugaugaagaaccaccuccgcgacaucauggggauccccuacugcaacuacagcaaguucugguaccugaacaacaccaccacgggccggaccucccugccccgcugcuggcugaucagcaacggcuccuaccucaacgagacccacuucagcgacgacaucgagcagcaggcggacaacaugaucaccgagaugcugcagaaggaguacauggaccggcaggggaagacgccccugggccucguggaccuguucguguucuccaccagcuucuaccugaucaccaucuuccuccaccuggucaagaucccgacccaccgccacaucguggggaagcccugccccaagccccaccggcugaaccacaugggcaucugcuccugcgggcuguacaagcagccgggcgugcccguccgcuggaagcggugaggacuaguaauaaggaaacuguaugaaugucugugggcaggaagugaagagauccuucuguaaagguuuuuggaauuaugucugcugaauaauaaacuuuuuugaaauaauaaaucugguagaaaaaugagaucuaaaaaaaaaaaaaaaaaaaaaaaaaaaaaaaaaaaaaaaaaaaaaaaaaaaaaaaaaaaaaaaaaaaaaaaaaaaaaaaaaaaaaaaaaaaaaaaaaaaa

SEQ ID NO: 37708 - RNA, 1785 nt, Artificial Sequence; identical to SEQ ID NO: 37702
  mRNA product Design b-4 (A100) comprising derived and/or modified sequence from LASV(Pinneo-NIG-1969;Clade I)__AIT17836__GPCmut10 (opt1)

SEQ ID NO: 37709 - RNA, 1785 nt, Artificial Sequence
  mRNA product Design b-4 (A100) comprising derived and/or modified sequence from LASV(ISTH0009-NIG-2011;Clade II)__AIT17404__GPCmut10 (opt1)
aggagagucccgcagucggcguccagcggcucugcuuguucgugugugugucguugcaggccuuauucaagcuuaccaugggccagaucaucaccuucuuccaggaggugccccacgucaucgaggaggugaugaacaucgugcugaucgcccucagccugcuggccauccucaaggggaucuacaacgucgcgaccugcggccuguucgggcugguguccuuccuccugcugugcggccgcagcugcuccacgaccuacaaggggguguacgagcuccagacccuggagcuggacauggccagccucaacaugugcaugccgcuguccugcacgaagaacaacagccaccacuacaucauggucggcaacgagaccggccuggagcucacccugaccaacacguccaucaucaaccacaaguucugcaaccugagcgacgcccacaagaagaaccucuacgaccacgcccugauguccaucaucagcaccuuccaccuguccauccccaacuucaaccaguacgaggccaugagcugcgacuucaacgggggcaagaucuccgugcaguacaaccucagccacgcguacgccguggacgccgccaaccacugcgggaccaucgcgaacggcguccugcagaccuucaugcggauggccuggggcggguccuacaucgcccuggacagcggcaagggguccugggacugcaucaugacgagcuaccaguaccucaucauccagaacaccaccugggaggaccacugccaguucucccgccccagccccaucggcuaccuggggcugcucagccagcggacccgcgacaucuacaucucccggcgccugcugggcacguucaccuggacccucagcgacuccgagggcaacgagacccccgggggcuacugccugacgcgguggaugcugaucgaggccgagcucaagugcuucgggaacaccgccguggcgaagugcaacgagaagcacgacgaggaguucugcgacaugcugcgccuguucgacuucugcaagcaggccauccggcgccucaagaccgaggcccagaugagcauccagcugaucaacaaggccgugaacgcccugaucaacgaccagcucaucaugaagaaccaccuccgggacaucaugggcaucccguacugcaacuacuccaaguacugguaccugaaccacaccgucacggggaagaccagccugccccgcugcuggcugguguccaacggcagcuaccugaacgagacccacuucuccgacgacaucgagcagcaggcggacaacaugaucaccgagcuccugcagaaggaguacauggaccggcagggcaagacgccccuggggcucguggaccuguucgucuucagcaccuccuucuaccugaucagcaucuuccugcaccucaucaagaucccgacccaccgccacaucaccggcaagcccugccccaagccccaccggcugaaccacauggggaucugcuccugcggccuguacaagcacccgggggugcccgugaaguggaagcgcugaggacuaguaauaaggaaacuguaugaaugucugugggcaggaagugaagagauccuucuguaaagguuuuuggaauuaugucugcugaauaauaaacuuuuuugaaauaauaaaucugguagaaaaaugagaucuaaaaaaaaaaaaaaaaaaaaaaaaaaaaaaaaaaaaaaaaaaaaaaaaaaaaaaaaaaaaaaaaaaaaaaaaaaaaaaaaaaaaaaaaaaaaaaaaaaaa

SEQ ID NO: 37710 - RNA, 1785 nt, Artificial Sequence
  mRNA product Design b-4 (A100) comprising derived and/or modified sequence from LASV(ISTH2010-NIG-2012;Clade II)__AIT17482__GPCmut10 (opt1)
aggagagucccgcagucggcguccagcggcucugcuuguucgugugugugucguugcaggccuuauucaagcuuaccaugggccagaucaucaccuucuuccaggaggugccccacgucaucgaggaggugaugaacaucgugcugaucgcccucagccugcuggccauccucaaggggaucuacaacgucgcgaccugcggccuguucgggcugguguccuuccuccugcugugcggccgcagcugcuccacgaccuacaaggggguguacgagcuccagacccuggagcuggacauggccagccucaacaugugcaugccgcuguccugcacgaagaacaacagccaccacuacaucauggucggcaacgagaccggccuggagcucacccugaccaacacguccaucaucaaccacaaguucugcaaccugagcgacgcccacaagaagaaccucuacgaccacgcccugauguccaucaucagcaccuuccaccuguccauccccaacuucaaccaguacgaggccaugagcugcgacuucaacgggggcaagaucuccgugcaguacaaccucagccacgcguacgccguggacgccgccaaccacugcgggaccaucgcgaacggcguccugcagaccuucaugcggauggccuggggcggguccuacaucgcccuggacagcggcaagggguccugggacugcaucaugacgagcuaccaguaccucaucauccagaacaucaccugggaggaccacugccaguucucccgccccagccccaucggcuaccuggggcugcucagccagcggacccgcgacaucuacaucucccggcgccugcugggcaccuucacguggacccucagcgacuccgagggcaacgagacccccgggggcuacugccugacccgguggaugcugaucgaggccgagcucaagugcuucgggaacacggccguggcgaagugcaacgagaagcacgacgaggaguucugcgacaugcugcgccuguucgacuucugcaagcaggccauccggcgccucaagaccgaggcccagaugagcauccagcugaucaacaaggccgugaacgcccugaucaacgaccagcucaucaugaagaaccaccuccgggacaucaugggcauccccuacugcaacuacuccaaguacugguaccugaaccacaccgucaccgggaagacgagccugccccgcugcuggcugguguccaacggcagcuaccugaacgagacccacuucuccgacgacaucgagcagcaggcggacaacaugaucaccgagcuccugcagaaggaguacaucgaccggcagggcaagaccccgcuggggcucguggaccuguucgucuucagcacguccuucuaccugaucagcaucuuccugcaccucgugaagaucccgacccaccgccacguggucggcaagcccugccccaagccccaccggcugaaccacauggggaucugcuccugcggccuguacaagcacccgggggugcccgugaaguggaagcgcugaggacuaguaauaaggaaacuguaugaaugucugugggcaggaagugaagagauccuucuguaaagguuuuuggaauuaugucugcugaauaauaaacuuuuuugaaauaauaaaucugguagaaaaaugagaucuaaaaaaaaaaaaaaaaaaaaaaaaaaaaaaaaaaaaaaaaaaaaaaaaaaaaaaaaaaaaaaaaaaaaaaaaaaaaaaaaaaaaaaaaaaaaaaaaaaaa

SEQ ID NO: 37711 - RNA, 1785 nt, Artificial Sequence
  mRNA product Design b-4 (A100) comprising derived and/or modified sequence from LASV(Lassa virus/H.sapiens-wt/NGA/2015/ISTH_0543;Clade II)__AVO03639__GPCmut10 (opt1)
aggagagucccgcagucggcguccagcggcucugcuuguucgugugugugucguugcaggccuuauucaagcuuaccaugggccagaucaucaccuucuuccaggaggugccccacgucaucgaggaggugaugaacaucgugcugaucgcccucagccugcuggccauccucaaggggaucuacaacgucgcgaccugcggccuguucgggcugguguccuuccuccugcugugcggccgcagcugcuccacgaccuacaaggggguguacgagcuccagacccuggagcuggacauggccaaccucaacaugugcaugccgcugagcugcacgaagaacaacucccaccacuacaucauggucggcaacgagaccggccuggagcucacccugaccaacacgagcaucaucaaccacaaguucugcaaccuguccgacgcccacaagaagaaccucuacgaccacgcccugaugagcaucaucuccaccuuccaccugagcauccccaacuucaaccaguacgaggccauguccugcgacuucaacgggggcaagaucagcgugcaguacaaccucucccacaccuacgcgguggacgccgccaaccacugcgggaccaucgccaacggcguccugcagacguucaugcggauggcguggggcgggagcuacaucgcccuggacuccggcaaggggagcugggacugcaucaugaccuccuaccaguaccucgugauccagaacaccaccugggaggaccacugccaguucagccgccccucccccaucggcuaccuggggcugcucagccagcggacgcgcgacaucuacaucagccggcgccugcugggcaccuucaccuggacccucuccgacagcgagggcaacgagacgcccgggggcuacugccugacccgguggaugcugaucgaggccgagcucaagugcuucgggaacaccgccguggccaagugcaacgagaagcacgacgaggaguucugcgacaugcugcgccuguucgacuucugcaagcaggcgauccggcgccucaagaccgaggcccagauguccauccagcugaucaacaaggccgucaacgcccugaucaacgaccagcucaucaugaagaaccaccuccgggacaucaugggcauccccuacugcaacuacagcaaguacugguaccugaaccacacggugaccgggaagaccucccugccccgcugcuggcuggugagcaacggcuccuaccugaacgagacccacuucagcgacgacaucgagcagcaggccgacaacaugaucacggagcuccugcagaaggaguacaucgaccggcagggcaagaccccgcuggggcucgucgaccuguucguguucuccaccagcuucuaccugaucuccaucuuccugcaccucgugaagaucccgacccaccgccacaucacgggcaagcccugccccaagccccaccggcugaaccacauggggaucugcagcugcggccuguacaagcacccggggguccccgugaaguggaagcgcugaggacuaguaauaaggaaacuguaugaaugucugugggcaggaagugaagagauccuucuguaaagguuuuuggaauuaugucugcugaauaauaaacuuuuuugaaauaauaaaucugguagaaaaaugagaucuaaaaaaaaaaaaaaaaaaaaaaaaaaaaaaaaaaaaaaaaaaaaaaaaaaaaaaaaaaaaaaaaaaaaaaaaaaaaaaaaaaaaaaaaaaaaaaaaaaaa

SEQ ID NO: 37712 - RNA, 1785 nt, Artificial Sequence
  mRNA product Design b-4 (A100) comprising derived and/or modified sequence from LASV(Lassa virus/H.sapiens-wt/NGA/2016/ISTH_0009;Clade II)__AVO03571__GPCmut10 (opt1)
aggagagucccgcagucggcguccagcggcucugcuuguucgugugugugucguugcaggccuuauucaagcuuaccaugggccagaucaucaccuucuuccaggaggugccccacgucaucgaggaggugaugaacaucgugcugaucgcccucagccugcuggccauccucaaggggaucuacaacgucgcgaccugcggccugcuggggcucguguccuuccugcugcucugcggccgcagcugcuccacgaccuacaaggggguguacgagcugcagacccuggagcucgacauggccagccugaacaugugcaugccgcuguccugcacgaagaacaacagccaccacuacaucauggucggcaacgagaccggccucgagcugacccugaccaacacguccaucaucaaccacaaguucugcaaccucagcgacgcccacaagaagaaccuguacgaccacgcccugauguccaucaucagcaccuuccaccucuccauccccaacuucaaccaguacgaggccaugagcugcgacuucaacgggggccggaucuccgugcaguacaaccugagccacuccuacgcgguggacgccgccaaccacugcgggaccaucgccaacggcguccugcagaccuucaugcgcauggcguggggcgggagcuacaucgcccucgacuccggcaaggggagcugggacugcaucaugacguccuaccaguaccugaucauccagaacaccaccugggaggaccacugccaguucagccggcccagccccaucggcuaccuggggcuccugucccagcgcacccgggacaucuacaucagccgccggcugcucggcacguucaccuggacccuguccgacagcgagggcaacgagacccccgggggcuacugccugacgcgcuggaugcucaucgaggccgagcugaagugcuucgggaacaccgccguggccaagugcaacgagaagcacgacgaggaguucugcgacaugcugcggcuguucgacuucugcaagcaggcgauccgccggcugaagaccgaggcccagauguccauccagcugaucaacaaggccgugaacgcccucaucaacgaccagcugaucaugaagaaccaccuccgcgacaucaugggcaucccguacugcaacuacagcaaguacugguaccucaaccacaccgucacggggaagaccucccugccccggugcuggcuggugagcaacggcuccuaccucaacgagacccacuucagcgacgacaucgagcagcaggccgacaacaugaucaccgagcugcugcagaaggaguacaucgaccgccagggcaagacgccccucgggcugguggaccuguucgucuucuccaccagcuucuaccugaucuccaucuuccuccaccuggugaagaucccgacccaccggcacaucaccggcaagcccugccccaagccccaccgccugaaccacauggggaucugcagcugcggccucuacaaccacccgggggugcccgucaaguggaagcggugaggacuaguaauaaggaaacuguaugaaugucugugggcaggaagugaagagauccuucuguaaagguuuuuggaauuaugucugcugaauaauaaacuuuuuugaaauaauaaaucugguagaaaaaugagaucuaaaaaaaaaaaaaaaaaaaaaaaaaaaaaaaaaaaaaaaaaaaaaaaaaaaaaaaaaaaaaaaaaaaaaaaaaaaaaaaaaaaaaaaaaaaaaaaaaaaa

SEQ ID NO: 37713 - RNA, 1785 nt, Artificial Sequence
  mRNA product Design b-4 (A100) comprising derived and/or modified sequence from LASV(Lassa virus/H.sapiens-wt/NGA/2016/ISTH_0017;Clade II)__AVO03567__GPCmut10 (opt1)
aggagagucccgcagucggcguccagcggcucugcuuguucgugugugugucguugcaggccuuauucaagcuuaccaugggccagaucaucaccuucuuccaggaggugccccacgucaucgaggaggugaugaacaucgugcugaucgcccucagccugcuggccauccucaaggggaucuacaacgucgcgaccugcggccuguucgggcugguguccuuccuccugcugugcggccgcagcugcuccacgaccuacaaggggguguacgagcuccagacccuggagcuggacauggccagccucaacaugugcaugccgcuguccugcacgaagaacaacagccaccacuacaucauggucggcaacgagaccggccuggagcucacccugaccaacacguccaucaucaaccacaaguucugcaaccugagcgacgcccacaagaagaaccucuacgaccacgcccugauguccaucaucagcaccuuccaccuguccauccccaacuucaaccaguacgaggccaugagcugcgacuucaacgggggcaagaucuccgugcaguacaaccucagccacaccuacgcgaucgacgccgccaaccacugcgggaccaucgccaacggcgugcugcagacguucaugcggauggcguggggcggguccuacaucgcccuggacagcggcaagggguccugggacugcaucaugaccagcuaccaguaccucaucauccagaacaccaccugggaggaccacugccaguucucccgccccagccccaucggcuaccuggggcugcucagccagcggacgcgcgacaucuacaucucccggcgccugcugggcaccuucaccuggacccucagcgacuccgagggcaacgagacgcccgggggcuacugccugacccgguggaugcugaucgaggccgagcucaagugcuucgggaacaccgccgucgccaagugcaacgagaagcacgacgaggaguucugcgacaugcugcgccuguucgacuucugcaagcaggcgauccggcgccucaagaccgaggcccagaugagcauccagcugaucaacaaggccgugaacgcccugaucaacgaccagcucaucaugaagaaccaccuccgggacaucaugggcauccccuacugcaacuacuccaaguacugguaccugaaccacacggugaccgggaagaccagccugccccgcugcuggcuggucuccaacggcagcuaccugaacgagacccacuucuccgacgacaucgagcagcaggccgacaacaugaucacggagcuccugcagaaggaguacauggaccggcagggcaagaccccgcuggggcucguggaccuguucguguucagcaccuccuucuaccugaucagcaucuuccugcaccucguccgcaucccgacccaccggcacgugaucggcaagcccugccccaagccccaccgccugaaccacauggggaucugcuccugcggccuguacaagcacccgggggugcccgucaaguggaagcggugaggacuaguaauaaggaaacuguaugaaugucugugggcaggaagugaagagauccuucuguaaagguuuuuggaauuaugucugcugaauaauaaacuuuuuugaaauaauaaaucugguagaaaaaugagaucuaaaaaaaaaaaaaaaaaaaaaaaaaaaaaaaaaaaaaaaaaaaaaaaaaaaaaaaaaaaaaaaaaaaaaaaaaaaaaaaaaaaaaaaaaaaaaaaaaaaa

SEQ ID NO: 37714 - RNA, 1785 nt, Artificial Sequence
  mRNA product Design b-4 (A100) comprising derived and/or modified sequence from LASV(Lassa virus/H.sapiens-wt/NGA/2018/ISTH_0959;Clade II)__AVV65099__GPCmut10 (opt1)
aggagagucccgcagucggcguccagcggcucugcuuguucgugugugugucguugcaggccuuauucaagcuuaccaugggccagaucaucaccuucuuccaggaggugccccacgucaucgaggaggugaugaacaucgugcugaucgcccucagccugcuggccauccucaaggggaucuacaacgucgugaccugcggccuguucgggcugguguccuuccuccugcugugcggccgcagcugcuccacgaccuacaagggggucuacgagcuccagacccuggagcuggacauggcgagccucaacaugugcaugccgcuguccugcacgaagaacaacagccaccacuacaucauggugggcaacgagaccggccuggagcucacccugaccaacacguccaucaucaaccacaaguucugcaaccugagcgacgcccacaagaagaaccucuacgaccacgcccugauguccaucaucagcaccuuccaccuguccauccccaacuucaaccaguacgaggccaugagcugcgacuucaacgggggcaagaucuccgugcaguacaaccucagccacgccuacgcgaucgacgccgccaaccacugcgggaccaucgccaacggcguccugcagaccuucaugcggauggcguggggcggguccuacaucgcccuggacagcggcaagggguccugggacugcaucaugacgagcuaccaguaccucaucauccagaacaccaccugggaggaccacugccaguucucccgccccagccccaucggcuaccuggggcugcucagccagcggacccgcgacaucuacaucucccggcgccugcugggcacguucaccuggacccucagcgacuccgagggcaacgagacccccgggggcuacugccugacgcgguggaugcugaucgaggccgagcucaagugcuucgggaacaccgccguggccaagugcaacgagaagcacgacgaggaguucugcgacaugcugcgccuguucgacuucugcaagcaggcgauccggcgccucaagaccgaggcccagaugagcauccagcugaucaacaaggccgugaacgcccugaucaacgaccagcucaucaugaagaaccaccuccgggacaucaugggcaucccguacugcaacuacuccaaguacugguaccugaaccacaccgucacggggaagaccagccugccccgcugcuggcugguguccaacggcagcuaccugaacgagacccacuucuccgacgacaucgagcagcaggccgacaacaugaucaccgagcuccugcagaaggaguacaucgaccggcagggcaagacgccccuggggcucguggaccuguucgucuucagcaccuccuucuaccugaucagcaucuuccugcaccucgugaagaucccgacccaccgccacgugaucggcaagcccugccccaagccccaccggcugaaccacauggggaucugcuccugcggccuguacaagcacccggggguccccgugaaguggaagcgcugaggacuaguaauaaggaaacuguaugaaugucugugggcaggaagugaagagauccuucuguaaagguuuuuggaauuaugucugcugaauaauaaacuuuuuugaaauaauaaaucugguagaaaaaugagaucuaaaaaaaaaaaaaaaaaaaaaaaaaaaaaaaaaaaaaaaaaaaaaaaaaaaaaaaaaaaaaaaaaaaaaaaaaaaaaaaaaaaaaaaaaaaaaaaaaaaa

SEQ ID NO: 37715 - RNA, 1785 nt, Artificial Sequence
  mRNA product Design b-4 (A100) comprising derived and/or modified sequence from LASV(LASV003-NIG-2008;Clade II)__AIT17580__GPCmut10 (opt1)
aggagagucccgcagucggcguccagcggcucugcuuguucgugugugugucguugcaggccuuauucaagcuuaccaugggccagaucaucaccuucuuccaggaggugccccacgucaucgaggaggugaugaacaucgugcugaucgcccucagccugcuggccauccucaaggggaucuacaacgucgcgaccugcggccuguucgggcugguguccuuccuccugcugugcggccgcagcugcuccacgaccuacaaggggguguacgagcuccagacccuggagcuggacauggccagccucaacaugugcaugccgcuguccugcacgaagaacaacagccaccacuacaucauggucggcaacgagaccggccuggagcucacccugaccaacacguccaucaucaaccacaaguucugcaaccugagcgacgcccacaagaagaaccucuacgaccacgcccugauguccaucaucagcaccuuccaccuguccauccccaacuucaaccaguacgaggccaugagcugcgacuucaacgggggcaagaucuccgugcaguacaaccucagccacaccuacgcgguggacgccgccaaccacugcgggaccaucgccaacggcguccugcagacguucaugcggauggcguggggcggguccuacaucgcccuggacagcggcaagggguccugggacugcaucaugaccagcuaccaguaccucaucauccagaacaccaccugggaggaccacugccaguucucccgccccagccccaucggcuaccuggggcugcucagccagcggacgcgcgacaucuacaucucccggcgccugcugggcaccuucaccuggacccucagcgacuccgagagcaacgagacgccgggcggguacugccugacccgguggaugcugaucgaggccgagcucaagugcuucggcaacaccgccguggccaagugcaacgagaagcacgacgaggaguucugcgacaugcugcgccuguucgacuucugcaagcaggcgauccggcgccucaaggccgaggcccagauguccauccagcugaucaacaaggccgugaacgcccugaucaacgaccagcucaucaugaagaaccaccuccgggacaucauggggauccccuacugcaacuacagcaaguacugguaccugaaccacaccgucacgggccgcaccucccugccccggugcuggcuggugagcaacggguccuaccugaacgagacccacuucagcgacgacaucgagcagcaggcggacaacaugaucaccgagcuccugcagaaggaguacauggaccgccagggcaagacgccccugggccucguggaccuguucgucuucuccaccagcuucuaccugaucuccaucuuccugcaccucgugaagaucccgacccaccggcacgugaucgggaagcccugccccaagccccaccgccugaaccacaugggcaucugcagcugcgggcuguacaagcacccgggcguccccgugaaguggaagcggugaggacuaguaauaaggaaacuguaugaaugucugugggcaggaagugaagagauccuucuguaaagguuuuuggaauuaugucugcugaauaauaaacuuuuuugaaauaauaaaucugguagaaaaaugagaucuaaaaaaaaaaaaaaaaaaaaaaaaaaaaaaaaaaaaaaaaaaaaaaaaaaaaaaaaaaaaaaaaaaaaaaaaaaaaaaaaaaaaaaaaaaaaaaaaaaaa

SEQ ID NO: 37716 - RNA, 1785 nt, Artificial Sequence
  mRNA product Design b-4 (A100) comprising derived and/or modified sequence from LASV(LASV035-NIG-2009;Clade II)__AIT17588__GPCmut10 (opt1)
aggagagucccgcagucggcguccagcggcucugcuuguucgugugugugucguugcaggccuuauucaagcuuaccaugggccagaucaucaccuucuuccaggaggugccccacgucaucgaggaggugaugaacaucgugcugaucgcccucagccugcuggccauccucaaggggaucuacaacgucgcgaccugcggccuguucgggcugguguccuuccuccugcugugcggccgcagcugcuccacgaccuacaaggggguguacgagcuccagacccuggagcuggacauggccagccucaacaugugcaugccgcuguccugcacgaagaacaacagccaccacuacaucauggucggcaacgagaccggccuggagcucacccugaccaacacguccaucaucaaccacaaguucugcaaccugagcgacgcccacaagaagaaccucuacgaccacgcccugauguccaucaucagcaccuuccaccuguccauccccaacuucaaccaguacgaggccaugagcugcgacuucaacgggggcaagaucuccgugcaguacaaccucagccacgcguacgccguggacgccgccaaccacugcgggaccaucgcgaacggcguccugcagaccuucaugcggauggccuggggcggguccuacaucgcccuggacagcggcaagggguccugggacugcaucaugacgagcuaccaguaccucaucauccagaacaccaccugggaggaccacugccaguucucccgccccagccccaucggcuaccuggggcugcucagccagcggacccgcgacaucuacaucucccggcgccugcugggcacguucaccuggacccucagcgacuccgagggcaacgagacccccgggggcuacugccugacgcgguggaugcugaucgaggccgagcucaagugcuucgggaacaccgccguggcgaagugcaacgagaagcacgacgaggaguucugcgacaugcugcgccuguucgacuucugcaagcaggccauccggcgccucaaggccgaggcccagaugagcauccagcugaucaacaaggccgugaacgcgcugaucaacgaccagcucaucaugaagaaccaccuccgggacaucaugggcauccccuacugcaacuacuccaaguacugguaccugaaccacaccgucaccgggaagacgagccugccccgcugcuggcugguguccaacggcagcuaccugaacgagacccacuucuccgacgacaucgagcagcaggccgacaacaugaucaccgagcuccugcagaaggaguacaucgaccggcagggcaagaccccgcuggggcucguggaccuguucgucuucagcacguccuucuaccugaucagcaucuuccugcaccucgugaagaucccgacccaccgccacgugaucggcaagcccugccccaagccccaccggcugaaccacauggggaucugcuccugcggccuguacaagcacccggggguccccgugaaguggaagcgcugaggacuaguaauaaggaaacuguaugaaugucugugggcaggaagugaagagauccuucuguaaagguuuuuggaauuaugucugcugaauaauaaacuuuuuugaaauaauaaaucugguagaaaaaugagaucuaaaaaaaaaaaaaaaaaaaaaaaaaaaaaaaaaaaaaaaaaaaaaaaaaaaaaaaaaaaaaaaaaaaaaaaaaaaaaaaaaaaaaaaaaaaaaaaaaaaa

SEQ ID NO: 37717 - RNA, 1785 nt, Artificial Sequence
  mRNA product Design b-4 (A100) comprising derived and/or modified sequence from LASV(LASV1000-NIG-2009;Clade II)__AIT17782__GPCmut10 (opt1)
aggagagucccgcagucggcguccagcggcucugcuuguucgugugugugucguugcaggccuuauucaagcuuaccaugggccagaucaucaccuucuuccaggaggugccccacgucaucgaggaggugaugaacaucgugcugaucgcccucagccugcuggccauccucaaggggaucuacaacgucgcgaccugcggccuguucgggcugguguccuuccuccugcugugcggccgcagcugcuccacgaccuacaaggggguguacgagcuccagacccuggagcuggacauggccagccucaacaugugcaugccgcuguccugcacgaagaacaacagccaccacuacaucauggucggcaacgagaccggccuggagcucacccugaccaacacguccaucaucaaccacaaguucugcaaccugagcgacgcccacaagaagaaccucuacgaccacgcccugauguccaucaucagcaccuuccaccuguccauccccaacuucaaccaguacgaggccaugagcugcgacuucaacgggggcaagaucuccgugcaguacaaccucagccacaccuacgcgguggacgccgccaaccacugcgggaccaucgccaacggcguccugcagacguucaugcggauggcguggggcggguccuacaucgcccuggacagcggcaagggguccugggacugcaucaugaccagcuaccaguaccucaucauccagaacaccaccugggaggaccacugccaguucucccgccccagccccaucggcuaccuggggcugcucagccagcggacgcgcgacaucuacaucucccggcgccugcugggcaccuucaccuggacccucagcgacuccgagggcaacgagacgcccgggggcuacugccugacccgguggaugcugaucgaggccgagcucaagugcuucgggaacaccgccguggccaagugcaacgagaagcacgacgaggaguucugcgacaugcugcgccuguucgacuucugcaagcaggcgaucaagcggcucaagaccgaggcccagaugagcauccagcugaucaacaaggccgugaacgcccugaucaacgaccagcucaucaugaagaaccaccuccgcgacaucaugggcauccccuacugcaacuacuccaaguacugguaccugaaccacacggucaccgggaagaccagccugccccggugcuggcugguguccaacggcagcuaccugaacgagacccacuucuccgacgacaucgagcagcaggccgacaacaugaucacggagcuccugcagaaggaguacaucgaccgccagggcaagaccccgcuggggcucguggaccuguucgucuucagcaccuccuucuaccugaucagcaucuuccugcaccucgugaagaucccgacccaccggcacguggucggcaagcccugccccaagccccaccgccugaaccacauggggaucugcuccugcggccuguacaagcacccgggggugcccgugaaguggaagcggugaggacuaguaauaaggaaacuguaugaaugucugugggcaggaagugaagagauccuucuguaaagguuuuuggaauuaugucugcugaauaauaaacuuuuuugaaauaauaaaucugguagaaaaaugagaucuaaaaaaaaaaaaaaaaaaaaaaaaaaaaaaaaaaaaaaaaaaaaaaaaaaaaaaaaaaaaaaaaaaaaaaaaaaaaaaaaaaaaaaaaaaaaaaaaaaaa

SEQ ID NO: 37718 - RNA, 1785 nt, Artificial Sequence
  mRNA product Design b-4 (A100) comprising derived and/or modified sequence from LASV(LASV221-NIG-2010;Clade II)__AIT17624__GPCmut10 (opt1)
aggagagucccgcagucggcguccagcggcucugcuuguucgugugugugucguugcaggccuuauucaagcuuaccaugggccagaucaucaccuucuuccaggaggugccccacgucaucgaggaggugaugaacaucgugcugaucgcccucagccugcuggccauccucaaggggaucuacaacgucgcgaccugcggccuguucgggcugguguccuuccuccugcugugcggccgcagcugcuccacgaccuacaaggggguguacgagcuccagacccuggagcuggacauggccagccucaacaugugcaugccgcuguccugcacgaagaacaacagccaccacuacaucauggucggcaacgagaccggccuggagcucacccugaccaacacguccaucaucaaccacaaguucugcaaccugagcgacgcccacaagaagaaccucuacgaccacgcccugauguccaucaucagcaccuuccaccuguccauccccaacuucaaccaguacgaggccaugagcugcgacuucaacgggggcaagaucuccgugcaguacaaccucagccacaccuacgcgaucgacgccgccaaccacugcgggaccaucgccaacggcgugcugcagacguucaugcggauggcguggggcggguccuacaucgcccuggacagcggcaagggguccugggacugcaucaugaccagcuaccaguaccucaucauccagaacaccaccugggaggaccacugccaguucucccgccccagccccaucggcuaccuggggcugcucagccagcggacgcgcgacaucuacaucucccggcgccugcugggcaccuucaccuggacccucagcgacuccgagggcaacgagacgcccgggggcuacugccugacccgguggaugcugaucgaggccgagcucaagugcuucgggaacaccgccgucgccaagugcaacgagaagcacgacgaggaguucugcgacaugcugcgccuguucgacuucugcaagcaggcgauccggcgccucaagaccgaggcccagaugagcauccagcugaucaacaaggccgugaacgcccugaucaacgaccagcucaucaugaagaaccaccuccgggacaucaugggcauccccuacugcaacuacuccaaguacugguaccugaaccacacggugaccgggaagaccagccugccccgcugcuggcuggucuccaacggcagcuaccugaacgagacccacuucuccgacgacaucgagcagcaggccgacaacaugaucacggagaugcuccagaaggaguacauggaccggcagggcaagaccccgcuggggcugguggaccucuucguguucagcaccuccuucuaccugaucagcaucuuccugcaccuggucaagaucccgacccaccgccacgugaucggcaagcccugccccaagccccaccggcucaaccacauggggaucugcuccugcggccuguacaagcacccgggggugcccgucaaguggaagcgcugaggacuaguaauaaggaaacuguaugaaugucugugggcaggaagugaagagauccuucuguaaagguuuuuggaauuaugucugcugaauaauaaacuuuuuugaaauaauaaaucugguagaaaaaugagaucuaaaaaaaaaaaaaaaaaaaaaaaaaaaaaaaaaaaaaaaaaaaaaaaaaaaaaaaaaaaaaaaaaaaaaaaaaaaaaaaaaaaaaaaaaaaaaaaaaaaa

SEQ ID NO: 37719 - RNA, 1785 nt, Artificial Sequence
  mRNA product Design b-4 (A100) comprising derived and/or modified sequence from LASV(LASV237-NIG-2010;Clade II)__AIT17638__GPCmut10 (opt1)
aggagagucccgcagucggcguccagcggcucugcuuguucgugugugugucguugcaggccuuauucaagcuuaccaugggccagaucaucaccuucuuccaggaggugccccacgucaucgaggaggugaugaacaucgugcugaucgcccucagccugcuggccauccucaaggggaucuacaacgucgcgaccugcggccuguucgggcugguguccuuccuccugcugugcggccgcagcugcuccacgaccuacaaggggguguacgagcuccagacccuggagcuggacauggccagccucaacaugugcaugccgcuguccugcacgaagaacaacagccaccacuacaucauggucggcaacgagaccggccuggagcucacccugaccaacacguccaucaucaaccacaaguucugcaaccugagcgacgcccacaagaaggaccucuacgaccacgcccugauguccaucaucagcaccuuccaccuguccauccccaacuucaaccaguacgaggccaugagcugcgacuucaacgggggcaagaucuccgugcaguacaaccucagccacaccuacgcgguggacgccgccaaccacugcgggaccaucgccaacggcguccugcagacguucaugcggauggcguggggcggguccuacaucgcccuggacagcggcaagggguccugggacugcaucaugaccagcuaccaguaccucaucauccagaacaccaccugggaggaccacugccaguucucccgccccagccccaucggcuaccuggggcugcucagccagcggacgcgcgacaucuacaucucccggcgccugcugggcaccuucaccuggacccucagcgacuccgagggcaacgagacgcccgggggcuacugccugacccgguggaugcugaucgaggccgagcucaagugcuucgggaacaccgccguggccaagugcaacgagaagcacgacgaggaguucugcgacaugcugcgccuguucgacuucugcaagcaggcgauccggcgccucaagaccgaggcccagaugagcauccagcugaucaacaaggccgugaacgcccugaucaacgaccagcucaucaugaagaaccaccuccgggacaucaugggcauccccuacugcaacuacuccaaguacugguaccugaaccacacggucaccgggaagaccagccugccccgcugcuggcugguguccaacggcagcuaccugaacgagacccacuucuccgacgacaucgagcagcaggccgacaacaugaucacggagcuccugcagaaggaguacauggaccggcagggcaagaccccgcuggggcucguggaccuguucgucuucagcaccuccuucuaccugaucagcaucuuccugcaccucaucaagaucccgacccaccgccacaucacgggcaagcccugccccaagccccaccggcugaaccacauggggaucugcuccugcggccuguacaagcacccgggggugcccgugaaguggaagcgcugaggacuaguaauaaggaaacuguaugaaugucugugggcaggaagugaagagauccuucuguaaagguuuuuggaauuaugucugcugaauaauaaacuuuuuugaaauaauaaaucugguagaaaaaugagaucuaaaaaaaaaaaaaaaaaaaaaaaaaaaaaaaaaaaaaaaaaaaaaaaaaaaaaaaaaaaaaaaaaaaaaaaaaaaaaaaaaaaaaaaaaaaaaaaaaaaa

SEQ ID NO: 37720 - RNA, 1785 nt, Artificial Sequence
  mRNA product Design b-4 (A100) comprising derived and/or modified sequence from LASV(LASV253-NIG-2011;Clade II)__AIT17670__GPCmut10 (opt1)
aggagagucccgcagucggcguccagcggcucugcuuguucgugugugugucguugcaggccuuauucaagcuuaccaugggccagaucaucaccuucuuccaggaggugccccacgucaucgaggaggugaugaacaucgugcugaucgcccucagccugcuggccauccucaaggggaucuacaacgucgcgaccugcggccuguucgggcugguguccuuccuccugcugugcggccgcagcugcuccacgaccuacaaggggguguacgagcuccagacccuggagcuggacauggccagccucaacaugugcaugccgcuguccugcacgaagaacaacagccaccacuacaucauggucggcaacgagaccggccuggagcucacccugaccaacacguccaucaucaaccacaaguucugcaaccugagcgacgcccacaagaagaaccucuacgaccacgcccugauguccaucaucagcaccuuccaccuguccauccccaacuucaaccaguacgaggccaugagcugcgacuucaacgggggcaagaucuccgugcaguacaaccucagccacaccuacgcgguggacgccgccaaccacugcgggaccaucgccaacggcguccugcagacguucaugcggauggcguggggcggguccuacaucgcccuggacagcggcaagggguccugggacugcaucaugaccagcuaccaguaccucaucauccagaacaccaccugggaggaccacugccaguucucccgccccagccccaucggcuaccuggggcugcucagccagcggacgcgcgacaucuacaucucccggcgccugcugggcaccuucaccuggacccucagcgacuccgagggcaacgagacgcccgggggcuacugccugacccgguggaugcugaucgaggccgagcucaagugcuucgggaacaccgccguggccaagugcaacgagaagcacgacgaggaguucugcgacaugcugcgccuguucgacuucugcaagcaggcgauccggcgccucaaggccgaggcccagaugagcauccagcugaucaacaaggccgugaacgcccugaucaacgaccagcucaucaugaagaaccaccuccgggacaucaugggcaucccguacugcaacuacuccaaguacugguaccugaaccacaccgucacggggcgcaccagccugccccggugcuggcugguguccaacggcagcuaccugaacgagacccacuucuccgacgacaucgagcagcaggcggacaacaugaucaccgagcuccugcagaaggaguacaucgaccgccagggcaagacgccccuggggcucguggaccuguucgucuucagcaccuccuucuaccugaucagcaucuuccugcaccucgugaagaucccgacccaccggcacaucaucggcaagcccugccccaagccccaccgccugaaccacauggggaucugcuccugcggccuguacaagcacccgggggugcccgucaaguggaagcggugaggacuaguaauaaggaaacuguaugaaugucugugggcaggaagugaagagauccuucuguaaagguuuuuggaauuaugucugcugaauaauaaacuuuuuugaaauaauaaaucugguagaaaaaugagaucuaaaaaaaaaaaaaaaaaaaaaaaaaaaaaaaaaaaaaaaaaaaaaaaaaaaaaaaaaaaaaaaaaaaaaaaaaaaaaaaaaaaaaaaaaaaaaaaaaaaa

SEQ ID NO: 37721 - RNA, 1785 nt, Artificial Sequence
  mRNA product Design b-4 (A100) comprising derived and/or modified sequence from LASV(LASV254-NIG-2011;Clade II)__AIT17674__GPCmut10 (opt1)
aggagagucccgcagucggcguccagcggcucugcuuguucgugugugugucguugcaggccuuauucaagcuuaccaugggccagaucaucaccuucuuccaggaggugccccacgucaucgaggaggugaugaacaucgugcugaucgcccucagccugcuggccauccucaaggggaucuacaacgucgcgaccugcggccuguucgggcugguguccuuccuccugcugugcggccgcagcugcuccacgaccuacaaggggguguacgagcuccagacccuggagcuggacaugaccaaccucaacaugugcaugccgcugagcugcaccaagaacaacucccaccacuacaucauggucggcaacgagaccggccuggagcucacccugacgaacaccagcaucaucaaccacaaguucugcaaccuguccgacgcccacaagaagaaccucuacaaccacgcccugaugagcaucaucuccaccuuccaccugagcauccccaacuucaaccaguacgaggccauguccugcgacuucaacgggggcaagaucagcgugcaguacaaccucucccacagcuacgccguggacgcggccaaccacugcgggaccaucgccaacggcguccugcagacguucaugcggauggccuggggcggguccuacaucgcgcuggacagcggcaaggggaacugggacugcaucaugaccuccuaccaguaccucaucauccagaacaccaccugggaggaccacugccaguucagccgccccucccccaucggcuaccuggggcugcucagccagcggacgcgcgacaucuacaucagccggcgccugcugggcaccuucaccuggacccucuccgacagcgagggcaacgagacgcccgggggcuacugccugacccgguggaugcugaucgaggccgagcucaagugcuucgggaacaccgccguggccaagugcaacgagaagcacgacgaggaguucugcgacaugcugcgccuguucgacuucugcaagcaggccauccggcgccucaagaccgaggcgcaggccaacauccagcugaucaacaaggccgugaacgcccugaucaacgaccagcucaucaugaagaaccaccuccgggacaucaugggcauccccuacugcaacuacuccaaguacugguaccugaaccacacggucaccgggaagaccagccugccccgcugcuggcugguguccaacggcagcuaccugaacgagacccacuucuccgacgacaucgagcagcaggccgacaacaugaucacggagcuccugcagaaggaguacauggaccggcagggcaagaccccgcuggggcucguggaccuguucgucuucagcaccuccuucuaccugaucagcaucuuccugcaccucgugaagaucccgacccaccgccacgugaucggcaagcccugccccaagccccaccggcugaaccacauggggaucugcuccugcggccuguacaagcacccggggguccccgugaaguggaagcgcugaggacuaguaauaaggaaacuguaugaaugucugugggcaggaagugaagagauccuucuguaaagguuuuuggaauuaugucugcugaauaauaaacuuuuuugaaauaauaaaucugguagaaaaaugagaucuaaaaaaaaaaaaaaaaaaaaaaaaaaaaaaaaaaaaaaaaaaaaaaaaaaaaaaaaaaaaaaaaaaaaaaaaaaaaaaaaaaaaaaaaaaaaaaaaaaaa

SEQ ID NO: 37722 - RNA, 1785 nt, Artificial Sequence
  mRNA product Design b-4 (A100) comprising derived and/or modified sequence from LASV(Nig08-A19;Clade III)__ADU56618__GPCmut10 (opt1)
aggagagucccgcagucggcguccagcggcucugcuuguucgugugugugucguugcaggccuuauucaagcuuaccaugggccagaucgugaccuucuuccaggaggucccccacgugaucgaggaggugaugaacaucguccugaucgcccucagcauccuggccauccugaaggggcucuacaacaucgcgaccugcggccugaucgggcuggugacguuccuccugcuguccggccgcagcugcuccaugaccuacaaggggguguacgagcuccagacccuggagcugaacaugaacacccucaacaugugcaugccgcugagcugcaccaagaacaacucccaccacuacaucauggucggcaacgagaccggccuggagcucacccugacgaacaccagccugcuccaccacaaguucugcaaccuguccgacgcccacaagaagaaccuguacgaccacacccucaugagcaucaucuccaccuuccaccugagcauccccaacuucaaccaguacgaggccauguccugcgacuucaacgggggcaagaucacggugcaguacaaccugagccacuccuacgccaucgacgccgcgaaccacugcgggaccguggccaacggcguccuccagaccuucaugcggauggccuggggcgggagcuacaucgcccuggacuccggccgcgggaagugggacugcaucaugaccagcuaccaguaccugaucauccagaacacgaccugggaggaccacugccaguucucccggcccagccccaucggcuaccucgggcugcugucccagcgcacccgggacaucuacaucagccgccggcuccugggcaccuucacguggacccugagcgacuccgagggcaacgagacccccgggggcuacugccucacccgcuggaugcugaucgaggcggagcugaagugcuucgggaacacggccguggccaagugcaacgagaagcacgacgaggaguucugcgacaugcuccggcuguucgacuucugcaagcaggccauccgccggcugaaggccgaggcgcagaugagcauccagcucaucaacaaggccgugaacgcccugaucaacgaccagcugaucaugaagaaccaccuccgcgacaucaugggcauccccuacugcaacuacuccaaguacugguaccugaaccacaccagcaccgggcggaccucccugccccgcugcuggcucgucagcaacggcuccuaccugaacgagacgcacuucagcgacgacaucgagcagcaggccgacaacaugaucaccgagaugcugcagaaggaguaccucgaccggcagggcaagaccccgcuggggcugguggaccuguucguguucuccaccagcuucuaccucaucuccaucuuccugcaccuggucaagaucccgacgcaccgccacaucgugggcaagcccugccccaagccccaccggcucaaccacauggggaucugcagcugcggccuguacaagcagccgggggugcccguccgcuggaagcggugaggacuaguaauaaggaaacuguaugaaugucugugggcaggaagugaagagauccuucuguaaagguuuuuggaauuaugucugcugaauaauaaacuuuuuugaaauaauaaaucugguagaaaaaugagaucuaaaaaaaaaaaaaaaaaaaaaaaaaaaaaaaaaaaaaaaaaaaaaaaaaaaaaaaaaaaaaaaaaaaaaaaaaaaaaaaaaaaaaaaaaaaaaaaaaaaa

SEQ ID NO: 37723 - RNA, 1788 nt, Artificial Sequence
  mRNA product Design b-4 (A100) comprising derived and/or modified sequence from LASV(G1180-SLE-2010;Clade IV)__AIT17168__GPCmut10 (opt1)
aggagagucccgcagucggcguccagcggcucugcuuguucgugugugugucguugcaggccuuauucaagcuuaccaugggccagaucgugaccuucuuccaggaggucccccacgugaucgaggaggugaugaacaucguccugaucgcccucagcauccuggccgugcugaaggggcucuacaacuucgcgaccugcggccugguggggcugcucaccuuccugcugcucugcggccgcuccugcaccgccagccgguacaagggggucuacgagcugcagacccuggagcucaacauggagacccugaacaugugcaugccgcuguccugcaccaagaacaacagccaccacuacaucauggugggcaacgagaccggccucgagcugacccugacgaacaccuccaucaucaaccacaaguucugcaaccucagcgacgcccacaagaagaaccuguacgaccacgcccugauguccaucaucagcaccuuccaccucuccauccccaacuucaaccaguacgaggccaugagcugcgacuucaacgggggcaagaucuccgugcaguacaaccugagccacuccuacgcgggggacgccgccaaccacugcggcaccgucgccaacggggugcugcagacguucaugcgcauggcguggggcggcagcuacaucgcccucgacuccgggcacggcagcugggacugcaucaugaccuccuaccaguaccugaucauccagaacaccaccugggaggaccacugccaguucagccggcccucccccaucggguaccugggccuccugagccagcgcacgcgggacaucuacaucagccgccggcugcucggcaccuucaccuggacccuguccgacagcgaggggaaggacacgccgggcggguacugccugacccgcuggaugcucaucgaggccgagcugaagugcuucggcaacaccgccguggccaagugcaacgagaagcacgacgaggaguucugcgacaugcugcggcuguucgacuucugcaagcaggcgauccagcgccugaaggccgaggcccagauguccauccagcugaucaacaaggccgucaacgcccucaucaacgaccagcugaucaugaagaaccaccuccgggacaucauggggauccccuacugcaacuacagcaaguacugguaccucaaccacaccacgaccggcaagaccucccugcccaagugcuggcuggugagcaacggcuccuaccucaacgagacccacuucagcgacgacaucgagcagcaggcggacaacaugaucacggagaugcugcagaaggaguacauggagcgccaggggaagacgccccugggccucguggaccuguucgucuucuccaccagcuucuaccugaucuccaucuuccugcaccucgugaagaucccgacccaccggcacaucgugggcaagagcugccccaagccccaccgccugaaccacauggggaucugcuccugcgggcuguacaagcagcccggcgucccggugaaguggaagcggugaggacuaguaauaaggaaacuguaugaaugucugugggcaggaagugaagagauccuucuguaaagguuuuuggaauuaugucugcugaauaauaaacuuuuuugaaauaauaaaucugguagaaaaaugagaucuaaaaaaaaaaaaaaaaaaaaaaaaaaaaaaaaaaaaaaaaaaaaaaaaaaaaaaaaaaaaaaaaaaaaaaaaaaaaaaaaaaaaaaaaaaaaaaaaaaaa

SEQ ID NO: 37724 - RNA, 1788 nt, Artificial Sequence
  mRNA product Design b-4 (A100) comprising derived and/or modified sequence from LASV(G1442-SLE-2011;Clade IV)__AIT17180__GPCmut10 (opt1)
aggagagucccgcagucggcguccagcggcucugcuuguucgugugugugucguugcaggccuuauucaagcuuaccaugggccagaucgugaccuucuuccaggaggucccccacgugaucgaggaggugaugaacaucguccugaucgcccucagcauccuggccgugcugaaggggcucuacaacguggcgaccugcggccugaucgggcuggucacguuccuccugcugugcggccgcuccugcaccaccacccucuacaaggggguguacgagcugcagacgcuggagcucaacauggagacccugaacaugugcaugccgcugagcugcaccaagaacaacucccaccacuacauccgggugggcaacgagacgggccucgagcugacccugaccaacaccagcaucaucaaccacaaguucugcaaccucuccgacgcccacaagaagaaccuguacgaccacgcccugaugagcaucaucuccacguuccaccucagcauccccaacuucaaccaguacgaggccauguccugcgacuucaacgggggcaagaucagcguccaguacaaccugucccacagcuacgccggggacgcggccaaccacugcggcaccguggccaacggggugcugcagaccuucaugcgcauggccuggggcggcuccuacaucgcgcucgacagcgggcggggcaacugggacugcaucaugaccuccuaccaguaccugaucauccagaacacgaccugggacgaccacugccaguucagccgccccucccccaucggguaccugggccuccugagccagcggacccgcgacgucuacaucucccggcgccugcucggcaccuucacguggacccugagcgacagcgaggggaaggacaccccgggcggguacugccugacccgguggaugcucaucgaggccgagcugaagugcuucggcaacacggccguggccaagugcaacgagaagcacgacgaggaguucugcgacaugcugcgccucuucgacuucugcaagcaggccauccagcggcugaaggcggaggcccagauguccauccagcugaucaacaaggccgugaacgcccucaucaacgaccagcugaucaugaagaaccaccuccgcgacaucauggggauccccuacugcaacuacagcaaguacugguaccugaacaacaccgccaccggcaagaccucccugcccaagugcuggcugaucagcaacggcuccuaccucaacgagacgcacuucagcgacgacaucgagcaggaggcggacaacaugaucaccgagaugcugcagaaggaguacauggagcggcaggggaagacgccccugggccucgucgaccuguucguguucuccaccagcuucuaccugaucuccaucuuccugcaccucgugaagaucccgacccaccgccacaucgucggcaagagcugccccaagccccaccggcugaaccacauggggaucugcuccugcgggcuguacaagcagcccggcgugccggugcgcuggaagcggugaggacuaguaauaaggaaacuguaugaaugucugugggcaggaagugaagagauccuucuguaaagguuuuuggaauuaugucugcugaauaauaaacuuuuuugaaauaauaaaucugguagaaaaaugagaucuaaaaaaaaaaaaaaaaaaaaaaaaaaaaaaaaaaaaaaaaaaaaaaaaaaaaaaaaaaaaaaaaaaaaaaaaaaaaaaaaaaaaaaaaaaaaaaaaaaaa

SEQ ID NO: 37725 - RNA, 1788 nt, Artificial Sequence
  mRNA product Design b-4 (A100) comprising derived and/or modified sequence from LASV(G3010-SLE-2013;Clade IV)__AIT17344__GPCmut10 (opt1)
aggagagucccgcagucggcguccagcggcucugcuuguucgugugugugucguugcaggccuuauucaagcuuaccaugggccagaucgugaccuucuuccaggaggucccccacgugaucgaggaggugaugaacaucguccugaucgcccucagcauccuggccgugcugaaggggcucuacaacuucgcgaccugcggccugguggggcuggucacguuccuccugcugugcggccgcuccugcaccaccagccucuacaaggggguguacgagcugcagacccuggagcucaacauggagacgcugaacaugugcaugccgcuguccugcaccaagaacaacagccaccacuacaucauggugggcaacgagaccggccucgagcugacgcugaccaacaccuccaucaucaaccacaaguucugcaaccucagcgacgcccacaagaagaaccuguacaaccacgcccugauguccaucaucagcaccuuccaccucuccauccccaacuucaaccaguacgaggccaugagcugcgacuucaacgggggcaagaucuccguccaguacaaccugagccacuccuacgccggggacgcggccagccacugcggcacgguggccaacggggugcugcagaccuucaugcggauggccuggggcggcuccuacaucgcgcucgacagcggguacggcaagugggacugcaucaugaccuccuaccaguaccugaucauccagaacaccacgugggaggaccacugccaguucagccgccccucccccaucggguaccugggccuccugagccagcggacccgcgacaucuacaucagccggcgccugcucggcaccuucaccuggacgcuguccgacagcgaggggaaggacaccccgggcggguacugccugacccgguggaugcucaucgaggccgagcugaagugcuucggcaacaccgccgucgccaagugcaacgagaagcacgacgaggaguucugcgacaugcugcgccucuucgacuucugcaagcaggccauccagcggcugaagacggaggcgcagauguccauccagcugaucaacaaggccgugaacgcccucaucaacgaccagcugaucaugaagaaccaccuccgcgacaucauggggauccccuacugcaacuacagcaaguacugguaccugaaccacaccaccaccggcaagacgucccugcccaagugcuggcuggugagcaacggcuccuaccucaacgagacccacuucagcgacgacaucgagcagcaggccgacaacaugaucaccgagaugcugcagaaggaguacauggagcggcaggggaagacgccccugggccucgucgaccuguucguguucuccaccagcuucuaccugaucuccaucuuccugcaccucgugaagaucccgacccaccgccacaucgucggcaagagcugccccaagccccaccggcugaaccacauggggaucugcuccugcgggcuguacaagcagcccggcgugccggugcgcuggaagcggugaggacuaguaauaaggaaacuguaugaaugucugugggcaggaagugaagagauccuucuguaaagguuuuuggaauuaugucugcugaauaauaaacuuuuuugaaauaauaaaucugguagaaaaaugagaucuaaaaaaaaaaaaaaaaaaaaaaaaaaaaaaaaaaaaaaaaaaaaaaaaaaaaaaaaaaaaaaaaaaaaaaaaaaaaaaaaaaaaaaaaaaaaaaaaaaaa

SEQ ID NO: 37726 - RNA, 1788 nt, Artificial Sequence
  mRNA product Design b-4 (A100) comprising derived and/or modified sequence from LASV(G502-SLE-2009;Clade IV)__AIT17126__GPCmut10 (opt1)
aggagagucccgcagucggcguccagcggcucugcuuguucgugugugugucguugcaggccuuauucaagcuuaccaugggccagaucgugaccuucuuccaggaggucccccacgugaucgaggaggugaugaacaucguccugaucgcccucagcauccuggccgugcugaaggggcucuacaacuucgcgaccugcggccugguggggcugcucacguuccugcugcucugcggccgcuccugcaccaccgggcuguacaagggcgucuacgagcugcagacccucgagcugaacauggagacgcugaacaugugcaugccgcucagcugcaccaagaacaacucccaccacuacaucauggugggcaacgagaccgggcuggagcugacgcucaccaacaccagcaucaucaaccacaaguucugcaaccuguccgacgcccacaagaagaaccuguacgaccacgcccucaugagcaucaucuccaccuuccaccugagcauccccaacuucaaccaguacgaggccauguccugcgacuucaacggcgggaagaucagcgugcaguacaaccugucccacagcuacgccggcgacgcggccgaccacugcgggacggucgccaacggcgugcuccagaccuucaugcggauggccuggggcggguccuacaucgcgcuggacagcggccgcgggcggugggacugcaucaugaccuccuaccaguaccugaucauccagaacaccacgugggaggaccacugccaguucagccgccccucccccaucggcuaccucggccugcugagccagcggacccgcgacaucuacaucucccggcgccuccuggggaccuucaccuggacgcugagcgacagcgagggcaaggacacccccgggggcuacugccucacccgguggaugcugaucgaggccgagcugaagugcuucgggaacaccgccguggccaagugcaacgagaagcacgacgaggaguucugcgacaugcuccgccuguucgacuucugcaagcaggccauccagcggcugaaggcggaggcccagauguccauccagcucaucaacaaggccgucaacgcccugaucaacgaccagcuggugaugaagaaccaccuccgcgacaucaugggcauccccuacugcaacuacagccgguacugguaccugaaccacacgaccaccggccgcaccucccugcccaagugcuggcucgugagcaacggguccuaccugaacgagacgcacuucagcgacgacaucgagcagcaggccgacaacaugaucaccgagaugcugcagaaggaguacauggagcggcagggcaagaccccgcucgggcuggucgaccuguucguguucuccaccagcuucuaccugaucuccaucuuccuccaccuggugaagaucccgacgcaccgccacaucgucggcaagagcugccccaagccccaccggcugaaccacauggggaucugcuccugcggccucuacaagcagcccggcgugccggugaaguggaagcgcugaggacuaguaauaaggaaacuguaugaaugucugugggcaggaagugaagagauccuucuguaaagguuuuuggaauuaugucugcugaauaauaaacuuuuuugaaauaauaaaucugguagaaaaaugagaucuaaaaaaaaaaaaaaaaaaaaaaaaaaaaaaaaaaaaaaaaaaaaaaaaaaaaaaaaaaaaaaaaaaaaaaaaaaaaaaaaaaaaaaaaaaaaaaaaaaaa

SEQ ID NO: 37727 - RNA, 1788 nt, Artificial Sequence
  mRNA product Design b-4 (A100) comprising derived and/or modified sequence from LASV(G733-SLE-2010;Clade IV)__AIT17154__GPCmut10 (opt1)
aggagagucccgcagucggcguccagcggcucugcuuguucgugugugugucguugcaggccuuauucaagcuuaccaugggccagaucgugaccuucuuccaggaggucccccacgugaucgaggaggugaugaacaucguccugaucgcccucagcauccuggccgugcugaaggggcucuacaacuucgcgaccugcggcaucguggggcuggucuccuuccugcuccugugcggccgcagcugcacgaccucccuguacaaggggguguacgagcuccagacccuggagcugaacauggagacccucaacaugugcaugccgcugagcugcaccaagaacaacucccaccacuacaucauggugggcaacgagaccggccuggagcucacccugacgaacaccagcaucaucaaccacaaguucugcaaccuguccgacgcccacaagaagaaccucuacgaccacgcccugaugagcaucaucuccaccuuccaccugagcauccccaacuucaaccaguacgaggccauguccugcgacuucaacgggggcaagaucagcguccaguacaaccucucccacagcuacgccggggacgcggccaaccacugcggcaccaucgccaacggggugcugcagacguucaugcggauggccuggggcggcuccuacaucgcgcuggacagcgggcgcgaccggugggacugcaucaugaccuccuaccaguaccucaucauccagaacaccaccugggaggaccacugccaguucagccgccccucccccaucggcuaccuggggcugcucagccagcggacgcgcgacaucuacaucagccggcgccugcugggcaccuucaccuggacccucuccgacagcgagggcaaggacacgcccgggggcuacugccugacccgguggaugcugaucgaggccgagcucaagugcuucgggaacaccgccguggccaagugcaacgagaagcacgacgaggaguucugcgacaugcugcgccuguucgacuucugcaagcaggccauccagcggcucaaggcggaggcccagauguccauccagcugaucaacaaggccgucaacgcccugaucaacgaccagcucaucaugaagaaccaccuccgcgacaucaugggcauccccuacugcaacuacagcaaguacugguaccugaaccacaccacgaccgggaagaccucccugcccaagugcuggcuggugagcaacggcuccuaccugaacgagacccacuucagcgacgacaucgagcagcaggccgacaacaugaucacggagaugcuccagaaggaguacauggagcggcagggcaagaccccgcuggggcugguggaccucuucgucuucuccaccagcuucuaccugaucuccaucuuccugcaccuggugaagaucccgacccaccgccacguggucggcaagagcugccccaagccccaccggcucaaccacauggggaucugcuccugcggccuguacgggcagcccggcgugccggugaaguggaagcgcugaggacuaguaauaaggaaacuguaugaaugucugugggcaggaagugaagagauccuucuguaaagguuuuuggaauuaugucugcugaauaauaaacuuuuuugaaauaauaaaucugguagaaaaaugagaucuaaaaaaaaaaaaaaaaaaaaaaaaaaaaaaaaaaaaaaaaaaaaaaaaaaaaaaaaaaaaaaaaaaaaaaaaaaaaaaaaaaaaaaaaaaaaaaaaaaaa

SEQ ID NO: 37728 - RNA, 1788 nt, Artificial Sequence
  mRNA product Design b-4 (A100) comprising derived and/or modified sequence from MOPV/LASV reassortant(IGS-1;Clade IV)__AFY05576__GPCmut10 (opt1)
aggagagucccgcagucggcguccagcggcucugcuuguucgugugugugucguugcaggccuuauucaagcuuaccaugggccagaucgugaccuucuuccaggaggucccccacgugaucgaggaggugaugaacaucguccugaucgcccucagcgugcuggccgugcugaaggggcucuacaacuucgcgaccugcggccuggucgggcuggugacguuccuccugcugugcggccgcuccugcaccaccagccucuacaaggggguguacgagcugcagacccuggagcucaacauggagacgcugaacaugugcaugccgcuguccugcaccaagaacaacagccaccacuacaucauggucggcaacgagaccggccucgagcugacgcugaccaacaccuccaucaucaaccacaaguucugcaaccucagcgacgcccacaagaagaaccuguacgaccacgcccugauguccaucaucagcaccuuccaccucuccauccccaacuucaaccaguacgaggccaugagcugcgacuucaacgggggcaagaucuccgugcaguacaaccugagccacuccuacgccggggacgcggccaaccacugcggcacgguggccaacgggguccugcagaccuucaugcggauggccuggggcggcagcuacaucgcgcucgacuccgggcgcggcaacugggacugcaucaugaccagcuaccaguaccugaucauccagaacaccacgugggaggaccacugccaguucucccggcccagccccaucggguaccugggccuccugucccagcgcacccgggacaucuacaucagccgccggcugcucggcaccuucaccuggacgcugagcgacuccgagggggaggacaccccgggcggguacugccugacccgcuggaugcucaucgaggccgagcugaagugcuucggcaacaccgccguggccaagugcaacgagaagcacgacgaggaguucugcgacaugcugcggcuguucgacuucugcaagcaggccauccagcgccugaaggcggaggcccagaugagcauccagcugaucaacaaggccgugaacgcccucaucaacgaccagcugaucaugaagaaccaccuccgggacaucauggggauccccuacugcaacuacuccaaguacugguaccucaaccacacgaccaccggccgcaccagccugcccaagugcuggcuggucuccaacggcagcuaccucaacgagacgcacuucuccgacgacaucgagcagcaggccgacaacaugaucaccgagaugcugcagaaggaguacauggagcggcaggggaagacgccccugggccucguggaccuguucguguucagcaccuccuucuaccugaucagcaucuuccugcaccucgucaagaucccgacccaccgccacaucguggggaaguccugccccaagccccaccggcugaaccacaugggcaucugcagcugcgggcuguacaagcagcccggcgugccggucaaguggaagcgcugaggacuaguaauaaggaaacuguaugaaugucugugggcaggaagugaagagauccuucuguaaagguuuuuggaauuaugucugcugaauaauaaacuuuuuugaaauaauaaaucugguagaaaaaugagaucuaaaaaaaaaaaaaaaaaaaaaaaaaaaaaaaaaaaaaaaaaaaaaaaaaaaaaaaaaaaaaaaaaaaaaaaaaaaaaaaaaaaaaaaaaaaaaaaaaaaa

SEQ ID NO: 37729 - RNA, 1788 nt, Artificial Sequence
  mRNA product Design b-4 (A100) comprising derived and/or modified sequence from LASV(LM765-SLE-2012;Clade IV)__AIT17814__GPCmut10 (opt1)
aggagagucccgcagucggcguccagcggcucugcuuguucgugugugugucguugcaggccuuauucaagcuuaccaugggccagaucgugaccuucuuccaggaggucccccacgugaucgaggaggugaugaacaucguccugaucgcccucagcauccuggccgugcugaaggggcucuacaacuucgcgaccugcggccugguggggcuggucacguuccuccugcugugcggccgcuccugcaccaccagccucuacaaggggguguacgagcugcagacccuggagcucaacauggagacgcugaacaugugcaugccgcuguccugcaccaagaacaacagccaccacuacaucauggugggcaacgagaccggccucgagcugacgcugaccaacaccuccaucaucgaccacaaguucugcaaccucagcgacgcccaccggaagaaccuguacgaccacgcccugauguccaucaucagcaccuuccaccucuccauccccaacuucaaccaguacgaggccaugagcugcgacuucaacgggggcaagaucuccguccaguacaaccugagccacuccuacgccaaggacgcggccgaccacugcgggacgguggccaacggcgugcugcagaccuucaugcgcauggccuggggcgggagcuacaucgcgcucgacuccggccgggggcgcugggacugcaucaugaccagcuaccaguaccugaucauccagaacaccacgugggaggaccacugccaguucucccggcccagccccaucggcuaccuggggcuccugucccagcgcacccgggacaucuacaucagccgccggcugcucggcaccuucaccuggacgcugagcgacuccgagggcaaggacacccccgggggcuacugccugacccgcuggaugcucaucgaggccgagcugaagugcuucgggaacaccgccgucgccaagugcaacgagaagcacgacgaggaguucugcgacaugcugcggcuguucgacuucugcaagcaggccauccagcgccugaaggcggaggcccagaugagcauccagcugaucaacaaggccgugaacgcccucaucaacgaccagcugaucaugaagaaccaccuccgggacaucaugggcauccccuacugcaacuacuccaaguacugguaccucaaccacacgaccaccgggaagaccagccugcccaagugcuggcugguguccaacggcagcuaccucaacgagacgcacuucuccgacgacaucgagcagcaggccgacaacaugaucaccgagaugcugcagaaggaguacauggagcgccagggcaagaccccgcuggggcucgucgaccuguucguguucagcaccuccuucuaccugaucagcaucuuccugcaccucgugaagaucccgacgcaccggcacaucgucggcaagcccugccccaagccccaccgccugaaccacauggggaucugcuccugcggccuguacaagcagccgggggugcccgugaaguggaagcggugaggacuaguaauaaggaaacuguaugaaugucugugggcaggaagugaagagauccuucuguaaagguuuuuggaauuaugucugcugaauaauaaacuuuuuugaaauaauaaaucugguagaaaaaugagaucuaaaaaaaaaaaaaaaaaaaaaaaaaaaaaaaaaaaaaaaaaaaaaaaaaaaaaaaaaaaaaaaaaaaaaaaaaaaaaaaaaaaaaaaaaaaaaaaaaaaa

SEQ ID NO: 37730 - RNA, 1788 nt, Artificial Sequence
  mRNA product Design b-4 (A100) comprising derived and/or modified sequence from LASV(LM776-SLE-2012;Clade IV)__AIT17824__GPCmut10 (opt1)
aggagagucccgcagucggcguccagcggcucugcuuguucgugugugugucguugcaggccuuauucaagcuuaccaugggccagaucgugaccuucuuccaggaggucccccacgugaucgaggaggugaugaacaucguccugaucgcccucagcauccuggccgugcugaaggggcucuacaacuucgcgaccugcggccugguggggcuggucacguuccuccugcugugcggccgcuccugcaccaccagcguguacaaggggguguacgagcuccagacccuggagcugaacauggagacgcucaacaugugcaugccgcuguccugcaccaagaacaacagccaccacuacaucauggucggcaacgagaccggccuggagcucacgcugaccaacaccuccaucaucaaccacaaguucugcaaccugagcgacgcccacaagaagaaccucuacgaccacgcccugauguccaucaucagcaccuuccaccuguccauccccaacuucaaccaguacgaggccaugagcugcgacuucaacgggggcaagaucuccgugcaguacaaccucagccacuccuacgccggggacgcggccaaccacugcggcacgguggccaacgggguccugcagaccuucaugcggauggccuggggcggcagcuacaucgcgcuggacuccgggcacggcaagugggacugcaucaugaccagcuaccaguaccucaucauccagaacaccacgugggaggaccacugccaguucucccgccccagccccaucggguaccugggccugcucucccagcggacccgcgacaucuacaucagccggcgccugcugggcaccuucaccuggacgcucagcgacuccgaggggaaggacaccccgggcggguacugccugacccgguggaugcugaucgaggccgagcucaagugcuucggcaacaccgccguggccaagugcaacgagaagcacgacgaggaguucugcgacaugcugcgccuguucgacuucugcaagcaggccauccagcggcucaaggcggaggcccagaugagcauccagcugaucaacaaggccgugaacgcccugaucaacgaccagcucaucaugaagaaccaccuccgcgacaucauggggauccccuacugcaacuacuccaaguacugguaccugaaccacacgaccaccggcaagaccagccugcccaagugcuggcuggucuccaacggcagcuaccugaacgagacgcacuucuccgacgacaucgagcagcaggccgacaacaugaucaccgagaugcuccagaaggaguacauggagcggcaggggaagacgccccugggccugguggaccucuucguguucagcaccuccuucuaccugaucagcaucuuccugcaccuggucaagaucccgacccaccgccacaucguggggaaguccugccccaagccccaccggcucaaccacaugggcaucugcagcugcgggcuguacaagcagcccggcgugccgguccgcuggaagcggugaggacuaguaauaaggaaacuguaugaaugucugugggcaggaagugaagagauccuucuguaaagguuuuuggaauuaugucugcugaauaauaaacuuuuuugaaauaauaaaucugguagaaaaaugagaucuaaaaaaaaaaaaaaaaaaaaaaaaaaaaaaaaaaaaaaaaaaaaaaaaaaaaaaaaaaaaaaaaaaaaaaaaaaaaaaaaaaaaaaaaaaaaaaaaaaaa

SEQ ID NO: 37731 - RNA, 1788 nt, Artificial Sequence
  mRNA product Design b-4 (A100) comprising derived and/or modified sequence from LASV(Mad39;Clade IV)__ANH09722__GPCmut10 (opt1)
aggagagucccgcagucggcguccagcggcucugcuuguucgugugugugucguugcaggccuuauucaagcuuaccaugggccagaucgugaccuucuuccaggaggucccccacgugaucgaggaggugaugaacaucguccugaucgcccucagcauccuggccgugcugaaggggcucuacaacguggcgaccugcggccugaucgggcuggucacguuccuccugcugugcggccgcuccugcaccaccacccucuacaaggggguguacgagcugcaggcccuggagcucaacauggagacgcugaacaugugcaugccgcugagcugcaccaagaacaacucccaccacuacauccgggugggcaacgagaccggccucgagcugacgcugaccaacaccagccucaucaaccacaaguucugcaaccuguccgacgcccacaagaagaaccuguacgaccacgcccucaugagcaucaucuccaccuuccaccugagcauccccaacuucaaccaguacgaggccauguccugcgacuucaacgacgggaagaucagcguccaguacaaccugucccacacguacgcgggcgacaccgccaaccacugcgggaccguggccaacggcgugcuccagaccuucaugcgcauggccuggggcgggagcuacaucgcgcuggacuccggccgcgggggcugggacugcaucaugacgagcuaccaguaccugaucauccagaacaccaccugggaggaccacugccaguucucccggcccagccccaucggguaccucggccugcugucccagcggacccgcgacaucuacaucagccggcgccuccugggcacguucaccuggacccuguccgacagcgaggggaaggacaccccgggcggguacugccucacgcgguggaugcugaucgaggccgagcugaagugcuucggcaacaccgccgucgccaagugcaacgagaagcacgacgaggaguucugcgacaugcuccgccuguucgacuucugcaagcaggccauccagcggcugaaggcggaggcccagaugagcauccagcucaucaacaaggccgugaacgcccugaucaacgaccagcugaucaugaagaaccaccuccgcgacaucauggggauccccuacugcaacuacuccaaguacugguaccugaaccacaccgugaccggcaagacgagccugcccaagugcuggcucgucuccaacggcagcuaccugaacgagacccacuucuccgacgacaucgagcagcaggccgacaacaugaucaccgagaugcugcagaaggaguacauggagcggcaggggaagacgccccucggccugguggaccuguucguguucagcaccuccuucuaccugaucagcaucuuccuccaccuggucaagaucccgacccaccgccacgugguggggaagcccugccccaagccccaccggcugaaccacaugggcaucugcuccugcggguucuacaagcagccgggcguccccgugcgcuggaagcggugaggacuaguaauaaggaaacuguaugaaugucugugggcaggaagugaagagauccuucuguaaagguuuuuggaauuaugucugcugaauaauaaacuuuuuugaaauaauaaaucugguagaaaaaugagaucuaaaaaaaaaaaaaaaaaaaaaaaaaaaaaaaaaaaaaaaaaaaaaaaaaaaaaaaaaaaaaaaaaaaaaaaaaaaaaaaaaaaaaaaaaaaaaaaaaaaa

SEQ ID NO: 37732 - RNA, 1788 nt, Artificial Sequence
  mRNA product Design b-4 (A100) comprising derived and/or modified sequence from LASV(Z0947-SLE-2011;Clade IV)__AIT17840__GPCmut10 (opt1)
aggagagucccgcagucggcguccagcggcucugcuuguucgugugugugucguugcaggccuuauucaagcuuaccaugggccagaucgugaccuucuuccaggaggucccccacgugaucgaggaggugaugaacaucguccugaucgcccucagcauccuggccgugcugaaggggcucuacaacuucgcgaccugcggccugguggggcuggucacguuccuccugcugugcggccgcuccugcaccaucagccucuacaaggggguguacgagcugcagacccuggagcucaacauggagacccugaacaugugcaugccgcuguccugcaccaagaacaacagccaccacuacaucauggugggcaacgagaccggccucgagcugacccugacgaacaccuccaucaucaaccacaaguucugcaaccucagcgacgcccacaagaagaaccuguacgaccacgcccugauguccaucaucagcaccuuccaccucuccauccccaacuucaaccaguacgaggccaugagcugcgacuucaacgggggcaagaucuccguccaguacaaccugagccacuccuacgccggggacgcggccaaccacugcggcaccguggccaacggggugcugcagacguucaugcggauggccuggggcggcagcuacaucgcgcucgacuccgggcgcgaccggugggacugcaucaugaccagcuaccaguaccugaucauccagaacaccaccugggaggaccacugccaguucucccgccccagccccaucggcuaccuggggcuccugucccagcggacgcgcgacaucuacaucagccggcgccugcucggcaccuucaccuggacccugagcgacuccgagggcaaggacacgcccgggggcuacugccugacccgguggaugcucaucgaggccgagcugaagugcuucgggaacaccgccgucgccaagugcaacgagaagcacgacgaggaguucugcgacaugcugcgccucuucgacuucugcaagcaggccauccagcggcugaaggcggaggcccagaugagcauccagcugaucaacaaggccgugaacgcccucaucaacgaccagcugaucaugaagaaccaccuccgcgacaucaugggcauccccuacugcaacuacuccaaguacugguaccugaaccacaccacgaccgggaagaccagccugcccaagugcuggcugguguccaacggcagcuaccucaacgagacccacuucuccgacgacaucgagcagcaggccgacaacaugaucacggagaugcugcagaaggaguacauggagcggcagggcaagaccccgcuggggcucgucgaccuguucguguucagcaccuccuucuaccugaucagcaucuuccugcaccucgugaagaucccgacccaccgccacaucgucggcaagcccugccccaagccccaccggcugaaccacauggggaucugcuccugcggccuguacaagcagccgggggugcccgugaaguggaagcgcugaggacuaguaauaaggaaacuguaugaaugucugugggcaggaagugaagagauccuucuguaaagguuuuuggaauuaugucugcugaauaauaaacuuuuuugaaauaauaaaucugguagaaaaaugagaucuaaaaaaaaaaaaaaaaaaaaaaaaaaaaaaaaaaaaaaaaaaaaaaaaaaaaaaaaaaaaaaaaaaaaaaaaaaaaaaaaaaaaaaaaaaaaaaaaaaaa

SEQ ID NO: 37733 - RNA, 1788 nt, Artificial Sequence
  mRNA product Design b-4 (A100) comprising derived and/or modified sequence from LASV(Josiah;Clade IV)__NP_694870__GPCmut10 (opt1)
aggagagucccgcagucggcguccagcggcucugcuuguucgugugugugucguugcaggccuuauucaagcuuaccaugggccagaucgugaccuucuuccaggaggucccccacgugaucgaggaggugaugaacaucguccugaucgcccucagcgugcuggccgugcugaaggggcucuacaacuucgcgaccugcggccuggucgggcuggugaccuuccuccugcugugcggccgcuccugcaccaccagccucuacaaggggguguacgagcugcagacccuggagcucaacauggagacgcugaacaugugcaugccgcuguccugcaccaagaacaacagccaccacuacaucauggucggcaacgagaccggccucgagcugacccugacgaacaccuccaucaucaaccacaaguucugcaaccucagcgacgcccacaagaagaaccuguacgaccacgcccugauguccaucaucagcaccuuccaccucuccauccccaacuucaaccaguacgaggccaugagcugcgacuucaacgggggcaagaucuccgugcaguacaaccugagccacuccuacgccggggacgcggccaaccacugcggcaccguggccaacgggguccugcagacguucaugcggauggccuggggcggcagcuacaucgcgcucgacuccgggcgcggcaacugggacugcaucaugaccagcuaccaguaccugaucauccagaacaccaccugggaggaccacugccaguucucccggcccagccccaucggguaccugggccuccugucccagcgcacgcgggacaucuacaucagccgccggcugcucggcaccuucaccuggacccugagcgacuccgaggggaaggacacgccgggcggguacugccugacccgcuggaugcucaucgaggccgagcugaagugcuucggcaacaccgccguggccaagugcaacgagaagcacgacgaggaguucugcgacaugcugcggcuguucgacuucugcaagcaggccauccagcgccugaaggcggaggcccagaugagcauccagcugaucaacaaggccgugaacgcccucaucaacgaccagcugaucaugaagaaccaccuccgggacaucauggggauccccuacugcaacuacuccaaguacugguaccucaaccacaccacgaccggccgcaccagccugcccaagugcuggcuggucuccaacggcagcuaccucaacgagacccacuucuccgacgacaucgagcagcaggccgacaacaugaucacggagaugcugcagaaggaguacauggagcggcaggggaagacgccccugggccugguggaccucuucguguucagcaccuccuucuaccugaucagcaucuuccugcaccucgucaagaucccgacccaccgccacaucguggggaaguccugccccaagccccaccggcugaaccacaugggcaucugcagcugcgggcuguacaagcagcccggcgugccggucaaguggaagcgcugaggacuaguaauaaggaaacuguaugaaugucugugggcaggaagugaagagauccuucuguaaagguuuuuggaauuaugucugcugaauaauaaacuuuuuugaaauaauaaaucugguagaaaaaugagaucuaaaaaaaaaaaaaaaaaaaaaaaaaaaaaaaaaaaaaaaaaaaaaaaaaaaaaaaaaaaaaaaaaaaaaaaaaaaaaaaaaaaaaaaaaaaaaaaaaaaa

SEQ ID NO: 37734 - RNA, 1785 nt, Artificial Sequence
  mRNA product Design b-4 (A100) comprising derived and/or modified sequence from LASV(LP;Clade I)__AAF86701__GPCmut10 (opt1)
aggagagucccgcagucggcguccagcggcucugcuuguucgugugugugucguugcaggccuuauucaagcuuaccaugggccagaucaucaccuucuuccaggaggugccccacgucaucgaggaggugaugaacaucgugcugaucgcccucagccugcuggccauccucaaggggcuguacaacaucgcgaccugcggcaucaucgggcuggucgccuuccucuuccugugcggcaaguccugcagccugacgcucaagggcggguacgagcugcagacccuggagcucaacauggagacccugaacaugugcaugccgcuguccugcaccaagaacagcucccaccacuacauccgcgugggcaacgagacggggcucgagcugacccugaccaacaccagcaucaucaaccacaaguucugcaaccucuccgacgcccacaagaagaaccuguacgaccacgcccugaugagcaucaucuccacguuccaccucagcauccccaacuucaaccaguacgaggccauguccugcgacuucaacggcgggaagaucagcgugcaguacaaccugucccacagcuacgcgggcgacgccgccgagcacugcgggaccgucgccaacggcgugcugcagaccuucaugcggauggcguggggcgggcgcuacaucgcccucgacuccggcaaggggaacugggacugcaucaugaccagcuaccaguaccugaucauccagaacacgaccugggaggaccacugccaguucucccggcccagccccaucggcuaccugggccuccugucccagcgcacccgggacaucuacaucagccgccggcugcucgggaccuucacguggacccugagcgacuccgagggcaacgagacccccgggggcuacugccugacccgcuggaugcucaucgaggccgagcugaagugcuucgggaacacggccguggccaagugcaacgagaagcacgacgaggaguucugcgacaugcugcggcuguucgacuucugcaagcaggcgauccgccggcugaaggccgaggcccagaugagcauccagcugaucaacaaggccgucaacgcccucaucaacgaccagcugaucaugaagaaccaccuccgcgacaucaugggcauccccuacugcaacuacuccaaguacugguaccucaaccacaccagcuccggccggaccagccugcccaagugcuggcugaucuccaacgggagcuaccucaacgagacccaguucuccgacgacaucgagcagcaggcggacaacaugaucacggagaugcugcagaaggaguacaucgagcgccagggcaagaccccgcuggggcugguggacaucuucaucuucagcaccuccuucuaccucaucagcaucuuccugcaccugaucaagaucccgacccaccggcacaucgugggcaagcccugccccaagccccaccgccucaaccacaugggggucugcuccugcggccuguacaagcacccgggcgugcccacgaaguggaagcggugaggacuaguaauaaggaaacuguaugaaugucugugggcaggaagugaagagauccuucuguaaagguuuuuggaauuaugucugcugaauaauaaacuuuuuugaaauaauaaaucugguagaaaaaugagaucuaaaaaaaaaaaaaaaaaaaaaaaaaaaaaaaaaaaaaaaaaaaaaaaaaaaaaaaaaaaaaaaaaaaaaaaaaaaaaaaaaaaaaaaaaaaaaaaaaaaa

SEQ ID NO: 37735 - RNA, 1785 nt, Artificial Sequence
  mRNA product Design b-4 (A100) comprising derived and/or modified sequence from LASV(803213;Clade II)__AAF86703__GPCmut10 (opt1)
aggagagucccgcagucggcguccagcggcucugcuuguucgugugugugucguugcaggccuuauucaagcuuaccaugggccagaucaucaccuucuuccaggaggugccccacgucaucgaggaggugaugaacaucgugcugaucgcccucagccugcuggccauccucaaggggaucuacaacgucgcgaccugcggccuguucgggcugaucuccuuccuccugcugugcggccgcagcugcuccgugacguacaaggggguguacgagcuccagacccuggagcugaacauggccaaccucaacaugugcaugccgcugagcugcaccaagaacaacucccaccacuacaucauggucggcaacgagaccggccuggagcucacgcugaccaacaccagcaucaucaaccacaaguucugcaaccuguccgacgcccacaagaagaaccucuacgaccacgcccugaugagcaucaucuccaccuuccaccugagcauccccaacuucaaccaguacgaggccauguccugcgacuucaacgggggcaagaucagcgugcaguacaaccucucccacagcuucgcgguggacgccgccaaccacugcgggacgaucgccaacggcguccugcagaccuucaugcggauggcguggggcggguccuacaucgcccuggacagcggcaaggggaacugggacugcaucaugaccuccuaccaguaccucaucauccagaacaccacgugggaggaccacugccaguucagccgccccucccccaucggcuaccuggggcugcucagccagcggacccgcgacaucuacaucagccggcgccugcugggcaccuucaccuggacgcucuccgacagcgagggcaacgaggcccccgggggcuacugccugacccgguggaugcugaucgaggccgagcucaagugcuucgggaacaccgccguggcgaagugcaacgagaagcacgacgaggaguucugcgacaugcugcgccuguucgacuucugcaagcaggccaucaagcggcucaagaccgaggcccagauguccauccagcugaucaacaaggccgugaacgcccugaucaacgaccagcucaucaugaagaaccaccuccgcgacaucaugggcauccccuacugcaacuacagccgguacugguaccugaaccacacggucaccgggaagaccucccugccccgcugcuggcuggugagcaacggcuccuaccugaacgagacccacuucagcgacgacaucgagcagcaggcggacaacaugaucacggagaugcuccagaaggaguacauggaccggcagggcaagaccccgcuggggcugguggaccuguucgucuucuccaccagcuucuaccucaucuccaucuuccugcaccuggugaagaucccgacccaccgccacaucgugggcaagcccugccccaagccccaccggcucaaccacauggggaucugcagcugcggccuguacaagcacccggggguccccgugaaguggaagcgcugaggacuaguaauaaggaaacuguaugaaugucugugggcaggaagugaagagauccuucuguaaagguuuuuggaauuaugucugcugaauaauaaacuuuuuugaaauaauaaaucugguagaaaaaugagaucuaaaaaaaaaaaaaaaaaaaaaaaaaaaaaaaaaaaaaaaaaaaaaaaaaaaaaaaaaaaaaaaaaaaaaaaaaaaaaaaaaaaaaaaaaaaaaaaaaaaa

SEQ ID NO: 37736 - RNA, 1785 nt, Artificial Sequence
  mRNA product Design b-4 (A100) comprising derived and/or modified sequence from LASV(GA391;Clade III)__CAA36645__GPCmut10 (opt1)
aggagagucccgcagucggcguccagcggcucugcuuguucgugugugugucguugcaggccuuauucaagcuuaccaugggccagaucgugaccuucuuccaggaggucccccacgugaucgaggaggugaugaacaucguccugaucgcccucagcauccuggccauccugaaggggcucuacaacguggcgaccugcggccugaucgggcuggugaccuuccuccugcuguccggccgcagcugcucccucaucuacaaggggaccuacgagcugcagacccuggagcucaacauggagacccugaacaugugcaugccgcugagcugcacgaagaacaacucccaccacuacauccgggucggcaacgagaccggccucgagcugacccugaccaacacgagcauccucaaccacaaguucugcaaccuguccgacgcccacaagcgcaaccuguacgaccacagccucauguccaucaucagcaccuuccaccuguccauccccaacuucaaccaguacgaggccaugagcugcgacuucaacgggggcaagaucaccgugcaguacaaccugucccacagcuucgccguggacgccgcggggcacugcggcacccucgccaacgggguccugcagacguucaugcggauggccuggggcggcuccuacaucgcccuggacagcgggcgcggcaacugggacugcaucaugaccuccuaccaguaccucaucauccagaacaccaccugggacgaccacugccaguucagccggcccucccccaucggguaccugggccugcucagccagcgcacgcgggacaucuacaucagccgccggcugcugggcaccuucaccuggacccucuccgacagcgaggggaacgagacgccgggcggguacugccugacccgcuggaugcugaucgaggcggagcucaagugcuucggcaacaccgccguggccaagugcaacgagaagcacgacgaggaguucugcgacaugcugcggcuguucgacuucugcaagcaggccauccgccggcucaagaccgaggcccagauguccauccagcugaucaacaaggcggugaacgcccugaucaacgaccagcucaucaugaagaaccaccuccgcgacaucauggggauccccuacugcaacuacagccgguacugguaccugaaccacacguccaccggcaagaccagccugccccgcugcuggcugaucuccaacggcagcuaccugaacgagaccaaguucuccgacgacaucgagcagcaggccgacaacaugaucacggagaugcugcagaaggaguacaucgaccggcaggggaagacgccccucggccuggucgaccuguucguguucagcaccuccuucuaccucaucagcaucuuccugcaccuggugaagaucccgacccaccgccacaucgucgggaagcccugccccaagccccaccggcucaaccacaugggcaucugcuccugcgggcuguacaagcagccgggcgugcccgugcgcuggaagcggugaggacuaguaauaaggaaacuguaugaaugucugugggcaggaagugaagagauccuucuguaaagguuuuuggaauuaugucugcugaauaauaaacuuuuuugaaauaauaaaucugguagaaaaaugagaucuaaaaaaaaaaaaaaaaaaaaaaaaaaaaaaaaaaaaaaaaaaaaaaaaaaaaaaaaaaaaaaaaaaaaaaaaaaaaaaaaaaaaaaaaaaaaaaaaaaaa

SEQ ID NO: 37737 - RNA, 1788 nt, Artificial Sequence
  mRNA product Design b-4 (A100) comprising derived and/or modified sequence from LASV(AV;Clade V)__CCA30314__GPCmut10 (opt1)
aggagagucccgcagucggcguccagcggcucugcuuguucgugugugugucguugcaggccuuauucaagcuuaccaugggccagaucgugaccuucuuccaggaggucccccacgugaucgaggaggugaugaacaucguccugaucgcccucagcauccuggccgugcugaaggggcucuacaacaucgcgaccugcggccugaucgggcugaucacguuccuccugcugugcggccgcuccugcagcuccaaccucuacaaggggguguacgagcugcagagccuggaccucaacauggagacccugaacaugugcaugccgcuguccugcaccaagaacaacagccaccacuacauccgggucggcaacgacaccggccucgagcugacgcugaccaacaccuccauccucaaccacaaguucugcaaccugagcgacgcccacaagaaggaccuguacgaccacgcccucauguccaucaucagcaccuuccaccuguccauccccaacuucaaccaguacgaggccaugagcugcgacuucaacgggggcaagaucuccgugcaguacaaccugagccacuccuacgccaucgacgcggccaaccacugcgggacgguggccaacggcauccuccagaccuucaugcgcauggccuggggcgggagcuacaucgcgcuggacuccggccgggggaacugggacugcaucaugaccagcuaccaguaccugaucauccagaacaccacgugggagaaccacugccaguucucccgccccagccccaucggcuaccucgggcugcugagccagcggacccgcgacaucuacaucucccggcgccuccugggcaccuucaccuggacgcugagcgacuccgagggcaacgccacccccgggggcuacugccucacccgguggaugcugaucgaggccgagcugaagugcuucgggaacaccgccgucgccaagugcaacgagaagcacgacgaggaguucugcgacaugcuccgccuguucgacuucugcaagcaggcgaucagccggcugaaguccgaggcccagaugagcauccagcucaucaacaaggccgugaacgcccugaucaacgaccagcugaucaugaagaaccaccuccgcgacaucaugggcauccccuacugcaacuacuccaaguacugguaccugaaccacacgaucaccgggaagaccagccugcccaagugcuggcucguguccaacggcagcuaccugaacgagacccacuucuccgacgacaucgagcagcaggccgacaacaugaucacggagaugcugcagaaggaguacauggagcggcagggcaagaccccgcuggggcucgucgaccuguucguguucagcaccuccuucuaccugaucagcaucuuccuccgccuggugaagaucccgacccaccggcacaucgucggcaagcccugccccaagccccaccgccugaaccacauggggaucugcuccugcggccucuacaagcagccgggggugcccgugcgguggaagcgcugaggacuaguaauaaggaaacuguaugaaugucugugggcaggaagugaagagauccuucuguaaagguuuuuggaauuaugucugcugaauaauaaacuuuuuugaaauaauaaaucugguagaaaaaugagaucuaaaaaaaaaaaaaaaaaaaaaaaaaaaaaaaaaaaaaaaaaaaaaaaaaaaaaaaaaaaaaaaaaaaaaaaaaaaaaaaaaaaaaaaaaaaaaaaaaaaa

SEQ ID NO: 37738 - RNA, 1785 nt, Artificial Sequence
  mRNA product Design b-4 (A100) comprising derived and/or modified sequence from LASV(Togo/2016/7082;Clade VI)__AMR44577__GPCmut10 (opt1)
aggagagucccgcagucggcguccagcggcucugcuuguucgugugugugucguugcaggccuuauucaagcuuaccaugggccagaucaucaccuucuuccaggaggugccccacgucaucgaggaggugaugaacaucgugcugaucgcccucagccugcuggccauccucaagggggucuacaacguggcgaccugcggcaucaucgggcuggugacguuccuguuccucugcggccgcuccugcagccugaucuacaagggguccuacgagcugcagacccucgagcugaacauggagacccugaacaugugcaugccgcucagcugcaccaagaacuccagccaccacuacauccgggucggcaacgagacgggccuggagcugacccucaccaacaccuccaucaucaaccacaaguucugcaaccugagcgacgcccacaagcgcaaccuguacgaccacgcccucauguccauccugagcacguuccaccuguccauccccaacuucaaccaguacgaggccaugagcugcgacuucaacgggggcaagaucuccgugcaguacaaccucagccacgccuacgcgguggacgccgccgagcacugcgggaccgucgccaacggcgugcugcagaccuucaugcggauggcguggggcggguccuacaucgcccuggacagcggccgcgggaacugggacugcaucaugaccuccuaccaguaccucaucauccagaacacgaccugggaggaccacugccaguucagccggcccucccccaucggcuaccuggggcugcucagccagcgcacccgggacaucuacaucagccgccggcugcugggcaccuucacguggacccucuccgacagcgagggcaacgagacccccgggggcuacugccugacccgcuggaugcugaucgaggccgagcucaagugcuucgggaacacggccguggccaagugcaacgagaagcacgacgaggaguucugcgacaugcugcggcuguucgacuucugcaagcaggcgauccagcgccucaaguccgaggcccagaugagcauccagcugaucaacaaggccgucaacgcccugaucaacgaccagcucaucaugaagaaccaccuccgggacaugaugggcauccccuacugcaacuacuccaaguacugguaccugaaccacaccagcuccgggcgcaccagccugcccaagugcuggcugguguccaacggcagcuaccugaacgagacccacuucuccgacgacaucgagcagcaggccgacaacaugaucacggagaugcuccagaaggaguacaucgaccggcagggcaagaccccgcuggggcugguggaccuguucgucuucagcaccuccuucuaccucaucagcaucuuccugcaccugaucaagaucccgacccaccgccacaucgugggcaagcccugccccaagccccaccggcucaaccacauggggaucugcuccugcggccuguacaagcagccgggggugcccacgcgcuggaagcggugaggacuaguaauaaggaaacuguaugaaugucugugggcaggaagugaagagauccuucuguaaagguuuuuggaauuaugucugcugaauaauaaacuuuuuugaaauaauaaaucugguagaaaaaugagaucuaaaaaaaaaaaaaaaaaaaaaaaaaaaaaaaaaaaaaaaaaaaaaaaaaaaaaaaaaaaaaaaaaaaaaaaaaaaaaaaaaaaaaaaaaaaaaaaaaaaa

SEQ ID NO: 37739 - RNA, 1785 nt, Artificial Sequence
  mRNA product Design b-4 (A100) comprising derived and/or modified sequence from LASV(KAK-428;Clade n.d. (VII))__ANH09740__GPCmut10 (opt1)
aggagagucccgcagucggcguccagcggcucugcuuguucgugugugugucguugcaggccuuauucaagcuuaccaugggccagaucgugaccuucuuccaggaggucccccacgugaucgaggaggugaugaacaucguccugaucgcccucagccugcuggccauccucaaggggcuguacaacuucgcgaccugcggcgugaucgggcugaucacguuccuccugcugugcggccgcuccugcagcgccaccuacaaggggcaguacgagcuccagacccuggagcugaacauggagucccucaacaugugcaugccgcugagcugcaccaagaacaacucccaccacuacauccgggccggcaacaacacgggccuggagcucacccugaccaacaccagcaucaucucccacaaguucugcaaccugagcgacgcccacaagaagaaccucuacgaccacacgcugauguccaucaucaccaccuuccaccugagcauccccaacuucaaccaguacgaggccauguccugcgacuucaacgggggcaagaucagcauccaguacaaccucucccacagcuacgcgggggacgccgcccagcacugcggcaccguggccaacgggguccugcagacguucaugcgcauggcguggggcggcuccuaccuggcccucgacagcgggcggcgcggcugggacugcaucaucuccagcuaccaguaccugaucauccagaacaccaccugggacgaccacugccaguucucccggcccagccccaucggguaccugggcuucgugagccagaagacccgcgacaucuacaucucccggcgccuccugggcacguucaccuggacccugagcgacuccgaggggcacgacaugccgggcggguacugccucacccgguggaugcugaucgaggccgaccugaagugcuucggcaacacggccguggccaagugcaacgagaagcacgacgaggaguucugcgacauguggcgccucuucgacuucugcaagcaggcgauccagcggcugaaggccgaggcccagaugaacauccagcugaucaacaaggccgucaacgcccucaucaacgaccagcugaugaugaagaaccaccuccgcgacaucauggggauccccuacugcaacuacagcaaguucugguaccugaacaacaccaccaccggccggacgucccugccccgcugcuggcugaucagcaacggcuccuaccucaacgagacccacuucagcgacgacaucgagcagcaggcggacaacaugaucaccgagaugcugcagaaggaguacauggaccggcaggggaagacgccccugggccucguggaccuguucguguucuccaccagcuucuaccugaucaccaucuuccugcaccucgucaagaucccgacccaccgccacaucguggggaagcccugccccaagccccaccggcugaaccacaugggcaucugcuccugcgggcuguacaagcagccgggcgugcccguccgcuggaagcggugaggacuaguaauaaggaaacuguaugaaugucugugggcaggaagugaagagauccuucuguaaagguuuuuggaauuaugucugcugaauaauaaacuuuuuugaaauaauaaaucugguagaaaaaugagaucuaaaaaaaaaaaaaaaaaaaaaaaaaaaaaaaaaaaaaaaaaaaaaaaaaaaaaaaaaaaaaaaaaaaaaaaaaaaaaaaaaaaaaaaaaaaaaaaaaaaa

SEQ ID NO: 37740 - RNA, 1785 nt, Artificial Sequence; identical to SEQ ID NO: 37734
  mRNA product Design b-4 (A100) comprising derived and/or modified sequence from LASV(Pinneo-NIG-1969;Clade I)__AIT17836__GPCmut10 (opt1)

SEQ ID NO: 37741 - RNA, 1785 nt, Artificial Sequence
  mRNA product Design b-4 (A100) comprising derived and/or modified sequence from LASV(ISTH0009-NIG-2011;Clade II)__AIT17404__GPCmut10 (opt1)
aggagagucccgcagucggcguccagcggcucugcuuguucgugugugugucguugcaggccuuauucaagcuuaccaugggccagaucaucaccuucuuccaggaggugccccacgucaucgaggaggugaugaacaucgugcugaucgcccucagccugcuggccauccucaaggggaucuacaacgucgcgaccugcggccuguucgggcugguguccuuccuccugcugugcggccgcagcugcuccacgaccuacaaggggguguacgagcuccagacccuggagcuggacauggccagccucaacaugugcaugccgcuguccugcaccaagaacaacagccaccacuacaucauggucggcaacgagacgggccuggagcucacccugaccaacaccuccaucaucaaccacaaguucugcaaccugagcgacgcccacaagaagaaccucuacgaccacgcccugauguccaucaucagcacguuccaccuguccauccccaacuucaaccaguacgaggccaugagcugcgacuucaacgggggcaagaucuccgugcaguacaaccucagccacgcguacgccguggacgccgccaaccacugcgggaccaucgcgaacggcguccugcagaccuucaugcggauggccuggggcggguccuacaucgcccuggacagcggcaagggguccugggacugcaucaugaccagcuaccaguaccucaucauccagaacacgaccugggaggaccacugccaguucucccgccccagccccaucggcuaccuggggcugcucagccagcggacccgcgacaucuacaucucccggcgccugcugggcaccuucacguggacccucagcgacuccgagggcaacgagacccccgggggcuacugccugacccgguggaugcugaucgaggccgagcucaagugcuucgggaacacggccguggcgaagugcaacgagaagcacgacgaggaguucugcgacaugcugcgccuguucgacuucugcaagcaggccauccggcgccucaagaccgaggcccagaugagcauccagcugaucaacaaggccgugaacgcccugaucaacgaccagcucaucaugaagaaccaccuccgggacaucaugggcauccccuacugcaacuacuccaaguacugguaccugaaccacaccgucaccgggaagacgagccugccccgcugcuggcugguguccaacggcagcuaccugaacgagacccacuucuccgacgacaucgagcagcaggcggacaacaugaucaccgagcuccugcagaaggaguacauggaccggcagggcaagaccccgcuggggcugguggaccucuucgucuucagcacguccuucuaccugaucagcaucuuccugcaccucaucaagaucccgacccaccgccacaucaccggcaagcccugccccaagccccaccggcugaaccacauggggaucugcuccugcggccuguacaagcacccgggggugcccgugaaguggaagcgcugaggacuaguaauaaggaaacuguaugaaugucugugggcaggaagugaagagauccuucuguaaagguuuuuggaauuaugucugcugaauaauaaacuuuuuugaaauaauaaaucugguagaaaaaugagaucuaaaaaaaaaaaaaaaaaaaaaaaaaaaaaaaaaaaaaaaaaaaaaaaaaaaaaaaaaaaaaaaaaaaaaaaaaaaaaaaaaaaaaaaaaaaaaaaaaaaa

SEQ ID NO: 37742 - RNA, 1785 nt, Artificial Sequence
  mRNA product Design b-4 (A100) comprising derived and/or modified sequence from LASV(ISTH2010-NIG-2012;Clade II)__AIT17482__GPCmut10 (opt1)
aggagagucccgcagucggcguccagcggcucugcuuguucgugugugugucguugcaggccuuauucaagcuuaccaugggccagaucaucaccuucuuccaggaggugccccacgucaucgaggaggugaugaacaucgugcugaucgcccucagccugcuggccauccucaaggggaucuacaacgucgcgaccugcggccuguucgggcugguguccuuccuccugcugugcggccgcagcugcuccacgaccuacaaggggguguacgagcuccagacccuggagcuggacauggccagccucaacaugugcaugccgcuguccugcaccaagaacaacagccaccacuacaucauggucggcaacgagacgggccuggagcucacccugaccaacaccuccaucaucaaccacaaguucugcaaccugagcgacgcccacaagaagaaccucuacgaccacgcccugauguccaucaucagcacguuccaccuguccauccccaacuucaaccaguacgaggccaugagcugcgacuucaacgggggcaagaucuccgugcaguacaaccucagccacgcguacgccguggacgccgccaaccacugcgggaccaucgcgaacggcguccugcagaccuucaugcggauggccuggggcggguccuacaucgcccuggacagcggcaagggguccugggacugcaucaugaccagcuaccaguaccucaucauccagaacaucacgugggaggaccacugccaguucucccgccccagccccaucggcuaccuggggcugcucagccagcggacccgcgacaucuacaucucccggcgccugcugggcaccuucaccuggacgcucagcgacuccgagggcaacgagacccccgggggcuacugccugacccgguggaugcugaucgaggccgagcucaagugcuucgggaacaccgccguggcgaagugcaacgagaagcacgacgaggaguucugcgacaugcugcgccuguucgacuucugcaagcaggccauccggcgccucaagacggaggcccagaugagcauccagcugaucaacaaggccgugaacgcccugaucaacgaccagcucaucaugaagaaccaccuccgggacaucaugggcauccccuacugcaacuacuccaaguacugguaccugaaccacaccgucaccgggaagaccagccugccccgcugcuggcugguguccaacggcagcuaccugaacgagacgcacuucuccgacgacaucgagcagcaggcggacaacaugaucaccgagcuccugcagaaggaguacaucgaccggcagggcaagaccccgcuggggcugguggaccucuucgucuucagcaccuccuucuaccugaucagcaucuuccugcaccucgugaagaucccgacgcaccgccacguggucggcaagcccugccccaagccccaccggcugaaccacauggggaucugcuccugcggccuguacaagcacccgggggugcccgugaaguggaagcgcugaggacuaguaauaaggaaacuguaugaaugucugugggcaggaagugaagagauccuucuguaaagguuuuuggaauuaugucugcugaauaauaaacuuuuuugaaauaauaaaucugguagaaaaaugagaucuaaaaaaaaaaaaaaaaaaaaaaaaaaaaaaaaaaaaaaaaaaaaaaaaaaaaaaaaaaaaaaaaaaaaaaaaaaaaaaaaaaaaaaaaaaaaaaaaaaaa

SEQ ID NO: 37743 - RNA, 1785 nt, Artificial Sequence
  mRNA product Design b-4 (A100) comprising derived and/or modified sequence from LASV(Lassa virus/H.sapiens-wt/NGA/2015/ISTH_0543;Clade II)__AVO03639__GPCmut10 (opt1)
aggagagucccgcagucggcguccagcggcucugcuuguucgugugugugucguugcaggccuuauucaagcuuaccaugggccagaucaucaccuucuuccaggaggugccccacgucaucgaggaggugaugaacaucgugcugaucgcccucagccugcuggccauccucaaggggaucuacaacgucgcgaccugcggccuguucgggcugguguccuuccuccugcugugcggccgcagcugcuccacgaccuacaaggggguguacgagcuccagacccuggagcuggacauggccaaccucaacaugugcaugccgcugagcugcaccaagaacaacucccaccacuacaucauggucggcaacgagacgggccuggagcucacccugaccaacaccagcaucaucaaccacaaguucugcaaccuguccgacgcccacaagaagaaccucuacgaccacgcccugaugagcaucaucuccacguuccaccugagcauccccaacuucaaccaguacgaggccauguccugcgacuucaacgggggcaagaucagcgugcaguacaaccucucccacaccuacgcgguggacgccgccaaccacugcgggaccaucgccaacggcguccugcagaccuucaugcggauggcguggggcgggagcuacaucgcccuggacuccggcaaggggagcugggacugcaucaugacguccuaccaguaccucgugauccagaacaccaccugggaggaccacugccaguucagccgccccucccccaucggcuaccuggggcugcucagccagcggacccgcgacaucuacaucagccggcgccugcugggcacguucaccuggacccucuccgacagcgagggcaacgagacccccgggggcuacugccugacgcgguggaugcugaucgaggccgagcucaagugcuucgggaacaccgccguggccaagugcaacgagaagcacgacgaggaguucugcgacaugcugcgccuguucgacuucugcaagcaggcgauccggcgccucaagaccgaggcccagauguccauccagcugaucaacaaggccgucaacgcccugaucaacgaccagcucaucaugaagaaccaccuccgggacaucaugggcaucccguacugcaacuacagcaaguacugguaccugaaccacaccgugacggggaagaccucccugccccgcugcuggcuggugagcaacggcuccuaccugaacgagacccacuucagcgacgacaucgagcagcaggccgacaacaugaucaccgagcuccugcagaaggaguacaucgaccggcagggcaagacgccccuggggcuggucgaccucuucguguucuccaccagcuucuaccugaucuccaucuuccugcaccucgugaagaucccgacccaccgccacaucaccggcaagcccugccccaagccccaccggcugaaccacauggggaucugcagcugcggccuguacaagcacccggggguccccgugaaguggaagcgcugaggacuaguaauaaggaaacuguaugaaugucugugggcaggaagugaagagauccuucuguaaagguuuuuggaauuaugucugcugaauaauaaacuuuuuugaaauaauaaaucugguagaaaaaugagaucuaaaaaaaaaaaaaaaaaaaaaaaaaaaaaaaaaaaaaaaaaaaaaaaaaaaaaaaaaaaaaaaaaaaaaaaaaaaaaaaaaaaaaaaaaaaaaaaaaaaa

SEQ ID NO: 37744 - RNA, 1785 nt, Artificial Sequence
  mRNA product Design b-4 (A100) comprising derived and/or modified sequence from LASV(Lassa virus/H.sapiens-wt/NGA/2016/ISTH_0009;Clade II)__AVO03571__GPCmut10 (opt1)
aggagagucccgcagucggcguccagcggcucugcuuguucgugugugugucguugcaggccuuauucaagcuuaccaugggccagaucaucaccuucuuccaggaggugccccacgucaucgaggaggugaugaacaucgugcugaucgcccucagccugcuggccauccucaaggggaucuacaacgucgcgaccugcggccugcuggggcucguguccuuccugcugcucugcggccgcagcugcuccacgaccuacaaggggguguacgagcugcagacccuggagcucgacauggccagccugaacaugugcaugccgcuguccugcaccaagaacaacagccaccacuacaucauggucggcaacgagacgggccucgagcugacccugaccaacaccuccaucaucaaccacaaguucugcaaccucagcgacgcccacaagaagaaccuguacgaccacgcccugauguccaucaucagcacguuccaccucuccauccccaacuucaaccaguacgaggccaugagcugcgacuucaacgggggccggaucuccgugcaguacaaccugagccacuccuacgcgguggacgccgccaaccacugcgggaccaucgccaacggcguccugcagaccuucaugcgcauggcguggggcgggagcuacaucgcccucgacuccggcaaggggagcugggacugcaucaugaccuccuaccaguaccugaucauccagaacacgaccugggaggaccacugccaguucagccggcccagccccaucggcuaccuggggcuccugucccagcgcacccgggacaucuacaucagccgccggcugcucggcaccuucacguggacccuguccgacagcgagggcaacgagacccccgggggcuacugccugacccgcuggaugcucaucgaggccgagcugaagugcuucgggaacacggccguggccaagugcaacgagaagcacgacgaggaguucugcgacaugcugcggcuguucgacuucugcaagcaggcgauccgccggcugaagaccgaggcccagauguccauccagcugaucaacaaggccgugaacgcccucaucaacgaccagcugaucaugaagaaccaccuccgcgacaucaugggcauccccuacugcaacuacagcaaguacugguaccucaaccacaccgucaccgggaagacgucccugccccggugcuggcuggugagcaacggcuccuaccucaacgagacccacuucagcgacgacaucgagcagcaggccgacaacaugaucaccgagcugcugcagaaggaguacaucgaccgccagggcaagaccccgcuggggcucguggaccuguucgucuucuccacgagcuucuaccugaucuccaucuuccuccaccuggugaagaucccgacccaccggcacaucaccggcaagcccugccccaagccccaccgccugaaccacauggggaucugcagcugcggccucuacaaccacccgggggugcccgucaaguggaagcggugaggacuaguaauaaggaaacuguaugaaugucugugggcaggaagugaagagauccuucuguaaagguuuuuggaauuaugucugcugaauaauaaacuuuuuugaaauaauaaaucugguagaaaaaugagaucuaaaaaaaaaaaaaaaaaaaaaaaaaaaaaaaaaaaaaaaaaaaaaaaaaaaaaaaaaaaaaaaaaaaaaaaaaaaaaaaaaaaaaaaaaaaaaaaaaaaa

SEQ ID NO: 37745 - RNA, 1785 nt, Artificial Sequence
  mRNA product Design b-4 (A100) comprising derived and/or modified sequence from LASV(Lassa virus/H.sapiens-wt/NGA/2016/ISTH_0017;Clade II)__AVO03567__GPCmut10 (opt1)
aggagagucccgcagucggcguccagcggcucugcuuguucgugugugugucguugcaggccuuauucaagcuuaccaugggccagaucaucaccuucuuccaggaggugccccacgucaucgaggaggugaugaacaucgugcugaucgcccucagccugcuggccauccucaaggggaucuacaacgucgcgaccugcggccuguucgggcugguguccuuccuccugcugugcggccgcagcugcuccacgaccuacaaggggguguacgagcuccagacccuggagcuggacauggccagccucaacaugugcaugccgcuguccugcaccaagaacaacagccaccacuacaucauggucggcaacgagacgggccuggagcucacccugaccaacaccuccaucaucaaccacaaguucugcaaccugagcgacgcccacaagaagaaccucuacgaccacgcccugauguccaucaucagcacguuccaccuguccauccccaacuucaaccaguacgaggccaugagcugcgacuucaacgggggcaagaucuccgugcaguacaaccucagccacaccuacgcgaucgacgccgccaaccacugcgggaccaucgccaacggcgugcugcagaccuucaugcggauggcguggggcggguccuacaucgcccuggacagcggcaagggguccugggacugcaucaugacgagcuaccaguaccucaucauccagaacaccaccugggaggaccacugccaguucucccgccccagccccaucggcuaccuggggcugcucagccagcggacccgcgacaucuacaucucccggcgccugcugggcacguucaccuggacccucagcgacuccgagggcaacgagacccccgggggcuacugccugacgcgguggaugcugaucgaggccgagcucaagugcuucgggaacaccgccgucgccaagugcaacgagaagcacgacgaggaguucugcgacaugcugcgccuguucgacuucugcaagcaggcgauccggcgccucaagaccgaggcccagaugagcauccagcugaucaacaaggccgugaacgcccugaucaacgaccagcucaucaugaagaaccaccuccgggacaucaugggcaucccguacugcaacuacuccaaguacugguaccugaaccacaccgugacggggaagaccagccugccccgcugcuggcuggucuccaacggcagcuaccugaacgagacccacuucuccgacgacaucgagcagcaggccgacaacaugaucaccgagcuccugcagaaggaguacauggaccggcagggcaagacgccccuggggcugguggaccucuucguguucagcaccuccuucuaccugaucagcaucuuccugcaccucguccgcaucccgacccaccggcacgugaucggcaagcccugccccaagccccaccgccugaaccacauggggaucugcuccugcggccuguacaagcacccgggggugcccgucaaguggaagcggugaggacuaguaauaaggaaacuguaugaaugucugugggcaggaagugaagagauccuucuguaaagguuuuuggaauuaugucugcugaauaauaaacuuuuuugaaauaauaaaucugguagaaaaaugagaucuaaaaaaaaaaaaaaaaaaaaaaaaaaaaaaaaaaaaaaaaaaaaaaaaaaaaaaaaaaaaaaaaaaaaaaaaaaaaaaaaaaaaaaaaaaaaaaaaaaaa

SEQ ID NO: 37746 - RNA, 1785 nt, Artificial Sequence
  mRNA product Design b-4 (A100) comprising derived and/or modified sequence from LASV(Lassa virus/H.sapiens-wt/NGA/2018/ISTH_0959;Clade II)__AVV65099__GPCmut10 (opt1)
aggagagucccgcagucggcguccagcggcucugcuuguucgugugugugucguugcaggccuuauucaagcuuaccaugggccagaucaucaccuucuuccaggaggugccccacgucaucgaggaggugaugaacaucgugcugaucgcccucagccugcuggccauccucaaggggaucuacaacgucgugaccugcggccuguucgggcugguguccuuccuccugcugugcggccgcagcugcuccacgaccuacaagggggucuacgagcuccagacccuggagcuggacauggcgagccucaacaugugcaugccgcuguccugcaccaagaacaacagccaccacuacaucauggugggcaacgagacgggccuggagcucacccugaccaacaccuccaucaucaaccacaaguucugcaaccugagcgacgcccacaagaagaaccucuacgaccacgcccugauguccaucaucagcacguuccaccuguccauccccaacuucaaccaguacgaggccaugagcugcgacuucaacgggggcaagaucuccgugcaguacaaccucagccacgccuacgcgaucgacgccgccaaccacugcgggaccaucgccaacggcguccugcagaccuucaugcggauggcguggggcggguccuacaucgcccuggacagcggcaagggguccugggacugcaucaugaccagcuaccaguaccucaucauccagaacacgaccugggaggaccacugccaguucucccgccccagccccaucggcuaccuggggcugcucagccagcggacccgcgacaucuacaucucccggcgccugcugggcaccuucacguggacccucagcgacuccgagggcaacgagacccccgggggcuacugccugacccgguggaugcugaucgaggccgagcucaagugcuucgggaacacggccguggccaagugcaacgagaagcacgacgaggaguucugcgacaugcugcgccuguucgacuucugcaagcaggcgauccggcgccucaagaccgaggcccagaugagcauccagcugaucaacaaggccgugaacgcccugaucaacgaccagcucaucaugaagaaccaccuccgggacaucaugggcauccccuacugcaacuacuccaaguacugguaccugaaccacaccgucaccgggaagacgagccugccccgcugcuggcugguguccaacggcagcuaccugaacgagacccacuucuccgacgacaucgagcagcaggccgacaacaugaucaccgagcuccugcagaaggaguacaucgaccggcagggcaagaccccgcuggggcugguggaccucuucgucuucagcacguccuucuaccugaucagcaucuuccugcaccucgugaagaucccgacccaccgccacgugaucggcaagcccugccccaagccccaccggcugaaccacauggggaucugcuccugcggccuguacaagcacccggggguccccgugaaguggaagcgcugaggacuaguaauaaggaaacuguaugaaugucugugggcaggaagugaagagauccuucuguaaagguuuuuggaauuaugucugcugaauaauaaacuuuuuugaaauaauaaaucugguagaaaaaugagaucuaaaaaaaaaaaaaaaaaaaaaaaaaaaaaaaaaaaaaaaaaaaaaaaaaaaaaaaaaaaaaaaaaaaaaaaaaaaaaaaaaaaaaaaaaaaaaaaaaaaa

SEQ ID NO: 37747 - RNA, 1785 nt, Artificial Sequence
  mRNA product Design b-4 (A100) comprising derived and/or modified sequence from LASV(LASV003-NIG-2008;Clade II)__AIT17580__GPCmut10 (opt1)
aggagagucccgcagucggcguccagcggcucugcuuguucgugugugugucguugcaggccuuauucaagcuuaccaugggccagaucaucaccuucuuccaggaggugccccacgucaucgaggaggugaugaacaucgugcugaucgcccucagccugcuggccauccucaaggggaucuacaacgucgcgaccugcggccuguucgggcugguguccuuccuccugcugugcggccgcagcugcuccacgaccuacaaggggguguacgagcuccagacccuggagcuggacauggccagccucaacaugugcaugccgcuguccugcaccaagaacaacagccaccacuacaucauggucggcaacgagacgggccuggagcucacccugaccaacaccuccaucaucaaccacaaguucugcaaccugagcgacgcccacaagaagaaccucuacgaccacgcccugauguccaucaucagcacguuccaccuguccauccccaacuucaaccaguacgaggccaugagcugcgacuucaacgggggcaagaucuccgugcaguacaaccucagccacaccuacgcgguggacgccgccaaccacugcgggaccaucgccaacggcguccugcagaccuucaugcggauggcguggggcggguccuacaucgcccuggacagcggcaagggguccugggacugcaucaugacgagcuaccaguaccucaucauccagaacaccaccugggaggaccacugccaguucucccgccccagccccaucggcuaccuggggcugcucagccagcggacccgcgacaucuacaucucccggcgccugcugggcacguucaccuggacccucagcgacuccgagagcaacgagaccccgggcggguacugccugacgcgguggaugcugaucgaggccgagcucaagugcuucggcaacaccgccguggccaagugcaacgagaagcacgacgaggaguucugcgacaugcugcgccuguucgacuucugcaagcaggcgauccggcgccucaaggccgaggcccagauguccauccagcugaucaacaaggccgugaacgcccugaucaacgaccagcucaucaugaagaaccaccuccgggacaucauggggauccccuacugcaacuacagcaaguacugguaccugaaccacaccgucaccggccgcacgucccugccccggugcuggcuggugagcaacggguccuaccugaacgagacccacuucagcgacgacaucgagcagcaggcggacaacaugaucaccgagcuccugcagaaggaguacauggaccgccagggcaagacgccccugggccugguggaccucuucgucuucuccaccagcuucuaccugaucuccaucuuccugcaccucgugaagaucccgacccaccggcacgugaucgggaagcccugccccaagccccaccgccugaaccacaugggcaucugcagcugcgggcuguacaagcacccgggcguccccgugaaguggaagcggugaggacuaguaauaaggaaacuguaugaaugucugugggcaggaagugaagagauccuucuguaaagguuuuuggaauuaugucugcugaauaauaaacuuuuuugaaauaauaaaucugguagaaaaaugagaucuaaaaaaaaaaaaaaaaaaaaaaaaaaaaaaaaaaaaaaaaaaaaaaaaaaaaaaaaaaaaaaaaaaaaaaaaaaaaaaaaaaaaaaaaaaaaaaaaaaaa

SEQ ID NO: 37748 - RNA, 1785 nt, Artificial Sequence
  mRNA product Design b-4 (A100) comprising derived and/or modified sequence from LASV(LASV035-NIG-2009;Clade II)__AIT17588__GPCmut10 (opt1)
aggagagucccgcagucggcguccagcggcucugcuuguucgugugugugucguugcaggccuuauucaagcuuaccaugggccagaucaucaccuucuuccaggaggugccccacgucaucgaggaggugaugaacaucgugcugaucgcccucagccugcuggccauccucaaggggaucuacaacgucgcgaccugcggccuguucgggcugguguccuuccuccugcugugcggccgcagcugcuccacgaccuacaaggggguguacgagcuccagacccuggagcuggacauggccagccucaacaugugcaugccgcuguccugcaccaagaacaacagccaccacuacaucauggucggcaacgagacgggccuggagcucacccugaccaacaccuccaucaucaaccacaaguucugcaaccugagcgacgcccacaagaagaaccucuacgaccacgcccugauguccaucaucagcacguuccaccuguccauccccaacuucaaccaguacgaggccaugagcugcgacuucaacgggggcaagaucuccgugcaguacaaccucagccacgcguacgccguggacgccgccaaccacugcgggaccaucgcgaacggcguccugcagaccuucaugcggauggccuggggcggguccuacaucgcccuggacagcggcaagggguccugggacugcaucaugaccagcuaccaguaccucaucauccagaacacgaccugggaggaccacugccaguucucccgccccagccccaucggcuaccuggggcugcucagccagcggacccgcgacaucuacaucucccggcgccugcugggcaccuucacguggacccucagcgacuccgagggcaacgagacccccgggggcuacugccugacccgguggaugcugaucgaggccgagcucaagugcuucgggaacacggccguggcgaagugcaacgagaagcacgacgaggaguucugcgacaugcugcgccuguucgacuucugcaagcaggccauccggcgccucaaggccgaggcccagaugagcauccagcugaucaacaaggccgugaacgcgcugaucaacgaccagcucaucaugaagaaccaccuccgggacaucaugggcauccccuacugcaacuacuccaaguacugguaccugaaccacaccgucaccgggaagaccagccugccccgcugcuggcugguguccaacggcagcuaccugaacgagacgcacuucuccgacgacaucgagcagcaggccgacaacaugaucaccgagcuccugcagaaggaguacaucgaccggcagggcaagaccccgcuggggcugguggaccucuucgucuucagcaccuccuucuaccugaucagcaucuuccugcaccucgugaagaucccgacgcaccgccacgugaucggcaagcccugccccaagccccaccggcugaaccacauggggaucugcuccugcggccuguacaagcacccggggguccccgugaaguggaagcgcugaggacuaguaauaaggaaacuguaugaaugucugugggcaggaagugaagagauccuucuguaaagguuuuuggaauuaugucugcugaauaauaaacuuuuuugaaauaauaaaucugguagaaaaaugagaucuaaaaaaaaaaaaaaaaaaaaaaaaaaaaaaaaaaaaaaaaaaaaaaaaaaaaaaaaaaaaaaaaaaaaaaaaaaaaaaaaaaaaaaaaaaaaaaaaaaaa

SEQ ID NO: 37749 - RNA, 1785 nt, Artificial Sequence
  mRNA product Design b-4 (A100) comprising derived and/or modified sequence from LASV(LASV1000-NIG-2009;Clade II)__AIT17782__GPCmut10 (opt1)
aggagagucccgcagucggcguccagcggcucugcuuguucgugugugugucguugcaggccuuauucaagcuuaccaugggccagaucaucaccuucuuccaggaggugccccacgucaucgaggaggugaugaacaucgugcugaucgcccucagccugcuggccauccucaaggggaucuacaacgucgcgaccugcggccuguucgggcugguguccuuccuccugcugugcggccgcagcugcuccacgaccuacaaggggguguacgagcuccagacccuggagcuggacauggccagccucaacaugugcaugccgcuguccugcaccaagaacaacagccaccacuacaucauggucggcaacgagacgggccuggagcucacccugaccaacaccuccaucaucaaccacaaguucugcaaccugagcgacgcccacaagaagaaccucuacgaccacgcccugauguccaucaucagcacguuccaccuguccauccccaacuucaaccaguacgaggccaugagcugcgacuucaacgggggcaagaucuccgugcaguacaaccucagccacaccuacgcgguggacgccgccaaccacugcgggaccaucgccaacggcguccugcagaccuucaugcggauggcguggggcggguccuacaucgcccuggacagcggcaagggguccugggacugcaucaugacgagcuaccaguaccucaucauccagaacaccaccugggaggaccacugccaguucucccgccccagccccaucggcuaccuggggcugcucagccagcggacccgcgacaucuacaucucccggcgccugcugggcacguucaccuggacccucagcgacuccgagggcaacgagacccccgggggcuacugccugacgcgguggaugcugaucgaggccgagcucaagugcuucgggaacaccgccguggccaagugcaacgagaagcacgacgaggaguucugcgacaugcugcgccuguucgacuucugcaagcaggcgaucaagcggcucaagaccgaggcccagaugagcauccagcugaucaacaaggccgugaacgcccugaucaacgaccagcucaucaugaagaaccaccuccgcgacaucaugggcaucccguacugcaacuacuccaaguacugguaccugaaccacaccgucacggggaagaccagccugccccggugcuggcugguguccaacggcagcuaccugaacgagacccacuucuccgacgacaucgagcagcaggccgacaacaugaucaccgagcuccugcagaaggaguacaucgaccgccagggcaagacgccccuggggcugguggaccucuucgucuucagcaccuccuucuaccugaucagcaucuuccugcaccucgugaagaucccgacccaccggcacguggucggcaagcccugccccaagccccaccgccugaaccacauggggaucugcuccugcggccuguacaagcacccgggggugcccgugaaguggaagcggugaggacuaguaauaaggaaacuguaugaaugucugugggcaggaagugaagagauccuucuguaaagguuuuuggaauuaugucugcugaauaauaaacuuuuuugaaauaauaaaucugguagaaaaaugagaucuaaaaaaaaaaaaaaaaaaaaaaaaaaaaaaaaaaaaaaaaaaaaaaaaaaaaaaaaaaaaaaaaaaaaaaaaaaaaaaaaaaaaaaaaaaaaaaaaaaaa

SEQ ID NO: 37750 - RNA, 1785 nt, Artificial Sequence
  mRNA product Design b-4 (A100) comprising derived and/or modified sequence from LASV(LASV221-NIG-2010;Clade II)__AIT17624__GPCmut10 (opt1)
aggagagucccgcagucggcguccagcggcucugcuuguucgugugugugucguugcaggccuuauucaagcuuaccaugggccagaucaucaccuucuuccaggaggugccccacgucaucgaggaggugaugaacaucgugcugaucgcccucagccugcuggccauccucaaggggaucuacaacgucgcgaccugcggccuguucgggcugguguccuuccuccugcugugcggccgcagcugcuccacgaccuacaaggggguguacgagcuccagacccuggagcuggacauggccagccucaacaugugcaugccgcuguccugcaccaagaacaacagccaccacuacaucauggucggcaacgagacgggccuggagcucacccugaccaacaccuccaucaucaaccacaaguucugcaaccugagcgacgcccacaagaagaaccucuacgaccacgcccugauguccaucaucagcacguuccaccuguccauccccaacuucaaccaguacgaggccaugagcugcgacuucaacgggggcaagaucuccgugcaguacaaccucagccacaccuacgcgaucgacgccgccaaccacugcgggaccaucgccaacggcgugcugcagaccuucaugcggauggcguggggcggguccuacaucgcccuggacagcggcaagggguccugggacugcaucaugacgagcuaccaguaccucaucauccagaacaccaccugggaggaccacugccaguucucccgccccagccccaucggcuaccuggggcugcucagccagcggacccgcgacaucuacaucucccggcgccugcugggcacguucaccuggacccucagcgacuccgagggcaacgagacccccgggggcuacugccugacgcgguggaugcugaucgaggccgagcucaagugcuucgggaacaccgccgucgccaagugcaacgagaagcacgacgaggaguucugcgacaugcugcgccuguucgacuucugcaagcaggcgauccggcgccucaagaccgaggcccagaugagcauccagcugaucaacaaggccgugaacgcccugaucaacgaccagcucaucaugaagaaccaccuccgggacaucaugggcaucccguacugcaacuacuccaaguacugguaccugaaccacaccgugacggggaagaccagccugccccgcugcuggcuggucuccaacggcagcuaccugaacgagacccacuucuccgacgacaucgagcagcaggccgacaacaugaucaccgagaugcuccagaaggaguacauggaccggcagggcaagacgccccuggggcugguggaccuguucguguucagcaccuccuucuaccucaucagcaucuuccugcaccuggucaagaucccgacccaccgccacgugaucggcaagcccugccccaagccccaccggcucaaccacauggggaucugcuccugcggccuguacaagcacccgggggugcccgucaaguggaagcgcugaggacuaguaauaaggaaacuguaugaaugucugugggcaggaagugaagagauccuucuguaaagguuuuuggaauuaugucugcugaauaauaaacuuuuuugaaauaauaaaucugguagaaaaaugagaucuaaaaaaaaaaaaaaaaaaaaaaaaaaaaaaaaaaaaaaaaaaaaaaaaaaaaaaaaaaaaaaaaaaaaaaaaaaaaaaaaaaaaaaaaaaaaaaaaaaaa

SEQ ID NO: 37751 - RNA, 1785 nt, Artificial Sequence
  mRNA product Design b-4 (A100) comprising derived and/or modified sequence from LASV(LASV237-NIG-2010;Clade II)__AIT17638__GPCmut10 (opt1)
aggagagucccgcagucggcguccagcggcucugcuuguucgugugugugucguugcaggccuuauucaagcuuaccaugggccagaucaucaccuucuuccaggaggugccccacgucaucgaggaggugaugaacaucgugcugaucgcccucagccugcuggccauccucaaggggaucuacaacgucgcgaccugcggccuguucgggcugguguccuuccuccugcugugcggccgcagcugcuccacgaccuacaaggggguguacgagcuccagacccuggagcuggacauggccagccucaacaugugcaugccgcuguccugcaccaagaacaacagccaccacuacaucauggucggcaacgagacgggccuggagcucacccugaccaacaccuccaucaucaaccacaaguucugcaaccugagcgacgcccacaagaaggaccucuacgaccacgcccugauguccaucaucagcacguuccaccuguccauccccaacuucaaccaguacgaggccaugagcugcgacuucaacgggggcaagaucuccgugcaguacaaccucagccacaccuacgcgguggacgccgccaaccacugcgggaccaucgccaacggcguccugcagaccuucaugcggauggcguggggcggguccuacaucgcccuggacagcggcaagggguccugggacugcaucaugacgagcuaccaguaccucaucauccagaacaccaccugggaggaccacugccaguucucccgccccagccccaucggcuaccuggggcugcucagccagcggacccgcgacaucuacaucucccggcgccugcugggcacguucaccuggacccucagcgacuccgagggcaacgagacccccgggggcuacugccugacgcgguggaugcugaucgaggccgagcucaagugcuucgggaacaccgccguggccaagugcaacgagaagcacgacgaggaguucugcgacaugcugcgccuguucgacuucugcaagcaggcgauccggcgccucaagaccgaggcccagaugagcauccagcugaucaacaaggccgugaacgcccugaucaacgaccagcucaucaugaagaaccaccuccgggacaucaugggcaucccguacugcaacuacuccaaguacugguaccugaaccacaccgucacggggaagaccagccugccccgcugcuggcugguguccaacggcagcuaccugaacgagacccacuucuccgacgacaucgagcagcaggccgacaacaugaucaccgagcuccugcagaaggaguacauggaccggcagggcaagacgccccuggggcugguggaccucuucgucuucagcaccuccuucuaccugaucagcaucuuccugcaccucaucaagaucccgacccaccgccacaucaccggcaagcccugccccaagccccaccggcugaaccacauggggaucugcuccugcggccuguacaagcacccgggggugcccgugaaguggaagcgcugaggacuaguaauaaggaaacuguaugaaugucugugggcaggaagugaagagauccuucuguaaagguuuuuggaauuaugucugcugaauaauaaacuuuuuugaaauaauaaaucugguagaaaaaugagaucuaaaaaaaaaaaaaaaaaaaaaaaaaaaaaaaaaaaaaaaaaaaaaaaaaaaaaaaaaaaaaaaaaaaaaaaaaaaaaaaaaaaaaaaaaaaaaaaaaaaa

SEQ ID NO: 37752 - RNA, 1785 nt, Artificial Sequence
  mRNA product Design b-4 (A100) comprising derived and/or modified sequence from LASV(LASV253-NIG-2011;Clade II)__AIT17670__GPCmut10 (opt1)
aggagagucccgcagucggcguccagcggcucugcuuguucgugugugugucguugcaggccuuauucaagcuuaccaugggccagaucaucaccuucuuccaggaggugccccacgucaucgaggaggugaugaacaucgugcugaucgcccucagccugcuggccauccucaaggggaucuacaacgucgcgaccugcggccuguucgggcugguguccuuccuccugcugugcggccgcagcugcuccacgaccuacaaggggguguacgagcuccagacccuggagcuggacauggccagccucaacaugugcaugccgcuguccugcaccaagaacaacagccaccacuacaucauggucggcaacgagacgggccuggagcucacccugaccaacaccuccaucaucaaccacaaguucugcaaccugagcgacgcccacaagaagaaccucuacgaccacgcccugauguccaucaucagcacguuccaccuguccauccccaacuucaaccaguacgaggccaugagcugcgacuucaacgggggcaagaucuccgugcaguacaaccucagccacaccuacgcgguggacgccgccaaccacugcgggaccaucgccaacggcguccugcagaccuucaugcggauggcguggggcggguccuacaucgcccuggacagcggcaagggguccugggacugcaucaugacgagcuaccaguaccucaucauccagaacaccaccugggaggaccacugccaguucucccgccccagccccaucggcuaccuggggcugcucagccagcggacccgcgacaucuacaucucccggcgccugcugggcacguucaccuggacccucagcgacuccgagggcaacgagacccccgggggcuacugccugacgcgguggaugcugaucgaggccgagcucaagugcuucgggaacaccgccguggccaagugcaacgagaagcacgacgaggaguucugcgacaugcugcgccuguucgacuucugcaagcaggcgauccggcgccucaaggccgaggcccagaugagcauccagcugaucaacaaggccgugaacgcccugaucaacgaccagcucaucaugaagaaccaccuccgggacaucaugggcauccccuacugcaacuacuccaaguacugguaccugaaccacaccgucaccgggcgcacgagccugccccggugcuggcugguguccaacggcagcuaccugaacgagacccacuucuccgacgacaucgagcagcaggcggacaacaugaucaccgagcuccugcagaaggaguacaucgaccgccagggcaagaccccgcuggggcugguggaccucuucgucuucagcacguccuucuaccugaucagcaucuuccugcaccucgugaagaucccgacccaccggcacaucaucggcaagcccugccccaagccccaccgccugaaccacauggggaucugcuccugcggccuguacaagcacccgggggugcccgucaaguggaagcggugaggacuaguaauaaggaaacuguaugaaugucugugggcaggaagugaagagauccuucuguaaagguuuuuggaauuaugucugcugaauaauaaacuuuuuugaaauaauaaaucugguagaaaaaugagaucuaaaaaaaaaaaaaaaaaaaaaaaaaaaaaaaaaaaaaaaaaaaaaaaaaaaaaaaaaaaaaaaaaaaaaaaaaaaaaaaaaaaaaaaaaaaaaaaaaaaa

SEQ ID NO: 37753 - RNA, 1785 nt, Artificial Sequence
  mRNA product Design b-4 (A100) comprising derived and/or modified sequence from LASV(LASV254-NIG-2011;Clade II)__AIT17674__GPCmut10 (opt1)
aggagagucccgcagucggcguccagcggcucugcuuguucgugugugugucguugcaggccuuauucaagcuuaccaugggccagaucaucaccuucuuccaggaggugccccacgucaucgaggaggugaugaacaucgugcugaucgcccucagccugcuggccauccucaaggggaucuacaacgucgcgaccugcggccuguucgggcugguguccuuccuccugcugugcggccgcagcugcuccacgaccuacaaggggguguacgagcuccagacccuggagcuggacaugaccaaccucaacaugugcaugccgcugagcugcacgaagaacaacucccaccacuacaucauggucggcaacgagaccggccuggagcucacccugaccaacacgagcaucaucaaccacaaguucugcaaccuguccgacgcccacaagaagaaccucuacaaccacgcccugaugagcaucaucuccaccuuccaccugagcauccccaacuucaaccaguacgaggccauguccugcgacuucaacgggggcaagaucagcgugcaguacaaccucucccacagcuacgccguggacgcggccaaccacugcgggaccaucgccaacggcguccugcagaccuucaugcggauggccuggggcggguccuacaucgcgcuggacagcggcaaggggaacugggacugcaucaugacguccuaccaguaccucaucauccagaacaccaccugggaggaccacugccaguucagccgccccucccccaucggcuaccuggggcugcucagccagcggacccgcgacaucuacaucagccggcgccugcugggcacguucaccuggacccucuccgacagcgagggcaacgagacccccgggggcuacugccugacgcgguggaugcugaucgaggccgagcucaagugcuucgggaacaccgccguggccaagugcaacgagaagcacgacgaggaguucugcgacaugcugcgccuguucgacuucugcaagcaggccauccggcgccucaagaccgaggcgcaggccaacauccagcugaucaacaaggccgugaacgcccugaucaacgaccagcucaucaugaagaaccaccuccgggacaucaugggcaucccguacugcaacuacuccaaguacugguaccugaaccacaccgucacggggaagaccagccugccccgcugcuggcugguguccaacggcagcuaccugaacgagacccacuucuccgacgacaucgagcagcaggccgacaacaugaucaccgagcuccugcagaaggaguacauggaccggcagggcaagacgccccuggggcugguggaccucuucgucuucagcaccuccuucuaccugaucagcaucuuccugcaccucgugaagaucccgacccaccgccacgugaucggcaagcccugccccaagccccaccggcugaaccacauggggaucugcuccugcggccuguacaagcacccggggguccccgugaaguggaagcgcugaggacuaguaauaaggaaacuguaugaaugucugugggcaggaagugaagagauccuucuguaaagguuuuuggaauuaugucugcugaauaauaaacuuuuuugaaauaauaaaucugguagaaaaaugagaucuaaaaaaaaaaaaaaaaaaaaaaaaaaaaaaaaaaaaaaaaaaaaaaaaaaaaaaaaaaaaaaaaaaaaaaaaaaaaaaaaaaaaaaaaaaaaaaaaaaaa

SEQ ID NO: 37754 - RNA, 1785 nt, Artificial Sequence
  mRNA product Design b-4 (A100) comprising derived and/or modified sequence from LASV(Nig08-A19;Clade III)__ADU56618__GPCmut10 (opt1)
aggagagucccgcagucggcguccagcggcucugcuuguucgugugugugucguugcaggccuuauucaagcuuaccaugggccagaucgugaccuucuuccaggaggucccccacgugaucgaggaggugaugaacaucguccugaucgcccucagcauccuggccauccugaaggggcucuacaacaucgcgaccugcggccugaucgggcuggugacguuccuccugcuguccggccgcagcugcuccaugaccuacaaggggguguacgagcuccagacccuggagcugaacaugaacacccucaacaugugcaugccgcugagcugcacgaagaacaacucccaccacuacaucauggucggcaacgagaccggccuggagcucacccugaccaacacgagccugcuccaccacaaguucugcaaccuguccgacgcccacaagaagaaccuguacgaccacacccucaugagcaucaucuccaccuuccaccugagcauccccaacuucaaccaguacgaggccauguccugcgacuucaacgggggcaagaucaccgugcaguacaaccugagccacuccuacgccaucgacgccgcgaaccacugcgggacgguggccaacggcguccuccagaccuucaugcggauggccuggggcgggagcuacaucgcccuggacuccggccgcgggaagugggacugcaucaugaccagcuaccaguaccugaucauccagaacaccacgugggaggaccacugccaguucucccggcccagccccaucggcuaccucgggcugcugucccagcgcacccgggacaucuacaucagccgccggcuccugggcaccuucaccuggacgcugagcgacuccgagggcaacgagacccccgggggcuacugccucacccgcuggaugcugaucgaggcggagcugaagugcuucgggaacaccgccguggccaagugcaacgagaagcacgacgaggaguucugcgacaugcuccggcuguucgacuucugcaagcaggccauccgccggcugaaggccgaggcgcagaugagcauccagcucaucaacaaggccgugaacgcccugaucaacgaccagcugaucaugaagaaccaccuccgcgacaucaugggcauccccuacugcaacuacuccaaguacugguaccugaaccacacgagcaccgggcggaccucccugccccgcugcuggcucgucagcaacggcuccuaccugaacgagacccacuucagcgacgacaucgagcagcaggccgacaacaugaucacggagaugcugcagaaggaguaccuggaccggcagggcaagaccccgcucgggcugguggaccuguucguguucuccaccagcuucuaccucaucuccaucuuccugcaccuggucaagaucccgacccaccgccacaucgugggcaagcccugccccaagccccaccggcucaaccacauggggaucugcagcugcggccuguacaagcagccgggggugcccguccgcuggaagcggugaggacuaguaauaaggaaacuguaugaaugucugugggcaggaagugaagagauccuucuguaaagguuuuuggaauuaugucugcugaauaauaaacuuuuuugaaauaauaaaucugguagaaaaaugagaucuaaaaaaaaaaaaaaaaaaaaaaaaaaaaaaaaaaaaaaaaaaaaaaaaaaaaaaaaaaaaaaaaaaaaaaaaaaaaaaaaaaaaaaaaaaaaaaaaaaaa

SEQ ID NO: 37755 - RNA, 1788 nt, Artificial Sequence
  mRNA product Design b-4 (A100) comprising derived and/or modified sequence from LASV(G1180-SLE-2010;Clade IV)__AIT17168__GPCmut10 (opt1)
aggagagucccgcagucggcguccagcggcucugcuuguucgugugugugucguugcaggccuuauucaagcuuaccaugggccagaucgugaccuucuuccaggaggucccccacgugaucgaggaggugaugaacaucguccugaucgcccucagcauccuggccgugcugaaggggcucuacaacuucgcgaccugcggccugguggggcugcucacguuccugcugcucugcggccgcuccugcaccgccagccgguacaagggggucuacgagcugcagacccuggagcucaacauggagacccugaacaugugcaugccgcuguccugcacgaagaacaacagccaccacuacaucauggugggcaacgagaccggccucgagcugacccugaccaacacguccaucaucaaccacaaguucugcaaccucagcgacgcccacaagaagaaccuguacgaccacgcccugauguccaucaucagcaccuuccaccucuccauccccaacuucaaccaguacgaggccaugagcugcgacuucaacgggggcaagaucuccgugcaguacaaccugagccacuccuacgcgggggacgccgccaaccacugcggcaccgucgccaacggggugcugcagaccuucaugcgcauggcguggggcggcagcuacaucgcccucgacuccgggcacggcagcugggacugcaucaugacguccuaccaguaccugaucauccagaacaccaccugggaggaccacugccaguucagccggcccucccccaucggguaccugggccuccugagccagcgcacccgggacaucuacaucagccgccggcugcucggcacguucaccuggacccuguccgacagcgaggggaaggacaccccgggcggguacugccugacgcgcuggaugcucaucgaggccgagcugaagugcuucggcaacaccgccguggccaagugcaacgagaagcacgacgaggaguucugcgacaugcugcggcuguucgacuucugcaagcaggcgauccagcgccugaaggccgaggcccagauguccauccagcugaucaacaaggccgucaacgcccucaucaacgaccagcugaucaugaagaaccaccuccgggacaucauggggauccccuacugcaacuacagcaaguacugguaccucaaccacaccaccacgggcaagaccucccugcccaagugcuggcuggugagcaacggcuccuaccucaacgagacccacuucagcgacgacaucgagcagcaggcggacaacaugaucaccgagaugcugcagaaggaguacauggagcgccaggggaagacgccccugggccugguggaccucuucgucuucuccaccagcuucuaccugaucuccaucuuccugcaccucgugaagaucccgacccaccggcacaucgugggcaagagcugccccaagccccaccgccugaaccacauggggaucugcuccugcgggcuguacaagcagcccggcgucccggugaaguggaagcggugaggacuaguaauaaggaaacuguaugaaugucugugggcaggaagugaagagauccuucuguaaagguuuuuggaauuaugucugcugaauaauaaacuuuuuugaaauaauaaaucugguagaaaaaugagaucuaaaaaaaaaaaaaaaaaaaaaaaaaaaaaaaaaaaaaaaaaaaaaaaaaaaaaaaaaaaaaaaaaaaaaaaaaaaaaaaaaaaaaaaaaaaaaaaaaaaa

SEQ ID NO: 37756 - RNA, 1788 nt, Artificial Sequence
  mRNA product Design b-4 (A100) comprising derived and/or modified sequence from LASV(G1442-SLE-2011;Clade IV)__AIT17180__GPCmut10 (opt1)
aggagagucccgcagucggcguccagcggcucugcuuguucgugugugugucguugcaggccuuauucaagcuuaccaugggccagaucgugaccuucuuccaggaggucccccacgugaucgaggaggugaugaacaucguccugaucgcccucagcauccuggccgugcugaaggggcucuacaacguggcgaccugcggccugaucgggcuggucaccuuccuccugcugugcggccgcuccugcaccaccacccucuacaaggggguguacgagcugcagacgcuggagcucaacauggagacccugaacaugugcaugccgcugagcugcaccaagaacaacucccaccacuacauccgggugggcaacgagaccggccucgagcugacgcugaccaacaccagcaucaucaaccacaaguucugcaaccucuccgacgcccacaagaagaaccuguacgaccacgcccugaugagcaucaucuccaccuuccaccucagcauccccaacuucaaccaguacgaggccauguccugcgacuucaacgggggcaagaucagcguccaguacaaccugucccacagcuacgccggggacgcggccaaccacugcggcacgguggccaacggggugcugcagaccuucaugcgcauggccuggggcggcuccuacaucgcgcucgacagcgggcggggcaacugggacugcaucaugaccuccuaccaguaccugaucauccagaacaccacgugggacgaccacugccaguucagccgccccucccccaucggguaccugggccuccugagccagcggacccgcgacgucuacaucucccggcgccugcucggcaccuucaccuggacgcugagcgacagcgaggggaaggacaccccgggcggguacugccugacccgguggaugcucaucgaggccgagcugaagugcuucggcaacaccgccguggccaagugcaacgagaagcacgacgaggaguucugcgacaugcugcgccucuucgacuucugcaagcaggccauccagcggcugaaggcggaggcccagauguccauccagcugaucaacaaggccgugaacgcccucaucaacgaccagcugaucaugaagaaccaccuccgcgacaucauggggauccccuacugcaacuacagcaaguacugguaccugaacaacacggccaccggcaagaccucccugcccaagugcuggcugaucagcaacggcuccuaccucaacgagacccacuucagcgacgacaucgagcaggaggcggacaacaugaucacggagaugcugcagaaggaguacauggagcggcaggggaagacgccccugggccuggucgaccucuucguguucuccaccagcuucuaccugaucuccaucuuccugcaccucgugaagaucccgacccaccgccacaucgucggcaagagcugccccaagccccaccggcugaaccacauggggaucugcuccugcgggcuguacaagcagcccggcgugccggugcgcuggaagcggugaggacuaguaauaaggaaacuguaugaaugucugugggcaggaagugaagagauccuucuguaaagguuuuuggaauuaugucugcugaauaauaaacuuuuuugaaauaauaaaucugguagaaaaaugagaucuaaaaaaaaaaaaaaaaaaaaaaaaaaaaaaaaaaaaaaaaaaaaaaaaaaaaaaaaaaaaaaaaaaaaaaaaaaaaaaaaaaaaaaaaaaaaaaaaaaaa

SEQ ID NO: 37757 - RNA, 1788 nt, Artificial Sequence
  mRNA product Design b-4 (A100) comprising derived and/or modified sequence from LASV(G3010-SLE-2013;Clade IV)__AIT17344__GPCmut10 (opt1)
aggagagucccgcagucggcguccagcggcucugcuuguucgugugugugucguugcaggccuuauucaagcuuaccaugggccagaucgugaccuucuuccaggaggucccccacgugaucgaggaggugaugaacaucguccugaucgcccucagcauccuggccgugcugaaggggcucuacaacuucgcgaccugcggccugguggggcuggucacguuccuccugcugugcggccgcuccugcaccaccagccucuacaaggggguguacgagcugcagacccuggagcucaacauggagacgcugaacaugugcaugccgcuguccugcaccaagaacaacagccaccacuacaucauggugggcaacgagaccggccucgagcugacccugacgaacaccuccaucaucaaccacaaguucugcaaccucagcgacgcccacaagaagaaccuguacaaccacgcccugauguccaucaucagcaccuuccaccucuccauccccaacuucaaccaguacgaggccaugagcugcgacuucaacgggggcaagaucuccguccaguacaaccugagccacuccuacgccggggacgcggccagccacugcggcaccguggccaacggggugcugcagacguucaugcggauggccuggggcggcuccuacaucgcgcucgacagcggguacggcaagugggacugcaucaugaccuccuaccaguaccugaucauccagaacaccaccugggaggaccacugccaguucagccgccccucccccaucggguaccugggccuccugagccagcggacgcgcgacaucuacaucagccggcgccugcucggcaccuucaccuggacccuguccgacagcgaggggaaggacacgccgggcggguacugccugacccgguggaugcucaucgaggccgagcugaagugcuucggcaacaccgccgucgccaagugcaacgagaagcacgacgaggaguucugcgacaugcugcgccucuucgacuucugcaagcaggccauccagcggcugaagaccgaggcgcagauguccauccagcugaucaacaaggccgugaacgcccucaucaacgaccagcugaucaugaagaaccaccuccgcgacaucauggggauccccuacugcaacuacagcaaguacugguaccugaaccacacgaccaccggcaagaccucccugcccaagugcuggcuggugagcaacggcuccuaccucaacgagacgcacuucagcgacgacaucgagcagcaggccgacaacaugaucaccgagaugcugcagaaggaguacauggagcggcaggggaagacgccccugggccuggucgaccucuucguguucuccaccagcuucuaccugaucuccaucuuccugcaccucgugaagaucccgacccaccgccacaucgucggcaagagcugccccaagccccaccggcugaaccacauggggaucugcuccugcgggcuguacaagcagcccggcgugccggugcgcuggaagcggugaggacuaguaauaaggaaacuguaugaaugucugugggcaggaagugaagagauccuucuguaaagguuuuuggaauuaugucugcugaauaauaaacuuuuuugaaauaauaaaucugguagaaaaaugagaucuaaaaaaaaaaaaaaaaaaaaaaaaaaaaaaaaaaaaaaaaaaaaaaaaaaaaaaaaaaaaaaaaaaaaaaaaaaaaaaaaaaaaaaaaaaaaaaaaaaaa

SEQ ID NO: 37758 - RNA, 1788 nt, Artificial Sequence
  mRNA product Design b-4 (A100) comprising derived and/or modified sequence from LASV(G502-SLE-2009;Clade IV)__AIT17126__GPCmut10 (opt1)
aggagagucccgcagucggcguccagcggcucugcuuguucgugugugugucguugcaggccuuauucaagcuuaccaugggccagaucgugaccuucuuccaggaggucccccacgugaucgaggaggugaugaacaucguccugaucgcccucagcauccuggccgugcugaaggggcucuacaacuucgcgaccugcggccugguggggcugcucacguuccugcugcucugcggccgcuccugcaccaccgggcuguacaagggcgucuacgagcugcagacccucgagcugaacauggagacgcugaacaugugcaugccgcucagcugcaccaagaacaacucccaccacuacaucauggugggcaacgagaccgggcuggagcugacccucacgaacaccagcaucaucaaccacaaguucugcaaccuguccgacgcccacaagaagaaccuguacgaccacgcccucaugagcaucaucuccaccuuccaccugagcauccccaacuucaaccaguacgaggccauguccugcgacuucaacggcgggaagaucagcgugcaguacaaccugucccacagcuacgccggcgacgcggccgaccacugcgggaccgucgccaacggcgugcuccagacguucaugcggauggccuggggcggguccuacaucgcgcuggacagcggccgcgggcggugggacugcaucaugaccuccuaccaguaccugaucauccagaacaccaccugggaggaccacugccaguucagccgccccucccccaucggcuaccucggccugcugagccagcggacgcgcgacaucuacaucucccggcgccuccuggggaccuucaccuggacccugagcgacagcgagggcaaggacacgcccgggggcuacugccucacccgguggaugcugaucgaggccgagcugaagugcuucgggaacaccgccguggccaagugcaacgagaagcacgacgaggaguucugcgacaugcuccgccuguucgacuucugcaagcaggccauccagcggcugaaggcggaggcccagauguccauccagcucaucaacaaggccgucaacgcccugaucaacgaccagcuggugaugaagaaccaccuccgcgacaucaugggcauccccuacugcaacuacagccgguacugguaccugaaccacaccacgaccggccgcaccucccugcccaagugcuggcucgugagcaacggguccuaccugaacgagacccacuucagcgacgacaucgagcagcaggccgacaacaugaucacggagaugcugcagaaggaguacauggagcggcagggcaagaccccgcuggggcucgucgaccuguucguguucuccaccagcuucuaccugaucuccaucuuccuccaccuggugaagaucccgacccaccgccacaucgucggcaagagcugccccaagccccaccggcugaaccacauggggaucugcuccugcggccucuacaagcagcccggcgugccggugaaguggaagcgcugaggacuaguaauaaggaaacuguaugaaugucugugggcaggaagugaagagauccuucuguaaagguuuuuggaauuaugucugcugaauaauaaacuuuuuugaaauaauaaaucugguagaaaaaugagaucuaaaaaaaaaaaaaaaaaaaaaaaaaaaaaaaaaaaaaaaaaaaaaaaaaaaaaaaaaaaaaaaaaaaaaaaaaaaaaaaaaaaaaaaaaaaaaaaaaaaa

SEQ ID NO: 37759 - RNA, 1788 nt, Artificial Sequence
  mRNA product Design b-4 (A100) comprising derived and/or modified sequence from LASV(G733-SLE-2010;Clade IV)__AIT17154__GPCmut10 (opt1)
aggagagucccgcagucggcguccagcggcucugcuuguucgugugugugucguugcaggccuuauucaagcuuaccaugggccagaucgugaccuucuuccaggaggucccccacgugaucgaggaggugaugaacaucguccugaucgcccucagcauccuggccgugcugaaggggcucuacaacuucgcgaccugcggcaucguggggcuggucuccuuccugcuccugugcggccgcagcugcacgaccucccuguacaaggggguguacgagcuccagacccuggagcugaacauggagacccucaacaugugcaugccgcugagcugcacgaagaacaacucccaccacuacaucauggugggcaacgagaccggccuggagcucacccugaccaacacgagcaucaucaaccacaaguucugcaaccuguccgacgcccacaagaagaaccucuacgaccacgcccugaugagcaucaucuccaccuuccaccugagcauccccaacuucaaccaguacgaggccauguccugcgacuucaacgggggcaagaucagcguccaguacaaccucucccacagcuacgccggggacgcggccaaccacugcggcaccaucgccaacggggugcugcagaccuucaugcggauggccuggggcggcuccuacaucgcgcuggacagcgggcgcgaccggugggacugcaucaugacguccuaccaguaccucaucauccagaacaccaccugggaggaccacugccaguucagccgccccucccccaucggcuaccuggggcugcucagccagcggacccgcgacaucuacaucagccggcgccugcugggcacguucaccuggacccucuccgacagcgagggcaaggacacccccgggggcuacugccugacgcgguggaugcugaucgaggccgagcucaagugcuucgggaacaccgccguggccaagugcaacgagaagcacgacgaggaguucugcgacaugcugcgccuguucgacuucugcaagcaggccauccagcggcucaaggcggaggcccagauguccauccagcugaucaacaaggccgucaacgcccugaucaacgaccagcucaucaugaagaaccaccuccgcgacaucaugggcaucccguacugcaacuacagcaaguacugguaccugaaccacaccaccacggggaagaccucccugcccaagugcuggcuggugagcaacggcuccuaccugaacgagacccacuucagcgacgacaucgagcagcaggccgacaacaugaucaccgagaugcuccagaaggaguacauggagcggcagggcaagacgccccuggggcugguggaccuguucgucuucuccaccagcuucuaccucaucuccaucuuccugcaccuggugaagaucccgacccaccgccacguggucggcaagagcugccccaagccccaccggcucaaccacauggggaucugcuccugcggccuguacgggcagcccggcgugccggugaaguggaagcgcugaggacuaguaauaaggaaacuguaugaaugucugugggcaggaagugaagagauccuucuguaaagguuuuuggaauuaugucugcugaauaauaaacuuuuuugaaauaauaaaucugguagaaaaaugagaucuaaaaaaaaaaaaaaaaaaaaaaaaaaaaaaaaaaaaaaaaaaaaaaaaaaaaaaaaaaaaaaaaaaaaaaaaaaaaaaaaaaaaaaaaaaaaaaaaaaaa

SEQ ID NO: 37760 - RNA, 1788 nt, Artificial Sequence
  mRNA product Design b-4 (A100) comprising derived and/or modified sequence from MOPV/LASV reassortant(IGS-1;Clade IV)__AFY05576__GPCmut10 (opt1)
aggagagucccgcagucggcguccagcggcucugcuuguucgugugugugucguugcaggccuuauucaagcuuaccaugggccagaucgugaccuucuuccaggaggucccccacgugaucgaggaggugaugaacaucguccugaucgcccucagcgugcuggccgugcugaaggggcucuacaacuucgcgaccugcggccuggucgggcuggugaccuuccuccugcugugcggccgcuccugcaccaccagccucuacaaggggguguacgagcugcagacccuggagcucaacauggagacgcugaacaugugcaugccgcuguccugcaccaagaacaacagccaccacuacaucauggucggcaacgagaccggccucgagcugacccugacgaacaccuccaucaucaaccacaaguucugcaaccucagcgacgcccacaagaagaaccuguacgaccacgcccugauguccaucaucagcaccuuccaccucuccauccccaacuucaaccaguacgaggccaugagcugcgacuucaacgggggcaagaucuccgugcaguacaaccugagccacuccuacgccggggacgcggccaaccacugcggcaccguggccaacgggguccugcagacguucaugcggauggccuggggcggcagcuacaucgcgcucgacuccgggcgcggcaacugggacugcaucaugaccagcuaccaguaccugaucauccagaacaccaccugggaggaccacugccaguucucccggcccagccccaucggguaccugggccuccugucccagcgcacgcgggacaucuacaucagccgccggcugcucggcaccuucaccuggacccugagcgacuccgagggggaggacacgccgggcggguacugccugacccgcuggaugcucaucgaggccgagcugaagugcuucggcaacaccgccguggccaagugcaacgagaagcacgacgaggaguucugcgacaugcugcggcuguucgacuucugcaagcaggccauccagcgccugaaggcggaggcccagaugagcauccagcugaucaacaaggccgugaacgcccucaucaacgaccagcugaucaugaagaaccaccuccgggacaucauggggauccccuacugcaacuacuccaaguacugguaccucaaccacaccacgaccggccgcaccagccugcccaagugcuggcuggucuccaacggcagcuaccucaacgagacccacuucuccgacgacaucgagcagcaggccgacaacaugaucacggagaugcugcagaaggaguacauggagcggcaggggaagacgccccugggccugguggaccucuucguguucagcaccuccuucuaccugaucagcaucuuccugcaccucgucaagaucccgacccaccgccacaucguggggaaguccugccccaagccccaccggcugaaccacaugggcaucugcagcugcgggcuguacaagcagcccggcgugccggucaaguggaagcgcugaggacuaguaauaaggaaacuguaugaaugucugugggcaggaagugaagagauccuucuguaaagguuuuuggaauuaugucugcugaauaauaaacuuuuuugaaauaauaaaucugguagaaaaaugagaucuaaaaaaaaaaaaaaaaaaaaaaaaaaaaaaaaaaaaaaaaaaaaaaaaaaaaaaaaaaaaaaaaaaaaaaaaaaaaaaaaaaaaaaaaaaaaaaaaaaaa

SEQ ID NO: 37761 - RNA, 1788 nt, Artificial Sequence
  mRNA product Design b-4 (A100) comprising derived and/or modified sequence from LASV(LM765-SLE-2012;Clade IV)__AIT17814__GPCmut10 (opt1)
aggagagucccgcagucggcguccagcggcucugcuuguucgugugugugucguugcaggccuuauucaagcuuaccaugggccagaucgugaccuucuuccaggaggucccccacgugaucgaggaggugaugaacaucguccugaucgcccucagcauccuggccgugcugaaggggcucuacaacuucgcgaccugcggccugguggggcuggucacguuccuccugcugugcggccgcuccugcaccaccagccucuacaaggggguguacgagcugcagacccuggagcucaacauggagacgcugaacaugugcaugccgcuguccugcaccaagaacaacagccaccacuacaucauggugggcaacgagaccggccucgagcugacccugacgaacaccuccaucaucgaccacaaguucugcaaccucagcgacgcccaccggaagaaccuguacgaccacgcccugauguccaucaucagcaccuuccaccucuccauccccaacuucaaccaguacgaggccaugagcugcgacuucaacgggggcaagaucuccguccaguacaaccugagccacuccuacgccaaggacgcggccgaccacugcgggaccguggccaacggcgugcugcagacguucaugcgcauggccuggggcgggagcuacaucgcgcucgacuccggccgggggcgcugggacugcaucaugaccagcuaccaguaccugaucauccagaacaccaccugggaggaccacugccaguucucccggcccagccccaucggcuaccuggggcuccugucccagcgcacgcgggacaucuacaucagccgccggcugcucggcaccuucaccuggacccugagcgacuccgagggcaaggacacgcccgggggcuacugccugacccgcuggaugcucaucgaggccgagcugaagugcuucgggaacaccgccgucgccaagugcaacgagaagcacgacgaggaguucugcgacaugcugcggcuguucgacuucugcaagcaggccauccagcgccugaaggcggaggcccagaugagcauccagcugaucaacaaggccgugaacgcccucaucaacgaccagcugaucaugaagaaccaccuccgggacaucaugggcauccccuacugcaacuacuccaaguacugguaccucaaccacaccacgaccgggaagaccagccugcccaagugcuggcugguguccaacggcagcuaccucaacgagacccacuucuccgacgacaucgagcagcaggccgacaacaugaucacggagaugcugcagaaggaguacauggagcgccagggcaagaccccgcuggggcuggucgaccucuucguguucagcaccuccuucuaccugaucagcaucuuccugcaccucgugaagaucccgacccaccggcacaucgucggcaagcccugccccaagccccaccgccugaaccacauggggaucugcuccugcggccuguacaagcagccgggggugcccgugaaguggaagcggugaggacuaguaauaaggaaacuguaugaaugucugugggcaggaagugaagagauccuucuguaaagguuuuuggaauuaugucugcugaauaauaaacuuuuuugaaauaauaaaucugguagaaaaaugagaucuaaaaaaaaaaaaaaaaaaaaaaaaaaaaaaaaaaaaaaaaaaaaaaaaaaaaaaaaaaaaaaaaaaaaaaaaaaaaaaaaaaaaaaaaaaaaaaaaaaaa

SEQ ID NO: 37762 - RNA, 1788 nt, Artificial Sequence
  mRNA product Design b-4 (A100) comprising derived and/or modified sequence from LASV(LM776-SLE-2012;Clade IV)__AIT17824__GPCmut10 (opt1)
aggagagucccgcagucggcguccagcggcucugcuuguucgugugugugucguugcaggccuuauucaagcuuaccaugggccagaucgugaccuucuuccaggaggucccccacgugaucgaggaggugaugaacaucguccugaucgcccucagcauccuggccgugcugaaggggcucuacaacuucgcgaccugcggccugguggggcuggucaccuuccuccugcugugcggccgcuccugcaccaccagcguguacaaggggguguacgagcuccagacccuggagcugaacauggagacgcucaacaugugcaugccgcuguccugcaccaagaacaacagccaccacuacaucauggucggcaacgagaccggccuggagcucacccugacgaacaccuccaucaucaaccacaaguucugcaaccugagcgacgcccacaagaagaaccucuacgaccacgcccugauguccaucaucagcaccuuccaccuguccauccccaacuucaaccaguacgaggccaugagcugcgacuucaacgggggcaagaucuccgugcaguacaaccucagccacuccuacgccggggacgcggccaaccacugcggcaccguggccaacgggguccugcagacguucaugcggauggccuggggcggcagcuacaucgcgcuggacuccgggcacggcaagugggacugcaucaugaccagcuaccaguaccucaucauccagaacaccaccugggaggaccacugccaguucucccgccccagccccaucggguaccugggccugcucucccagcggacgcgcgacaucuacaucagccggcgccugcugggcaccuucaccuggacccucagcgacuccgaggggaaggacacgccgggcggguacugccugacccgguggaugcugaucgaggccgagcucaagugcuucggcaacaccgccguggccaagugcaacgagaagcacgacgaggaguucugcgacaugcugcgccuguucgacuucugcaagcaggccauccagcggcucaaggcggaggcccagaugagcauccagcugaucaacaaggccgugaacgcccugaucaacgaccagcucaucaugaagaaccaccuccgcgacaucauggggauccccuacugcaacuacuccaaguacugguaccugaaccacaccacgaccggcaagaccagccugcccaagugcuggcuggucuccaacggcagcuaccugaacgagacccacuucuccgacgacaucgagcagcaggccgacaacaugaucacggagaugcuccagaaggaguacauggagcggcaggggaagacgccccugggccugguggaccuguucguguucagcaccuccuucuaccucaucagcaucuuccugcaccuggucaagaucccgacccaccgccacaucguggggaaguccugccccaagccccaccggcucaaccacaugggcaucugcagcugcgggcuguacaagcagcccggcgugccgguccgcuggaagcggugaggacuaguaauaaggaaacuguaugaaugucugugggcaggaagugaagagauccuucuguaaagguuuuuggaauuaugucugcugaauaauaaacuuuuuugaaauaauaaaucugguagaaaaaugagaucuaaaaaaaaaaaaaaaaaaaaaaaaaaaaaaaaaaaaaaaaaaaaaaaaaaaaaaaaaaaaaaaaaaaaaaaaaaaaaaaaaaaaaaaaaaaaaaaaaaaa

SEQ ID NO: 37763 - RNA, 1788 nt, Artificial Sequence
  mRNA product Design b-4 (A100) comprising derived and/or modified sequence from LASV(Mad39;Clade IV)__ANH09722__GPCmut10 (opt1)
aggagagucccgcagucggcguccagcggcucugcuuguucgugugugugucguugcaggccuuauucaagcuuaccaugggccagaucgugaccuucuuccaggaggucccccacgugaucgaggaggugaugaacaucguccugaucgcccucagcauccuggccgugcugaaggggcucuacaacguggcgaccugcggccugaucgggcuggucacguuccuccugcugugcggccgcuccugcaccaccacccucuacaaggggguguacgagcugcaggcccuggagcucaacauggagacgcugaacaugugcaugccgcugagcugcaccaagaacaacucccaccacuacauccgggugggcaacgagaccggccucgagcugacccugacgaacaccagccucaucaaccacaaguucugcaaccuguccgacgcccacaagaagaaccuguacgaccacgcccucaugagcaucaucuccaccuuccaccugagcauccccaacuucaaccaguacgaggccauguccugcgacuucaacgacgggaagaucagcguccaguacaaccugucccacaccuacgcgggcgacacggccaaccacugcgggaccguggccaacggcgugcuccagaccuucaugcgcauggccuggggcgggagcuacaucgcgcuggacuccggccgcgggggcugggacugcaucaugaccagcuaccaguaccugaucauccagaacacgaccugggaggaccacugccaguucucccggcccagccccaucggguaccucggccugcugucccagcggacccgcgacaucuacaucagccggcgccuccugggcaccuucacguggacccuguccgacagcgaggggaaggacaccccgggcggguacugccucacccgguggaugcugaucgaggccgagcugaagugcuucggcaacacggccgucgccaagugcaacgagaagcacgacgaggaguucugcgacaugcuccgccuguucgacuucugcaagcaggccauccagcggcugaaggcggaggcccagaugagcauccagcucaucaacaaggccgugaacgcccugaucaacgaccagcugaucaugaagaaccaccuccgcgacaucauggggauccccuacugcaacuacuccaaguacugguaccugaaccacaccgugaccggcaagaccagccugcccaagugcuggcucgucuccaacggcagcuaccugaacgagacgcacuucuccgacgacaucgagcagcaggccgacaacaugaucaccgagaugcugcagaaggaguacauggagcggcaggggaagacgccccugggccucguggaccuguucguguucagcaccuccuucuaccugaucagcaucuuccuccaccuggucaagaucccgacccaccgccacgugguggggaagcccugccccaagccccaccggcugaaccacaugggcaucugcuccugcggguucuacaagcagccgggcguccccgugcgcuggaagcggugaggacuaguaauaaggaaacuguaugaaugucugugggcaggaagugaagagauccuucuguaaagguuuuuggaauuaugucugcugaauaauaaacuuuuuugaaauaauaaaucugguagaaaaaugagaucuaaaaaaaaaaaaaaaaaaaaaaaaaaaaaaaaaaaaaaaaaaaaaaaaaaaaaaaaaaaaaaaaaaaaaaaaaaaaaaaaaaaaaaaaaaaaaaaaaaaa

SEQ ID NO: 37764 - RNA, 1788 nt, Artificial Sequence
  mRNA product Design b-4 (A100) comprising derived and/or modified sequence from LASV(Z0947-SLE-2011;Clade IV)__AIT17840__GPCmut10 (opt1)
aggagagucccgcagucggcguccagcggcucugcuuguucgugugugugucguugcaggccuuauucaagcuuaccaugggccagaucgugaccuucuuccaggaggucccccacgugaucgaggaggugaugaacaucguccugaucgcccucagcauccuggccgugcugaaggggcucuacaacuucgcgaccugcggccugguggggcuggucacguuccuccugcugugcggccgcuccugcaccaucagccucuacaaggggguguacgagcugcagacccuggagcucaacauggagacccugaacaugugcaugccgcuguccugcacgaagaacaacagccaccacuacaucauggugggcaacgagaccggccucgagcugacccugaccaacacguccaucaucaaccacaaguucugcaaccucagcgacgcccacaagaagaaccuguacgaccacgcccugauguccaucaucagcaccuuccaccucuccauccccaacuucaaccaguacgaggccaugagcugcgacuucaacgggggcaagaucuccguccaguacaaccugagccacuccuacgccggggacgcggccaaccacugcggcaccguggccaacggggugcugcagaccuucaugcggauggccuggggcggcagcuacaucgcgcucgacuccgggcgcgaccggugggacugcaucaugacgagcuaccaguaccugaucauccagaacaccaccugggaggaccacugccaguucucccgccccagccccaucggcuaccuggggcuccugucccagcggacccgcgacaucuacaucagccggcgccugcucggcacguucaccuggacccugagcgacuccgagggcaaggacacccccgggggcuacugccugacgcgguggaugcucaucgaggccgagcugaagugcuucgggaacaccgccgucgccaagugcaacgagaagcacgacgaggaguucugcgacaugcugcgccucuucgacuucugcaagcaggccauccagcggcugaaggcggaggcccagaugagcauccagcugaucaacaaggccgugaacgcccucaucaacgaccagcugaucaugaagaaccaccuccgcgacaucaugggcaucccguacugcaacuacuccaaguacugguaccugaaccacaccaccacggggaagaccagccugcccaagugcuggcugguguccaacggcagcuaccucaacgagacccacuucuccgacgacaucgagcagcaggccgacaacaugaucaccgagaugcugcagaaggaguacauggagcggcagggcaagacgccccuggggcuggucgaccucuucguguucagcaccuccuucuaccugaucagcaucuuccugcaccucgugaagaucccgacccaccgccacaucgucggcaagcccugccccaagccccaccggcugaaccacauggggaucugcuccugcggccuguacaagcagccgggggugcccgugaaguggaagcgcugaggacuaguaauaaggaaacuguaugaaugucugugggcaggaagugaagagauccuucuguaaagguuuuuggaauuaugucugcugaauaauaaacuuuuuugaaauaauaaaucugguagaaaaaugagaucuaaaaaaaaaaaaaaaaaaaaaaaaaaaaaaaaaaaaaaaaaaaaaaaaaaaaaaaaaaaaaaaaaaaaaaaaaaaaaaaaaaaaaaaaaaaaaaaaaaaa

SEQ ID NO: 37765 - RNA, 1788 nt, Artificial Sequence
  mRNA product Design b-4 (A100) comprising derived and/or modified sequence from LASV(Josiah;Clade IV)__NP_694870__GPCmut10 (opt4)
aggagagucccgcagucggcguccagcggcucugcuuguucgugugugugucguugcaggccuuauucaagcuuaccaugggccagaucgugaccuucuuccaggaggugccccacgugaucgaggaggugaugaacaucgugcugaucgcccugagcgugcuggccgugcugaagggccuguacaacuucgccaccugcggccuggugggccuggugaccuuccugcugcugugcggcagaagcugcaccaccagccuguacaagggcguguacgagcugcagacccuggagcugaacauggagacccugaacaugugcaugccccugagcugcaccaagaacaacagccaccacuacaucauggugggcaacgagaccggccuggagcugacccugaccaacaccagcaucaucaaccacaaguucugcaaccugagcgacgcccacaagaagaaccuguacgaccacgcccugaugagcaucaucagcaccuuccaccugagcauccccaacuucaaccaguacgaggccaugagcugcgacuucaacggcggcaagaucagcgugcaguacaaccugagccacagcuacgccggcgacgccgccaaccacugcggcaccguggccaacggcgugcugcagaccuucaugagaauggccuggggcggcagcuacaucgcccuggacagcggcagaggcaacugggacugcaucaugaccagcuaccaguaccugaucauccagaacaccaccugggaggaccacugccaguucagcagacccagccccaucggcuaccugggccugcugagccagagaaccagagacaucuacaucagcagaagacugcugggcaccuucaccuggacccugagcgacagcgagggcaaggacacccccggcggcuacugccugaccagauggaugcugaucgaggccgagcugaagugcuucggcaacaccgccguggccaagugcaacgagaagcacgacgaggaguucugcgacaugcugagacuguucgacuucugcaagcaggccauccagagacugaaggccgaggcccagaugagcauccagcugaucaacaaggccgugaacgcccugaucaacgaccagcugaucaugaagaaccaccugagagacaucaugggcauccccuacugcaacuacagcaaguacugguaccugaaccacaccaccaccggcagaaccagccugcccaagugcuggcuggugagcaacggcagcuaccugaacgagacccacuucagcgacgacaucgagcagcaggccgacaacaugaucaccgagaugcugcagaaggaguacauggagagacagggcaagaccccccugggccugguggaccuguucguguucagcaccagcuucuaccugaucagcaucuuccugcaccuggugaagauccccacccacagacacaucgugggcaagagcugccccaagccccacagacugaaccacaugggcaucugcagcugcggccuguacaagcagcccggcgugcccgugaaguggaagagaugaggacuaguaauaaggaaacuguaugaaugucugugggcaggaagugaagagauccuucuguaaagguuuuuggaauuaugucugcugaauaauaaacuuuuuugaaauaauaaaucugguagaaaaaugagaucuaaaaaaaaaaaaaaaaaaaaaaaaaaaaaaaaaaaaaaaaaaaaaaaaaaaaaaaaaaaaaaaaaaaaaaaaaaaaaaaaaaaaaaaaaaaaaaaaaaaa

SEQ ID NO: 37766 - RNA, 1785 nt, Artificial Sequence
  mRNA product Design b-4 (A100) comprising derived and/or modified sequence from LASV(LP;Clade I)__AAF86701__GPCmut10 (opt4)
aggagagucccgcagucggcguccagcggcucugcuuguucgugugugugucguugcaggccuuauucaagcuuaccaugggccagaucaucaccuucuuccaggaggugccccacgugaucgaggaggugaugaacaucgugcugaucgcccugagccugcuggccauccugaagggccuguacaacaucgccaccugcggcaucaucggccugguggccuuccuguuccugugcggcaagagcugcagccugacccugaagggcggcuacgagcugcagacccuggagcugaacauggagacccugaacaugugcaugccccugagcugcaccaagaacagcagccaccacuacaucagagugggcaacgagaccggccuggagcugacccugaccaacaccagcaucaucaaccacaaguucugcaaccugagcgacgcccacaagaagaaccuguacgaccacgcccugaugagcaucaucagcaccuuccaccugagcauccccaacuucaaccaguacgaggccaugagcugcgacuucaacggcggcaagaucagcgugcaguacaaccugagccacagcuacgccggcgacgccgccgagcacugcggcaccguggccaacggcgugcugcagaccuucaugagaauggccuggggcggcagauacaucgcccuggacagcggcaagggcaacugggacugcaucaugaccagcuaccaguaccugaucauccagaacaccaccugggaggaccacugccaguucagcagacccagccccaucggcuaccugggccugcugagccagagaaccagagacaucuacaucagcagaagacugcugggcaccuucaccuggacccugagcgacagcgagggcaacgagacccccggcggcuacugccugaccagauggaugcugaucgaggccgagcugaagugcuucggcaacaccgccguggccaagugcaacgagaagcacgacgaggaguucugcgacaugcugagacuguucgacuucugcaagcaggccaucagaagacugaaggccgaggcccagaugagcauccagcugaucaacaaggccgugaacgcccugaucaacgaccagcugaucaugaagaaccaccugagagacaucaugggcauccccuacugcaacuacagcaaguacugguaccugaaccacaccagcagcggcagaaccagccugcccaagugcuggcugaucagcaacggcagcuaccugaacgagacccaguucagcgacgacaucgagcagcaggccgacaacaugaucaccgagaugcugcagaaggaguacaucgagagacagggcaagaccccccugggccugguggacaucuucaucuucagcaccagcuucuaccugaucagcaucuuccugcaccugaucaagauccccacccacagacacaucgugggcaagcccugccccaagccccacagacugaaccacaugggcgugugcagcugcggccuguacaagcaccccggcgugcccaccaaguggaagagaugaggacuaguaauaaggaaacuguaugaaugucugugggcaggaagugaagagauccuucuguaaagguuuuuggaauuaugucugcugaauaauaaacuuuuuugaaauaauaaaucugguagaaaaaugagaucuaaaaaaaaaaaaaaaaaaaaaaaaaaaaaaaaaaaaaaaaaaaaaaaaaaaaaaaaaaaaaaaaaaaaaaaaaaaaaaaaaaaaaaaaaaaaaaaaaaaa

SEQ ID NO: 37767 - RNA, 1785 nt, Artificial Sequence
  mRNA product Design b-4 (A100) comprising derived and/or modified sequence from LASV(803213;Clade II)__AAF86703__GPCmut10 (opt4)
aggagagucccgcagucggcguccagcggcucugcuuguucgugugugugucguugcaggccuuauucaagcuuaccaugggccagaucaucaccuucuuccaggaggugccccacgugaucgaggaggugaugaacaucgugcugaucgcccugagccugcuggccauccugaagggcaucuacaacguggccaccugcggccuguucggccugaucagcuuccugcugcugugcggcagaagcugcagcgugaccuacaagggcguguacgagcugcagacccuggagcugaacauggccaaccugaacaugugcaugccccugagcugcaccaagaacaacagccaccacuacaucauggugggcaacgagaccggccuggagcugacccugaccaacaccagcaucaucaaccacaaguucugcaaccugagcgacgcccacaagaagaaccuguacgaccacgcccugaugagcaucaucagcaccuuccaccugagcauccccaacuucaaccaguacgaggccaugagcugcgacuucaacggcggcaagaucagcgugcaguacaaccugagccacagcuucgccguggacgccgccaaccacugcggcaccaucgccaacggcgugcugcagaccuucaugagaauggccuggggcggcagcuacaucgcccuggacagcggcaagggcaacugggacugcaucaugaccagcuaccaguaccugaucauccagaacaccaccugggaggaccacugccaguucagcagacccagccccaucggcuaccugggccugcugagccagagaaccagagacaucuacaucagcagaagacugcugggcaccuucaccuggacccugagcgacagcgagggcaacgaggcccccggcggcuacugccugaccagauggaugcugaucgaggccgagcugaagugcuucggcaacaccgccguggccaagugcaacgagaagcacgacgaggaguucugcgacaugcugagacuguucgacuucugcaagcaggccaucaagagacugaagaccgaggcccagaugagcauccagcugaucaacaaggccgugaacgcccugaucaacgaccagcugaucaugaagaaccaccugagagacaucaugggcauccccuacugcaacuacagcagauacugguaccugaaccacaccgugaccggcaagaccagccugcccagaugcuggcuggugagcaacggcagcuaccugaacgagacccacuucagcgacgacaucgagcagcaggccgacaacaugaucaccgagaugcugcagaaggaguacauggacagacagggcaagaccccccugggccugguggaccuguucguguucagcaccagcuucuaccugaucagcaucuuccugcaccuggugaagauccccacccacagacacaucgugggcaagcccugccccaagccccacagacugaaccacaugggcaucugcagcugcggccuguacaagcaccccggcgugcccgugaaguggaagagaugaggacuaguaauaaggaaacuguaugaaugucugugggcaggaagugaagagauccuucuguaaagguuuuuggaauuaugucugcugaauaauaaacuuuuuugaaauaauaaaucugguagaaaaaugagaucuaaaaaaaaaaaaaaaaaaaaaaaaaaaaaaaaaaaaaaaaaaaaaaaaaaaaaaaaaaaaaaaaaaaaaaaaaaaaaaaaaaaaaaaaaaaaaaaaaaaa

SEQ ID NO: 37768 - RNA, 1785 nt, Artificial Sequence
  mRNA product Design b-4 (A100) comprising derived and/or modified sequence from LASV(GA391;Clade III)__CAA36645__GPCmut10 (opt4)
aggagagucccgcagucggcguccagcggcucugcuuguucgugugugugucguugcaggccuuauucaagcuuaccaugggccagaucgugaccuucuuccaggaggugccccacgugaucgaggaggugaugaacaucgugcugaucgcccugagcauccuggccauccugaagggccuguacaacguggccaccugcggccugaucggccuggugaccuuccugcugcugagcggcagaagcugcagccugaucuacaagggcaccuacgagcugcagacccuggagcugaacauggagacccugaacaugugcaugccccugagcugcaccaagaacaacagccaccacuacaucagagugggcaacgagaccggccuggagcugacccugaccaacaccagcauccugaaccacaaguucugcaaccugagcgacgcccacaagagaaaccuguacgaccacagccugaugagcaucaucagcaccuuccaccugagcauccccaacuucaaccaguacgaggccaugagcugcgacuucaacggcggcaagaucaccgugcaguacaaccugagccacagcuucgccguggacgccgccggccacugcggcacccuggccaacggcgugcugcagaccuucaugagaauggccuggggcggcagcuacaucgcccuggacagcggcagaggcaacugggacugcaucaugaccagcuaccaguaccugaucauccagaacaccaccugggacgaccacugccaguucagcagacccagccccaucggcuaccugggccugcugagccagagaaccagagacaucuacaucagcagaagacugcugggcaccuucaccuggacccugagcgacagcgagggcaacgagacccccggcggcuacugccugaccagauggaugcugaucgaggccgagcugaagugcuucggcaacaccgccguggccaagugcaacgagaagcacgacgaggaguucugcgacaugcugagacuguucgacuucugcaagcaggccaucagaagacugaagaccgaggcccagaugagcauccagcugaucaacaaggccgugaacgcccugaucaacgaccagcugaucaugaagaaccaccugagagacaucaugggcauccccuacugcaacuacagcagauacugguaccugaaccacaccagcaccggcaagaccagccugcccagaugcuggcugaucagcaacggcagcuaccugaacgagaccaaguucagcgacgacaucgagcagcaggccgacaacaugaucaccgagaugcugcagaaggaguacaucgacagacagggcaagaccccccugggccugguggaccuguucguguucagcaccagcuucuaccugaucagcaucuuccugcaccuggugaagauccccacccacagacacaucgugggcaagcccugccccaagccccacagacugaaccacaugggcaucugcagcugcggccuguacaagcagcccggcgugcccgugagauggaagagaugaggacuaguaauaaggaaacuguaugaaugucugugggcaggaagugaagagauccuucuguaaagguuuuuggaauuaugucugcugaauaauaaacuuuuuugaaauaauaaaucugguagaaaaaugagaucuaaaaaaaaaaaaaaaaaaaaaaaaaaaaaaaaaaaaaaaaaaaaaaaaaaaaaaaaaaaaaaaaaaaaaaaaaaaaaaaaaaaaaaaaaaaaaaaaaaaa

SEQ ID NO: 37769 - RNA, 1788 nt, Artificial Sequence
  mRNA product Design b-4 (A100) comprising derived and/or modified sequence from LASV(AV;Clade V)__CCA30314__GPCmut10 (opt4)
aggagagucccgcagucggcguccagcggcucugcuuguucgugugugugucguugcaggccuuauucaagcuuaccaugggccagaucgugaccuucuuccaggaggugccccacgugaucgaggaggugaugaacaucgugcugaucgcccugagcauccuggccgugcugaagggccuguacaacaucgccaccugcggccugaucggccugaucaccuuccugcugcugugcggcagaagcugcagcagcaaccuguacaagggcguguacgagcugcagagccuggaccugaacauggagacccugaacaugugcaugccccugagcugcaccaagaacaacagccaccacuacaucagagugggcaacgacaccggccuggagcugacccugaccaacaccagcauccugaaccacaaguucugcaaccugagcgacgcccacaagaaggaccuguacgaccacgcccugaugagcaucaucagcaccuuccaccugagcauccccaacuucaaccaguacgaggccaugagcugcgacuucaacggcggcaagaucagcgugcaguacaaccugagccacagcuacgccaucgacgccgccaaccacugcggcaccguggccaacggcauccugcagaccuucaugagaauggccuggggcggcagcuacaucgcccuggacagcggcagaggcaacugggacugcaucaugaccagcuaccaguaccugaucauccagaacaccaccugggagaaccacugccaguucagcagacccagccccaucggcuaccugggccugcugagccagagaaccagagacaucuacaucagcagaagacugcugggcaccuucaccuggacccugagcgacagcgagggcaacgccacccccggcggcuacugccugaccagauggaugcugaucgaggccgagcugaagugcuucggcaacaccgccguggccaagugcaacgagaagcacgacgaggaguucugcgacaugcugagacuguucgacuucugcaagcaggccaucagcagacugaagagcgaggcccagaugagcauccagcugaucaacaaggccgugaacgcccugaucaacgaccagcugaucaugaagaaccaccugagagacaucaugggcauccccuacugcaacuacagcaaguacugguaccugaaccacaccaucaccggcaagaccagccugcccaagugcuggcuggugagcaacggcagcuaccugaacgagacccacuucagcgacgacaucgagcagcaggccgacaacaugaucaccgagaugcugcagaaggaguacauggagagacagggcaagaccccccugggccugguggaccuguucguguucagcaccagcuucuaccugaucagcaucuuccugagacuggugaagauccccacccacagacacaucgugggcaagcccugccccaagccccacagacugaaccacaugggcaucugcagcugcggccuguacaagcagcccggcgugcccgugagauggaagagaugaggacuaguaauaaggaaacuguaugaaugucugugggcaggaagugaagagauccuucuguaaagguuuuuggaauuaugucugcugaauaauaaacuuuuuugaaauaauaaaucugguagaaaaaugagaucuaaaaaaaaaaaaaaaaaaaaaaaaaaaaaaaaaaaaaaaaaaaaaaaaaaaaaaaaaaaaaaaaaaaaaaaaaaaaaaaaaaaaaaaaaaaaaaaaaaaa

SEQ ID NO: 37770 - RNA, 1785 nt, Artificial Sequence
  mRNA product Design b-4 (A100) comprising derived and/or modified sequence from LASV(Togo/2016/7082;Clade VI)__AMR44577__GPCmut10 (opt4)
aggagagucccgcagucggcguccagcggcucugcuuguucgugugugugucguugcaggccuuauucaagcuuaccaugggccagaucaucaccuucuuccaggaggugccccacgugaucgaggaggugaugaacaucgugcugaucgcccugagccugcuggccauccugaagggcguguacaacguggccaccugcggcaucaucggccuggugaccuuccuguuccugugcggcagaagcugcagccugaucuacaagggcagcuacgagcugcagacccuggagcugaacauggagacccugaacaugugcaugccccugagcugcaccaagaacagcagccaccacuacaucagagugggcaacgagaccggccuggagcugacccugaccaacaccagcaucaucaaccacaaguucugcaaccugagcgacgcccacaagagaaaccuguacgaccacgcccugaugagcauccugagcaccuuccaccugagcauccccaacuucaaccaguacgaggccaugagcugcgacuucaacggcggcaagaucagcgugcaguacaaccugagccacgccuacgccguggacgccgccgagcacugcggcaccguggccaacggcgugcugcagaccuucaugagaauggccuggggcggcagcuacaucgcccuggacagcggcagaggcaacugggacugcaucaugaccagcuaccaguaccugaucauccagaacaccaccugggaggaccacugccaguucagcagacccagccccaucggcuaccugggccugcugagccagagaaccagagacaucuacaucagcagaagacugcugggcaccuucaccuggacccugagcgacagcgagggcaacgagacccccggcggcuacugccugaccagauggaugcugaucgaggccgagcugaagugcuucggcaacaccgccguggccaagugcaacgagaagcacgacgaggaguucugcgacaugcugagacuguucgacuucugcaagcaggccauccagagacugaagagcgaggcccagaugagcauccagcugaucaacaaggccgugaacgcccugaucaacgaccagcugaucaugaagaaccaccugagagacaugaugggcauccccuacugcaacuacagcaaguacugguaccugaaccacaccagcagcggcagaaccagccugcccaagugcuggcuggugagcaacggcagcuaccugaacgagacccacuucagcgacgacaucgagcagcaggccgacaacaugaucaccgagaugcugcagaaggaguacaucgacagacagggcaagaccccccugggccugguggaccuguucguguucagcaccagcuucuaccugaucagcaucuuccugcaccugaucaagauccccacccacagacacaucgugggcaagcccugccccaagccccacagacugaaccacaugggcaucugcagcugcggccuguacaagcagcccggcgugcccaccagauggaagagaugaggacuaguaauaaggaaacuguaugaaugucugugggcaggaagugaagagauccuucuguaaagguuuuuggaauuaugucugcugaauaauaaacuuuuuugaaauaauaaaucugguagaaaaaugagaucuaaaaaaaaaaaaaaaaaaaaaaaaaaaaaaaaaaaaaaaaaaaaaaaaaaaaaaaaaaaaaaaaaaaaaaaaaaaaaaaaaaaaaaaaaaaaaaaaaaaa

SEQ ID NO: 37771 - RNA, 1785 nt, Artificial Sequence
  mRNA product Design b-4 (A100) comprising derived and/or modified sequence from LASV(KAK-428;Clade n.d. (VII))__ANH09740__GPCmut10 (opt4)
aggagagucccgcagucggcguccagcggcucugcuuguucgugugugugucguugcaggccuuauucaagcuuaccaugggccagaucgugaccuucuuccaggaggugccccacgugaucgaggaggugaugaacaucgugcugaucgcccugagccugcuggccauccugaagggccuguacaacuucgccaccugcggcgugaucggccugaucaccuuccugcugcugugcggcagaagcugcagcgccaccuacaagggccaguacgagcugcagacccuggagcugaacauggagagccugaacaugugcaugccccugagcugcaccaagaacaacagccaccacuacaucagagccggcaacaacaccggccuggagcugacccugaccaacaccagcaucaucagccacaaguucugcaaccugagcgacgcccacaagaagaaccuguacgaccacacccugaugagcaucaucaccaccuuccaccugagcauccccaacuucaaccaguacgaggccaugagcugcgacuucaacggcggcaagaucagcauccaguacaaccugagccacagcuacgccggcgacgccgcccagcacugcggcaccguggccaacggcgugcugcagaccuucaugagaauggccuggggcggcagcuaccuggcccuggacagcggcagaagaggcugggacugcaucaucagcagcuaccaguaccugaucauccagaacaccaccugggacgaccacugccaguucagcagacccagccccaucggcuaccugggcuucgugagccagaagaccagagacaucuacaucagcagaagacugcugggcaccuucaccuggacccugagcgacagcgagggccacgacaugcccggcggcuacugccugaccagauggaugcugaucgaggccgaccugaagugcuucggcaacaccgccguggccaagugcaacgagaagcacgacgaggaguucugcgacauguggagacuguucgacuucugcaagcaggccauccagagacugaaggccgaggcccagaugaacauccagcugaucaacaaggccgugaacgcccugaucaacgaccagcugaugaugaagaaccaccugagagacaucaugggcauccccuacugcaacuacagcaaguucugguaccugaacaacaccaccaccggcagaaccagccugcccagaugcuggcugaucagcaacggcagcuaccugaacgagacccacuucagcgacgacaucgagcagcaggccgacaacaugaucaccgagaugcugcagaaggaguacauggacagacagggcaagaccccccugggccugguggaccuguucguguucagcaccagcuucuaccugaucaccaucuuccugcaccuggugaagauccccacccacagacacaucgugggcaagcccugccccaagccccacagacugaaccacaugggcaucugcagcugcggccuguacaagcagcccggcgugcccgugagauggaagagaugaggacuaguaauaaggaaacuguaugaaugucugugggcaggaagugaagagauccuucuguaaagguuuuuggaauuaugucugcugaauaauaaacuuuuuugaaauaauaaaucugguagaaaaaugagaucuaaaaaaaaaaaaaaaaaaaaaaaaaaaaaaaaaaaaaaaaaaaaaaaaaaaaaaaaaaaaaaaaaaaaaaaaaaaaaaaaaaaaaaaaaaaaaaaaaaaa

SEQ ID NO: 37772 - RNA, 1785 nt, Artificial Sequence; identical to SEQ ID NO: 37766
  mRNA product Design b-4 (A100) comprising derived and/or modified sequence from LASV(Pinneo-NIG-1969;Clade I)__AIT17836__GPCmut10 (opt4)

SEQ ID NO: 37773 - RNA, 1785 nt, Artificial Sequence
  mRNA product Design b-4 (A100) comprising derived and/or modified sequence from LASV(ISTH0009-NIG-2011;Clade II)__AIT17404__GPCmut10 (opt4)
aggagagucccgcagucggcguccagcggcucugcuuguucgugugugugucguugcaggccuuauucaagcuuaccaugggccagaucaucaccuucuuccaggaggugccccacgugaucgaggaggugaugaacaucgugcugaucgcccugagccugcuggccauccugaagggcaucuacaacguggccaccugcggccuguucggccuggugagcuuccugcugcugugcggcagaagcugcagcaccaccuacaagggcguguacgagcugcagacccuggagcuggacauggccagccugaacaugugcaugccccugagcugcaccaagaacaacagccaccacuacaucauggugggcaacgagaccggccuggagcugacccugaccaacaccagcaucaucaaccacaaguucugcaaccugagcgacgcccacaagaagaaccuguacgaccacgcccugaugagcaucaucagcaccuuccaccugagcauccccaacuucaaccaguacgaggccaugagcugcgacuucaacggcggcaagaucagcgugcaguacaaccugagccacgccuacgccguggacgccgccaaccacugcggcaccaucgccaacggcgugcugcagaccuucaugagaauggccuggggcggcagcuacaucgcccuggacagcggcaagggcagcugggacugcaucaugaccagcuaccaguaccugaucauccagaacaccaccugggaggaccacugccaguucagcagacccagccccaucggcuaccugggccugcugagccagagaaccagagacaucuacaucagcagaagacugcugggcaccuucaccuggacccugagcgacagcgagggcaacgagacccccggcggcuacugccugaccagauggaugcugaucgaggccgagcugaagugcuucggcaacaccgccguggccaagugcaacgagaagcacgacgaggaguucugcgacaugcugagacuguucgacuucugcaagcaggccaucagaagacugaagaccgaggcccagaugagcauccagcugaucaacaaggccgugaacgcccugaucaacgaccagcugaucaugaagaaccaccugagagacaucaugggcauccccuacugcaacuacagcaaguacugguaccugaaccacaccgugaccggcaagaccagccugcccagaugcuggcuggugagcaacggcagcuaccugaacgagacccacuucagcgacgacaucgagcagcaggccgacaacaugaucaccgagcugcugcagaaggaguacauggacagacagggcaagaccccccugggccugguggaccuguucguguucagcaccagcuucuaccugaucagcaucuuccugcaccugaucaagauccccacccacagacacaucaccggcaagcccugccccaagccccacagacugaaccacaugggcaucugcagcugcggccuguacaagcaccccggcgugcccgugaaguggaagagaugaggacuaguaauaaggaaacuguaugaaugucugugggcaggaagugaagagauccuucuguaaagguuuuuggaauuaugucugcugaauaauaaacuuuuuugaaauaauaaaucugguagaaaaaugagaucuaaaaaaaaaaaaaaaaaaaaaaaaaaaaaaaaaaaaaaaaaaaaaaaaaaaaaaaaaaaaaaaaaaaaaaaaaaaaaaaaaaaaaaaaaaaaaaaaaaaa

SEQ ID NO: 37774 - RNA, 1785 nt, Artificial Sequence
  mRNA product Design b-4 (A100) comprising derived and/or modified sequence from LASV(ISTH2010-NIG-2012;Clade II)__AIT17482__GPCmut10 (opt4)
aggagagucccgcagucggcguccagcggcucugcuuguucgugugugugucguugcaggccuuauucaagcuuaccaugggccagaucaucaccuucuuccaggaggugccccacgugaucgaggaggugaugaacaucgugcugaucgcccugagccugcuggccauccugaagggcaucuacaacguggccaccugcggccuguucggccuggugagcuuccugcugcugugcggcagaagcugcagcaccaccuacaagggcguguacgagcugcagacccuggagcuggacauggccagccugaacaugugcaugccccugagcugcaccaagaacaacagccaccacuacaucauggugggcaacgagaccggccuggagcugacccugaccaacaccagcaucaucaaccacaaguucugcaaccugagcgacgcccacaagaagaaccuguacgaccacgcccugaugagcaucaucagcaccuuccaccugagcauccccaacuucaaccaguacgaggccaugagcugcgacuucaacggcggcaagaucagcgugcaguacaaccugagccacgccuacgccguggacgccgccaaccacugcggcaccaucgccaacggcgugcugcagaccuucaugagaauggccuggggcggcagcuacaucgcccuggacagcggcaagggcagcugggacugcaucaugaccagcuaccaguaccugaucauccagaacaucaccugggaggaccacugccaguucagcagacccagccccaucggcuaccugggccugcugagccagagaaccagagacaucuacaucagcagaagacugcugggcaccuucaccuggacccugagcgacagcgagggcaacgagacccccggcggcuacugccugaccagauggaugcugaucgaggccgagcugaagugcuucggcaacaccgccguggccaagugcaacgagaagcacgacgaggaguucugcgacaugcugagacuguucgacuucugcaagcaggccaucagaagacugaagaccgaggcccagaugagcauccagcugaucaacaaggccgugaacgcccugaucaacgaccagcugaucaugaagaaccaccugagagacaucaugggcauccccuacugcaacuacagcaaguacugguaccugaaccacaccgugaccggcaagaccagccugcccagaugcuggcuggugagcaacggcagcuaccugaacgagacccacuucagcgacgacaucgagcagcaggccgacaacaugaucaccgagcugcugcagaaggaguacaucgacagacagggcaagaccccccugggccugguggaccuguucguguucagcaccagcuucuaccugaucagcaucuuccugcaccuggugaagauccccacccacagacacguggugggcaagcccugccccaagccccacagacugaaccacaugggcaucugcagcugcggccuguacaagcaccccggcgugcccgugaaguggaagagaugaggacuaguaauaaggaaacuguaugaaugucugugggcaggaagugaagagauccuucuguaaagguuuuuggaauuaugucugcugaauaauaaacuuuuuugaaauaauaaaucugguagaaaaaugagaucuaaaaaaaaaaaaaaaaaaaaaaaaaaaaaaaaaaaaaaaaaaaaaaaaaaaaaaaaaaaaaaaaaaaaaaaaaaaaaaaaaaaaaaaaaaaaaaaaaaaa

SEQ ID NO: 37775 - RNA, 1785 nt, Artificial Sequence
  mRNA product Design b-4 (A100) comprising derived and/or modified sequence from LASV(Lassa virus/H.sapiens-wt/NGA/2015/ISTH_0543;Clade II)__AVO03639__GPCmut10 (opt4)
aggagagucccgcagucggcguccagcggcucugcuuguucgugugugugucguugcaggccuuauucaagcuuaccaugggccagaucaucaccuucuuccaggaggugccccacgugaucgaggaggugaugaacaucgugcugaucgcccugagccugcuggccauccugaagggcaucuacaacguggccaccugcggccuguucggccuggugagcuuccugcugcugugcggcagaagcugcagcaccaccuacaagggcguguacgagcugcagacccuggagcuggacauggccaaccugaacaugugcaugccccugagcugcaccaagaacaacagccaccacuacaucauggugggcaacgagaccggccuggagcugacccugaccaacaccagcaucaucaaccacaaguucugcaaccugagcgacgcccacaagaagaaccuguacgaccacgcccugaugagcaucaucagcaccuuccaccugagcauccccaacuucaaccaguacgaggccaugagcugcgacuucaacggcggcaagaucagcgugcaguacaaccugagccacaccuacgccguggacgccgccaaccacugcggcaccaucgccaacggcgugcugcagaccuucaugagaauggccuggggcggcagcuacaucgcccuggacagcggcaagggcagcugggacugcaucaugaccagcuaccaguaccuggugauccagaacaccaccugggaggaccacugccaguucagcagacccagccccaucggcuaccugggccugcugagccagagaaccagagacaucuacaucagcagaagacugcugggcaccuucaccuggacccugagcgacagcgagggcaacgagacccccggcggcuacugccugaccagauggaugcugaucgaggccgagcugaagugcuucggcaacaccgccguggccaagugcaacgagaagcacgacgaggaguucugcgacaugcugagacuguucgacuucugcaagcaggccaucagaagacugaagaccgaggcccagaugagcauccagcugaucaacaaggccgugaacgcccugaucaacgaccagcugaucaugaagaaccaccugagagacaucaugggcauccccuacugcaacuacagcaaguacugguaccugaaccacaccgugaccggcaagaccagccugcccagaugcuggcuggugagcaacggcagcuaccugaacgagacccacuucagcgacgacaucgagcagcaggccgacaacaugaucaccgagcugcugcagaaggaguacaucgacagacagggcaagaccccccugggccugguggaccuguucguguucagcaccagcuucuaccugaucagcaucuuccugcaccuggugaagauccccacccacagacacaucaccggcaagcccugccccaagccccacagacugaaccacaugggcaucugcagcugcggccuguacaagcaccccggcgugcccgugaaguggaagagaugaggacuaguaauaaggaaacuguaugaaugucugugggcaggaagugaagagauccuucuguaaagguuuuuggaauuaugucugcugaauaauaaacuuuuuugaaauaauaaaucugguagaaaaaugagaucuaaaaaaaaaaaaaaaaaaaaaaaaaaaaaaaaaaaaaaaaaaaaaaaaaaaaaaaaaaaaaaaaaaaaaaaaaaaaaaaaaaaaaaaaaaaaaaaaaaaa

SEQ ID NO: 37776 - RNA, 1785 nt, Artificial Sequence
  mRNA product Design b-4 (A100) comprising derived and/or modified sequence from LASV(Lassa virus/H.sapiens-wt/NGA/2016/ISTH_0009;Clade II)__AVO03571__GPCmut10 (opt4)
aggagagucccgcagucggcguccagcggcucugcuuguucgugugugugucguugcaggccuuauucaagcuuaccaugggccagaucaucaccuucuuccaggaggugccccacgugaucgaggaggugaugaacaucgugcugaucgcccugagccugcuggccauccugaagggcaucuacaacguggccaccugcggccugcugggccuggugagcuuccugcugcugugcggcagaagcugcagcaccaccuacaagggcguguacgagcugcagacccuggagcuggacauggccagccugaacaugugcaugccccugagcugcaccaagaacaacagccaccacuacaucauggugggcaacgagaccggccuggagcugacccugaccaacaccagcaucaucaaccacaaguucugcaaccugagcgacgcccacaagaagaaccuguacgaccacgcccugaugagcaucaucagcaccuuccaccugagcauccccaacuucaaccaguacgaggccaugagcugcgacuucaacggcggcagaaucagcgugcaguacaaccugagccacagcuacgccguggacgccgccaaccacugcggcaccaucgccaacggcgugcugcagaccuucaugagaauggccuggggcggcagcuacaucgcccuggacagcggcaagggcagcugggacugcaucaugaccagcuaccaguaccugaucauccagaacaccaccugggaggaccacugccaguucagcagacccagccccaucggcuaccugggccugcugagccagagaaccagagacaucuacaucagcagaagacugcugggcaccuucaccuggacccugagcgacagcgagggcaacgagacccccggcggcuacugccugaccagauggaugcugaucgaggccgagcugaagugcuucggcaacaccgccguggccaagugcaacgagaagcacgacgaggaguucugcgacaugcugagacuguucgacuucugcaagcaggccaucagaagacugaagaccgaggcccagaugagcauccagcugaucaacaaggccgugaacgcccugaucaacgaccagcugaucaugaagaaccaccugagagacaucaugggcauccccuacugcaacuacagcaaguacugguaccugaaccacaccgugaccggcaagaccagccugcccagaugcuggcuggugagcaacggcagcuaccugaacgagacccacuucagcgacgacaucgagcagcaggccgacaacaugaucaccgagcugcugcagaaggaguacaucgacagacagggcaagaccccccugggccugguggaccuguucguguucagcaccagcuucuaccugaucagcaucuuccugcaccuggugaagauccccacccacagacacaucaccggcaagcccugccccaagccccacagacugaaccacaugggcaucugcagcugcggccuguacaaccaccccggcgugcccgugaaguggaagagaugaggacuaguaauaaggaaacuguaugaaugucugugggcaggaagugaagagauccuucuguaaagguuuuuggaauuaugucugcugaauaauaaacuuuuuugaaauaauaaaucugguagaaaaaugagaucuaaaaaaaaaaaaaaaaaaaaaaaaaaaaaaaaaaaaaaaaaaaaaaaaaaaaaaaaaaaaaaaaaaaaaaaaaaaaaaaaaaaaaaaaaaaaaaaaaaaa

SEQ ID NO: 37777 - RNA, 1785 nt, Artificial Sequence
  mRNA product Design b-4 (A100) comprising derived and/or modified sequence from LASV(Lassa virus/H.sapiens-wt/NGA/2016/ISTH_0017;Clade II)__AVO03567__GPCmut10 (opt4)
aggagagucccgcagucggcguccagcggcucugcuuguucgugugugugucguugcaggccuuauucaagcuuaccaugggccagaucaucaccuucuuccaggaggugccccacgugaucgaggaggugaugaacaucgugcugaucgcccugagccugcuggccauccugaagggcaucuacaacguggccaccugcggccuguucggccuggugagcuuccugcugcugugcggcagaagcugcagcaccaccuacaagggcguguacgagcugcagacccuggagcuggacauggccagccugaacaugugcaugccccugagcugcaccaagaacaacagccaccacuacaucauggugggcaacgagaccggccuggagcugacccugaccaacaccagcaucaucaaccacaaguucugcaaccugagcgacgcccacaagaagaaccuguacgaccacgcccugaugagcaucaucagcaccuuccaccugagcauccccaacuucaaccaguacgaggccaugagcugcgacuucaacggcggcaagaucagcgugcaguacaaccugagccacaccuacgccaucgacgccgccaaccacugcggcaccaucgccaacggcgugcugcagaccuucaugagaauggccuggggcggcagcuacaucgcccuggacagcggcaagggcagcugggacugcaucaugaccagcuaccaguaccugaucauccagaacaccaccugggaggaccacugccaguucagcagacccagccccaucggcuaccugggccugcugagccagagaaccagagacaucuacaucagcagaagacugcugggcaccuucaccuggacccugagcgacagcgagggcaacgagacccccggcggcuacugccugaccagauggaugcugaucgaggccgagcugaagugcuucggcaacaccgccguggccaagugcaacgagaagcacgacgaggaguucugcgacaugcugagacuguucgacuucugcaagcaggccaucagaagacugaagaccgaggcccagaugagcauccagcugaucaacaaggccgugaacgcccugaucaacgaccagcugaucaugaagaaccaccugagagacaucaugggcauccccuacugcaacuacagcaaguacugguaccugaaccacaccgugaccggcaagaccagccugcccagaugcuggcuggugagcaacggcagcuaccugaacgagacccacuucagcgacgacaucgagcagcaggccgacaacaugaucaccgagcugcugcagaaggaguacauggacagacagggcaagaccccccugggccugguggaccuguucguguucagcaccagcuucuaccugaucagcaucuuccugcaccuggugagaauccccacccacagacacgugaucggcaagcccugccccaagccccacagacugaaccacaugggcaucugcagcugcggccuguacaagcaccccggcgugcccgugaaguggaagagaugaggacuaguaauaaggaaacuguaugaaugucugugggcaggaagugaagagauccuucuguaaagguuuuuggaauuaugucugcugaauaauaaacuuuuuugaaauaauaaaucugguagaaaaaugagaucuaaaaaaaaaaaaaaaaaaaaaaaaaaaaaaaaaaaaaaaaaaaaaaaaaaaaaaaaaaaaaaaaaaaaaaaaaaaaaaaaaaaaaaaaaaaaaaaaaaaa

SEQ ID NO: 37778 - RNA, 1785 nt, Artificial Sequence
  mRNA product Design b-4 (A100) comprising derived and/or modified sequence from LASV(Lassa virus/H.sapiens-wt/NGA/2018/ISTH_0959;Clade II)__AVV65099__GPCmut10 (opt4)
aggagagucccgcagucggcguccagcggcucugcuuguucgugugugugucguugcaggccuuauucaagcuuaccaugggccagaucaucaccuucuuccaggaggugccccacgugaucgaggaggugaugaacaucgugcugaucgcccugagccugcuggccauccugaagggcaucuacaacguggugaccugcggccuguucggccuggugagcuuccugcugcugugcggcagaagcugcagcaccaccuacaagggcguguacgagcugcagacccuggagcuggacauggccagccugaacaugugcaugccccugagcugcaccaagaacaacagccaccacuacaucauggugggcaacgagaccggccuggagcugacccugaccaacaccagcaucaucaaccacaaguucugcaaccugagcgacgcccacaagaagaaccuguacgaccacgcccugaugagcaucaucagcaccuuccaccugagcauccccaacuucaaccaguacgaggccaugagcugcgacuucaacggcggcaagaucagcgugcaguacaaccugagccacgccuacgccaucgacgccgccaaccacugcggcaccaucgccaacggcgugcugcagaccuucaugagaauggccuggggcggcagcuacaucgcccuggacagcggcaagggcagcugggacugcaucaugaccagcuaccaguaccugaucauccagaacaccaccugggaggaccacugccaguucagcagacccagccccaucggcuaccugggccugcugagccagagaaccagagacaucuacaucagcagaagacugcugggcaccuucaccuggacccugagcgacagcgagggcaacgagacccccggcggcuacugccugaccagauggaugcugaucgaggccgagcugaagugcuucggcaacaccgccguggccaagugcaacgagaagcacgacgaggaguucugcgacaugcugagacuguucgacuucugcaagcaggccaucagaagacugaagaccgaggcccagaugagcauccagcugaucaacaaggccgugaacgcccugaucaacgaccagcugaucaugaagaaccaccugagagacaucaugggcauccccuacugcaacuacagcaaguacugguaccugaaccacaccgugaccggcaagaccagccugcccagaugcuggcuggugagcaacggcagcuaccugaacgagacccacuucagcgacgacaucgagcagcaggccgacaacaugaucaccgagcugcugcagaaggaguacaucgacagacagggcaagaccccccugggccugguggaccuguucguguucagcaccagcuucuaccugaucagcaucuuccugcaccuggugaagauccccacccacagacacgugaucggcaagcccugccccaagccccacagacugaaccacaugggcaucugcagcugcggccuguacaagcaccccggcgugcccgugaaguggaagagaugaggacuaguaauaaggaaacuguaugaaugucugugggcaggaagugaagagauccuucuguaaagguuuuuggaauuaugucugcugaauaauaaacuuuuuugaaauaauaaaucugguagaaaaaugagaucuaaaaaaaaaaaaaaaaaaaaaaaaaaaaaaaaaaaaaaaaaaaaaaaaaaaaaaaaaaaaaaaaaaaaaaaaaaaaaaaaaaaaaaaaaaaaaaaaaaaa

SEQ ID NO: 37779 - RNA, 1785 nt, Artificial Sequence
  mRNA product Design b-4 (A100) comprising derived and/or modified sequence from LASV(LASV003-NIG-2008;Clade II)__AIT17580__GPCmut10 (opt4)
aggagagucccgcagucggcguccagcggcucugcuuguucgugugugugucguugcaggccuuauucaagcuuaccaugggccagaucaucaccuucuuccaggaggugccccacgugaucgaggaggugaugaacaucgugcugaucgcccugagccugcuggccauccugaagggcaucuacaacguggccaccugcggccuguucggccuggugagcuuccugcugcugugcggcagaagcugcagcaccaccuacaagggcguguacgagcugcagacccuggagcuggacauggccagccugaacaugugcaugccccugagcugcaccaagaacaacagccaccacuacaucauggugggcaacgagaccggccuggagcugacccugaccaacaccagcaucaucaaccacaaguucugcaaccugagcgacgcccacaagaagaaccuguacgaccacgcccugaugagcaucaucagcaccuuccaccugagcauccccaacuucaaccaguacgaggccaugagcugcgacuucaacggcggcaagaucagcgugcaguacaaccugagccacaccuacgccguggacgccgccaaccacugcggcaccaucgccaacggcgugcugcagaccuucaugagaauggccuggggcggcagcuacaucgcccuggacagcggcaagggcagcugggacugcaucaugaccagcuaccaguaccugaucauccagaacaccaccugggaggaccacugccaguucagcagacccagccccaucggcuaccugggccugcugagccagagaaccagagacaucuacaucagcagaagacugcugggcaccuucaccuggacccugagcgacagcgagagcaacgagacccccggcggcuacugccugaccagauggaugcugaucgaggccgagcugaagugcuucggcaacaccgccguggccaagugcaacgagaagcacgacgaggaguucugcgacaugcugagacuguucgacuucugcaagcaggccaucagaagacugaaggccgaggcccagaugagcauccagcugaucaacaaggccgugaacgcccugaucaacgaccagcugaucaugaagaaccaccugagagacaucaugggcauccccuacugcaacuacagcaaguacugguaccugaaccacaccgugaccggcagaaccagccugcccagaugcuggcuggugagcaacggcagcuaccugaacgagacccacuucagcgacgacaucgagcagcaggccgacaacaugaucaccgagcugcugcagaaggaguacauggacagacagggcaagaccccccugggccugguggaccuguucguguucagcaccagcuucuaccugaucagcaucuuccugcaccuggugaagauccccacccacagacacgugaucggcaagcccugccccaagccccacagacugaaccacaugggcaucugcagcugcggccuguacaagcaccccggcgugcccgugaaguggaagagaugaggacuaguaauaaggaaacuguaugaaugucugugggcaggaagugaagagauccuucuguaaagguuuuuggaauuaugucugcugaauaauaaacuuuuuugaaauaauaaaucugguagaaaaaugagaucuaaaaaaaaaaaaaaaaaaaaaaaaaaaaaaaaaaaaaaaaaaaaaaaaaaaaaaaaaaaaaaaaaaaaaaaaaaaaaaaaaaaaaaaaaaaaaaaaaaaa

SEQ ID NO: 37780 - RNA, 1785 nt, Artificial Sequence
  mRNA product Design b-4 (A100) comprising derived and/or modified sequence from LASV(LASV035-NIG-2009;Clade II)__AIT17588__GPCmut10 (opt4)
aggagagucccgcagucggcguccagcggcucugcuuguucgugugugugucguugcaggccuuauucaagcuuaccaugggccagaucaucaccuucuuccaggaggugccccacgugaucgaggaggugaugaacaucgugcugaucgcccugagccugcuggccauccugaagggcaucuacaacguggccaccugcggccuguucggccuggugagcuuccugcugcugugcggcagaagcugcagcaccaccuacaagggcguguacgagcugcagacccuggagcuggacauggccagccugaacaugugcaugccccugagcugcaccaagaacaacagccaccacuacaucauggugggcaacgagaccggccuggagcugacccugaccaacaccagcaucaucaaccacaaguucugcaaccugagcgacgcccacaagaagaaccuguacgaccacgcccugaugagcaucaucagcaccuuccaccugagcauccccaacuucaaccaguacgaggccaugagcugcgacuucaacggcggcaagaucagcgugcaguacaaccugagccacgccuacgccguggacgccgccaaccacugcggcaccaucgccaacggcgugcugcagaccuucaugagaauggccuggggcggcagcuacaucgcccuggacagcggcaagggcagcugggacugcaucaugaccagcuaccaguaccugaucauccagaacaccaccugggaggaccacugccaguucagcagacccagccccaucggcuaccugggccugcugagccagagaaccagagacaucuacaucagcagaagacugcugggcaccuucaccuggacccugagcgacagcgagggcaacgagacccccggcggcuacugccugaccagauggaugcugaucgaggccgagcugaagugcuucggcaacaccgccguggccaagugcaacgagaagcacgacgaggaguucugcgacaugcugagacuguucgacuucugcaagcaggccaucagaagacugaaggccgaggcccagaugagcauccagcugaucaacaaggccgugaacgcccugaucaacgaccagcugaucaugaagaaccaccugagagacaucaugggcauccccuacugcaacuacagcaaguacugguaccugaaccacaccgugaccggcaagaccagccugcccagaugcuggcuggugagcaacggcagcuaccugaacgagacccacuucagcgacgacaucgagcagcaggccgacaacaugaucaccgagcugcugcagaaggaguacaucgacagacagggcaagaccccccugggccugguggaccuguucguguucagcaccagcuucuaccugaucagcaucuuccugcaccuggugaagauccccacccacagacacgugaucggcaagcccugccccaagccccacagacugaaccacaugggcaucugcagcugcggccuguacaagcaccccggcgugcccgugaaguggaagagaugaggacuaguaauaaggaaacuguaugaaugucugugggcaggaagugaagagauccuucuguaaagguuuuuggaauuaugucugcugaauaauaaacuuuuuugaaauaauaaaucugguagaaaaaugagaucuaaaaaaaaaaaaaaaaaaaaaaaaaaaaaaaaaaaaaaaaaaaaaaaaaaaaaaaaaaaaaaaaaaaaaaaaaaaaaaaaaaaaaaaaaaaaaaaaaaaa

SEQ ID NO: 37781 - RNA, 1785 nt, Artificial Sequence
  mRNA product Design b-4 (A100) comprising derived and/or modified sequence from LASV(LASV1000-NIG-2009;Clade II)__AIT17782__GPCmut10 (opt4)
aggagagucccgcagucggcguccagcggcucugcuuguucgugugugugucguugcaggccuuauucaagcuuaccaugggccagaucaucaccuucuuccaggaggugccccacgugaucgaggaggugaugaacaucgugcugaucgcccugagccugcuggccauccugaagggcaucuacaacguggccaccugcggccuguucggccuggugagcuuccugcugcugugcggcagaagcugcagcaccaccuacaagggcguguacgagcugcagacccuggagcuggacauggccagccugaacaugugcaugccccugagcugcaccaagaacaacagccaccacuacaucauggugggcaacgagaccggccuggagcugacccugaccaacaccagcaucaucaaccacaaguucugcaaccugagcgacgcccacaagaagaaccuguacgaccacgcccugaugagcaucaucagcaccuuccaccugagcauccccaacuucaaccaguacgaggccaugagcugcgacuucaacggcggcaagaucagcgugcaguacaaccugagccacaccuacgccguggacgccgccaaccacugcggcaccaucgccaacggcgugcugcagaccuucaugagaauggccuggggcggcagcuacaucgcccuggacagcggcaagggcagcugggacugcaucaugaccagcuaccaguaccugaucauccagaacaccaccugggaggaccacugccaguucagcagacccagccccaucggcuaccugggccugcugagccagagaaccagagacaucuacaucagcagaagacugcugggcaccuucaccuggacccugagcgacagcgagggcaacgagacccccggcggcuacugccugaccagauggaugcugaucgaggccgagcugaagugcuucggcaacaccgccguggccaagugcaacgagaagcacgacgaggaguucugcgacaugcugagacuguucgacuucugcaagcaggccaucaagagacugaagaccgaggcccagaugagcauccagcugaucaacaaggccgugaacgcccugaucaacgaccagcugaucaugaagaaccaccugagagacaucaugggcauccccuacugcaacuacagcaaguacugguaccugaaccacaccgugaccggcaagaccagccugcccagaugcuggcuggugagcaacggcagcuaccugaacgagacccacuucagcgacgacaucgagcagcaggccgacaacaugaucaccgagcugcugcagaaggaguacaucgacagacagggcaagaccccccugggccugguggaccuguucguguucagcaccagcuucuaccugaucagcaucuuccugcaccuggugaagauccccacccacagacacguggugggcaagcccugccccaagccccacagacugaaccacaugggcaucugcagcugcggccuguacaagcaccccggcgugcccgugaaguggaagagaugaggacuaguaauaaggaaacuguaugaaugucugugggcaggaagugaagagauccuucuguaaagguuuuuggaauuaugucugcugaauaauaaacuuuuuugaaauaauaaaucugguagaaaaaugagaucuaaaaaaaaaaaaaaaaaaaaaaaaaaaaaaaaaaaaaaaaaaaaaaaaaaaaaaaaaaaaaaaaaaaaaaaaaaaaaaaaaaaaaaaaaaaaaaaaaaaa

SEQ ID NO: 37782 - RNA, 1785 nt, Artificial Sequence
  mRNA product Design b-4 (A100) comprising derived and/or modified sequence from LASV(LASV221-NIG-2010;Clade II)__AIT17624__GPCmut10 (opt4)
aggagagucccgcagucggcguccagcggcucugcuuguucgugugugugucguugcaggccuuauucaagcuuaccaugggccagaucaucaccuucuuccaggaggugccccacgugaucgaggaggugaugaacaucgugcugaucgcccugagccugcuggccauccugaagggcaucuacaacguggccaccugcggccuguucggccuggugagcuuccugcugcugugcggcagaagcugcagcaccaccuacaagggcguguacgagcugcagacccuggagcuggacauggccagccugaacaugugcaugccccugagcugcaccaagaacaacagccaccacuacaucauggugggcaacgagaccggccuggagcugacccugaccaacaccagcaucaucaaccacaaguucugcaaccugagcgacgcccacaagaagaaccuguacgaccacgcccugaugagcaucaucagcaccuuccaccugagcauccccaacuucaaccaguacgaggccaugagcugcgacuucaacggcggcaagaucagcgugcaguacaaccugagccacaccuacgccaucgacgccgccaaccacugcggcaccaucgccaacggcgugcugcagaccuucaugagaauggccuggggcggcagcuacaucgcccuggacagcggcaagggcagcugggacugcaucaugaccagcuaccaguaccugaucauccagaacaccaccugggaggaccacugccaguucagcagacccagccccaucggcuaccugggccugcugagccagagaaccagagacaucuacaucagcagaagacugcugggcaccuucaccuggacccugagcgacagcgagggcaacgagacccccggcggcuacugccugaccagauggaugcugaucgaggccgagcugaagugcuucggcaacaccgccguggccaagugcaacgagaagcacgacgaggaguucugcgacaugcugagacuguucgacuucugcaagcaggccaucagaagacugaagaccgaggcccagaugagcauccagcugaucaacaaggccgugaacgcccugaucaacgaccagcugaucaugaagaaccaccugagagacaucaugggcauccccuacugcaacuacagcaaguacugguaccugaaccacaccgugaccggcaagaccagccugcccagaugcuggcuggugagcaacggcagcuaccugaacgagacccacuucagcgacgacaucgagcagcaggccgacaacaugaucaccgagaugcugcagaaggaguacauggacagacagggcaagaccccccugggccugguggaccuguucguguucagcaccagcuucuaccugaucagcaucuuccugcaccuggugaagauccccacccacagacacgugaucggcaagcccugccccaagccccacagacugaaccacaugggcaucugcagcugcggccuguacaagcaccccggcgugcccgugaaguggaagagaugaggacuaguaauaaggaaacuguaugaaugucugugggcaggaagugaagagauccuucuguaaagguuuuuggaauuaugucugcugaauaauaaacuuuuuugaaauaauaaaucugguagaaaaaugagaucuaaaaaaaaaaaaaaaaaaaaaaaaaaaaaaaaaaaaaaaaaaaaaaaaaaaaaaaaaaaaaaaaaaaaaaaaaaaaaaaaaaaaaaaaaaaaaaaaaaaa

SEQ ID NO: 37783 - RNA, 1785 nt, Artificial Sequence
  mRNA product Design b-4 (A100) comprising derived and/or modified sequence from LASV(LASV237-NIG-2010;Clade II)__AIT17638__GPCmut10 (opt4)
aggagagucccgcagucggcguccagcggcucugcuuguucgugugugugucguugcaggccuuauucaagcuuaccaugggccagaucaucaccuucuuccaggaggugccccacgugaucgaggaggugaugaacaucgugcugaucgcccugagccugcuggccauccugaagggcaucuacaacguggccaccugcggccuguucggccuggugagcuuccugcugcugugcggcagaagcugcagcaccaccuacaagggcguguacgagcugcagacccuggagcuggacauggccagccugaacaugugcaugccccugagcugcaccaagaacaacagccaccacuacaucauggugggcaacgagaccggccuggagcugacccugaccaacaccagcaucaucaaccacaaguucugcaaccugagcgacgcccacaagaaggaccuguacgaccacgcccugaugagcaucaucagcaccuuccaccugagcauccccaacuucaaccaguacgaggccaugagcugcgacuucaacggcggcaagaucagcgugcaguacaaccugagccacaccuacgccguggacgccgccaaccacugcggcaccaucgccaacggcgugcugcagaccuucaugagaauggccuggggcggcagcuacaucgcccuggacagcggcaagggcagcugggacugcaucaugaccagcuaccaguaccugaucauccagaacaccaccugggaggaccacugccaguucagcagacccagccccaucggcuaccugggccugcugagccagagaaccagagacaucuacaucagcagaagacugcugggcaccuucaccuggacccugagcgacagcgagggcaacgagacccccggcggcuacugccugaccagauggaugcugaucgaggccgagcugaagugcuucggcaacaccgccguggccaagugcaacgagaagcacgacgaggaguucugcgacaugcugagacuguucgacuucugcaagcaggccaucagaagacugaagaccgaggcccagaugagcauccagcugaucaacaaggccgugaacgcccugaucaacgaccagcugaucaugaagaaccaccugagagacaucaugggcauccccuacugcaacuacagcaaguacugguaccugaaccacaccgugaccggcaagaccagccugcccagaugcuggcuggugagcaacggcagcuaccugaacgagacccacuucagcgacgacaucgagcagcaggccgacaacaugaucaccgagcugcugcagaaggaguacauggacagacagggcaagaccccccugggccugguggaccuguucguguucagcaccagcuucuaccugaucagcaucuuccugcaccugaucaagauccccacccacagacacaucaccggcaagcccugccccaagccccacagacugaaccacaugggcaucugcagcugcggccuguacaagcaccccggcgugcccgugaaguggaagagaugaggacuaguaauaaggaaacuguaugaaugucugugggcaggaagugaagagauccuucuguaaagguuuuuggaauuaugucugcugaauaauaaacuuuuuugaaauaauaaaucugguagaaaaaugagaucuaaaaaaaaaaaaaaaaaaaaaaaaaaaaaaaaaaaaaaaaaaaaaaaaaaaaaaaaaaaaaaaaaaaaaaaaaaaaaaaaaaaaaaaaaaaaaaaaaaaa

SEQ ID NO: 37784 - RNA, 1785 nt, Artificial Sequence
  mRNA product Design b-4 (A100) comprising derived and/or modified sequence from LASV(LASV253-NIG-2011;Clade II)__AIT17670__GPCmut10 (opt4)
aggagagucccgcagucggcguccagcggcucugcuuguucgugugugugucguugcaggccuuauucaagcuuaccaugggccagaucaucaccuucuuccaggaggugccccacgugaucgaggaggugaugaacaucgugcugaucgcccugagccugcuggccauccugaagggcaucuacaacguggccaccugcggccuguucggccuggugagcuuccugcugcugugcggcagaagcugcagcaccaccuacaagggcguguacgagcugcagacccuggagcuggacauggccagccugaacaugugcaugccccugagcugcaccaagaacaacagccaccacuacaucauggugggcaacgagaccggccuggagcugacccugaccaacaccagcaucaucaaccacaaguucugcaaccugagcgacgcccacaagaagaaccuguacgaccacgcccugaugagcaucaucagcaccuuccaccugagcauccccaacuucaaccaguacgaggccaugagcugcgacuucaacggcggcaagaucagcgugcaguacaaccugagccacaccuacgccguggacgccgccaaccacugcggcaccaucgccaacggcgugcugcagaccuucaugagaauggccuggggcggcagcuacaucgcccuggacagcggcaagggcagcugggacugcaucaugaccagcuaccaguaccugaucauccagaacaccaccugggaggaccacugccaguucagcagacccagccccaucggcuaccugggccugcugagccagagaaccagagacaucuacaucagcagaagacugcugggcaccuucaccuggacccugagcgacagcgagggcaacgagacccccggcggcuacugccugaccagauggaugcugaucgaggccgagcugaagugcuucggcaacaccgccguggccaagugcaacgagaagcacgacgaggaguucugcgacaugcugagacuguucgacuucugcaagcaggccaucagaagacugaaggccgaggcccagaugagcauccagcugaucaacaaggccgugaacgcccugaucaacgaccagcugaucaugaagaaccaccugagagacaucaugggcauccccuacugcaacuacagcaaguacugguaccugaaccacaccgugaccggcagaaccagccugcccagaugcuggcuggugagcaacggcagcuaccugaacgagacccacuucagcgacgacaucgagcagcaggccgacaacaugaucaccgagcugcugcagaaggaguacaucgacagacagggcaagaccccccugggccugguggaccuguucguguucagcaccagcuucuaccugaucagcaucuuccugcaccuggugaagauccccacccacagacacaucaucggcaagcccugccccaagccccacagacugaaccacaugggcaucugcagcugcggccuguacaagcaccccggcgugcccgugaaguggaagagaugaggacuaguaauaaggaaacuguaugaaugucugugggcaggaagugaagagauccuucuguaaagguuuuuggaauuaugucugcugaauaauaaacuuuuuugaaauaauaaaucugguagaaaaaugagaucuaaaaaaaaaaaaaaaaaaaaaaaaaaaaaaaaaaaaaaaaaaaaaaaaaaaaaaaaaaaaaaaaaaaaaaaaaaaaaaaaaaaaaaaaaaaaaaaaaaaa

SEQ ID NO: 37785 - RNA, 1785 nt, Artificial Sequence
  mRNA product Design b-4 (A100) comprising derived and/or modified sequence from LASV(LASV254-NIG-2011;Clade II)__AIT17674__GPCmut10 (opt4)
aggagagucccgcagucggcguccagcggcucugcuuguucgugugugugucguugcaggccuuauucaagcuuaccaugggccagaucaucaccuucuuccaggaggugccccacgugaucgaggaggugaugaacaucgugcugaucgcccugagccugcuggccauccugaagggcaucuacaacguggccaccugcggccuguucggccuggugagcuuccugcugcugugcggcagaagcugcagcaccaccuacaagggcguguacgagcugcagacccuggagcuggacaugaccaaccugaacaugugcaugccccugagcugcaccaagaacaacagccaccacuacaucauggugggcaacgagaccggccuggagcugacccugaccaacaccagcaucaucaaccacaaguucugcaaccugagcgacgcccacaagaagaaccuguacaaccacgcccugaugagcaucaucagcaccuuccaccugagcauccccaacuucaaccaguacgaggccaugagcugcgacuucaacggcggcaagaucagcgugcaguacaaccugagccacagcuacgccguggacgccgccaaccacugcggcaccaucgccaacggcgugcugcagaccuucaugagaauggccuggggcggcagcuacaucgcccuggacagcggcaagggcaacugggacugcaucaugaccagcuaccaguaccugaucauccagaacaccaccugggaggaccacugccaguucagcagacccagccccaucggcuaccugggccugcugagccagagaaccagagacaucuacaucagcagaagacugcugggcaccuucaccuggacccugagcgacagcgagggcaacgagacccccggcggcuacugccugaccagauggaugcugaucgaggccgagcugaagugcuucggcaacaccgccguggccaagugcaacgagaagcacgacgaggaguucugcgacaugcugagacuguucgacuucugcaagcaggccaucagaagacugaagaccgaggcccaggccaacauccagcugaucaacaaggccgugaacgcccugaucaacgaccagcugaucaugaagaaccaccugagagacaucaugggcauccccuacugcaacuacagcaaguacugguaccugaaccacaccgugaccggcaagaccagccugcccagaugcuggcuggugagcaacggcagcuaccugaacgagacccacuucagcgacgacaucgagcagcaggccgacaacaugaucaccgagcugcugcagaaggaguacauggacagacagggcaagaccccccugggccugguggaccuguucguguucagcaccagcuucuaccugaucagcaucuuccugcaccuggugaagauccccacccacagacacgugaucggcaagcccugccccaagccccacagacugaaccacaugggcaucugcagcugcggccuguacaagcaccccggcgugcccgugaaguggaagagaugaggacuaguaauaaggaaacuguaugaaugucugugggcaggaagugaagagauccuucuguaaagguuuuuggaauuaugucugcugaauaauaaacuuuuuugaaauaauaaaucugguagaaaaaugagaucuaaaaaaaaaaaaaaaaaaaaaaaaaaaaaaaaaaaaaaaaaaaaaaaaaaaaaaaaaaaaaaaaaaaaaaaaaaaaaaaaaaaaaaaaaaaaaaaaaaaa

SEQ ID NO: 37786 - RNA, 1785 nt, Artificial Sequence
  mRNA product Design b-4 (A100) comprising derived and/or modified sequence from LASV(Nig08-A19;Clade III)__ADU56618__GPCmut10 (opt4)
aggagagucccgcagucggcguccagcggcucugcuuguucgugugugugucguugcaggccuuauucaagcuuaccaugggccagaucgugaccuucuuccaggaggugccccacgugaucgaggaggugaugaacaucgugcugaucgcccugagcauccuggccauccugaagggccuguacaacaucgccaccugcggccugaucggccuggugaccuuccugcugcugagcggcagaagcugcagcaugaccuacaagggcguguacgagcugcagacccuggagcugaacaugaacacccugaacaugugcaugccccugagcugcaccaagaacaacagccaccacuacaucauggugggcaacgagaccggccuggagcugacccugaccaacaccagccugcugcaccacaaguucugcaaccugagcgacgcccacaagaagaaccuguacgaccacacccugaugagcaucaucagcaccuuccaccugagcauccccaacuucaaccaguacgaggccaugagcugcgacuucaacggcggcaagaucaccgugcaguacaaccugagccacagcuacgccaucgacgccgccaaccacugcggcaccguggccaacggcgugcugcagaccuucaugagaauggccuggggcggcagcuacaucgcccuggacagcggcagaggcaagugggacugcaucaugaccagcuaccaguaccugaucauccagaacaccaccugggaggaccacugccaguucagcagacccagccccaucggcuaccugggccugcugagccagagaaccagagacaucuacaucagcagaagacugcugggcaccuucaccuggacccugagcgacagcgagggcaacgagacccccggcggcuacugccugaccagauggaugcugaucgaggccgagcugaagugcuucggcaacaccgccguggccaagugcaacgagaagcacgacgaggaguucugcgacaugcugagacuguucgacuucugcaagcaggccaucagaagacugaaggccgaggcccagaugagcauccagcugaucaacaaggccgugaacgcccugaucaacgaccagcugaucaugaagaaccaccugagagacaucaugggcauccccuacugcaacuacagcaaguacugguaccugaaccacaccagcaccggcagaaccagccugcccagaugcuggcuggugagcaacggcagcuaccugaacgagacccacuucagcgacgacaucgagcagcaggccgacaacaugaucaccgagaugcugcagaaggaguaccuggacagacagggcaagaccccccugggccugguggaccuguucguguucagcaccagcuucuaccugaucagcaucuuccugcaccuggugaagauccccacccacagacacaucgugggcaagcccugccccaagccccacagacugaaccacaugggcaucugcagcugcggccuguacaagcagcccggcgugcccgugagauggaagagaugaggacuaguaauaaggaaacuguaugaaugucugugggcaggaagugaagagauccuucuguaaagguuuuuggaauuaugucugcugaauaauaaacuuuuuugaaauaauaaaucugguagaaaaaugagaucuaaaaaaaaaaaaaaaaaaaaaaaaaaaaaaaaaaaaaaaaaaaaaaaaaaaaaaaaaaaaaaaaaaaaaaaaaaaaaaaaaaaaaaaaaaaaaaaaaaaa

SEQ ID NO: 37787 - RNA, 1788 nt, Artificial Sequence
  mRNA product Design b-4 (A100) comprising derived and/or modified sequence from LASV(G1180-SLE-2010;Clade IV)__AIT17168__GPCmut10 (opt4)
aggagagucccgcagucggcguccagcggcucugcuuguucgugugugugucguugcaggccuuauucaagcuuaccaugggccagaucgugaccuucuuccaggaggugccccacgugaucgaggaggugaugaacaucgugcugaucgcccugagcauccuggccgugcugaagggccuguacaacuucgccaccugcggccuggugggccugcugaccuuccugcugcugugcggcagaagcugcaccgccagcagauacaagggcguguacgagcugcagacccuggagcugaacauggagacccugaacaugugcaugccccugagcugcaccaagaacaacagccaccacuacaucauggugggcaacgagaccggccuggagcugacccugaccaacaccagcaucaucaaccacaaguucugcaaccugagcgacgcccacaagaagaaccuguacgaccacgcccugaugagcaucaucagcaccuuccaccugagcauccccaacuucaaccaguacgaggccaugagcugcgacuucaacggcggcaagaucagcgugcaguacaaccugagccacagcuacgccggcgacgccgccaaccacugcggcaccguggccaacggcgugcugcagaccuucaugagaauggccuggggcggcagcuacaucgcccuggacagcggccacggcagcugggacugcaucaugaccagcuaccaguaccugaucauccagaacaccaccugggaggaccacugccaguucagcagacccagccccaucggcuaccugggccugcugagccagagaaccagagacaucuacaucagcagaagacugcugggcaccuucaccuggacccugagcgacagcgagggcaaggacacccccggcggcuacugccugaccagauggaugcugaucgaggccgagcugaagugcuucggcaacaccgccguggccaagugcaacgagaagcacgacgaggaguucugcgacaugcugagacuguucgacuucugcaagcaggccauccagagacugaaggccgaggcccagaugagcauccagcugaucaacaaggccgugaacgcccugaucaacgaccagcugaucaugaagaaccaccugagagacaucaugggcauccccuacugcaacuacagcaaguacugguaccugaaccacaccaccaccggcaagaccagccugcccaagugcuggcuggugagcaacggcagcuaccugaacgagacccacuucagcgacgacaucgagcagcaggccgacaacaugaucaccgagaugcugcagaaggaguacauggagagacagggcaagaccccccugggccugguggaccuguucguguucagcaccagcuucuaccugaucagcaucuuccugcaccuggugaagauccccacccacagacacaucgugggcaagagcugccccaagccccacagacugaaccacaugggcaucugcagcugcggccuguacaagcagcccggcgugcccgugaaguggaagagaugaggacuaguaauaaggaaacuguaugaaugucugugggcaggaagugaagagauccuucuguaaagguuuuuggaauuaugucugcugaauaauaaacuuuuuugaaauaauaaaucugguagaaaaaugagaucuaaaaaaaaaaaaaaaaaaaaaaaaaaaaaaaaaaaaaaaaaaaaaaaaaaaaaaaaaaaaaaaaaaaaaaaaaaaaaaaaaaaaaaaaaaaaaaaaaaaa

SEQ ID NO: 37788 - RNA, 1788 nt, Artificial Sequence
  mRNA product Design b-4 (A100) comprising derived and/or modified sequence from LASV(G1442-SLE-2011;Clade IV)__AIT17180__GPCmut10 (opt4)
aggagagucccgcagucggcguccagcggcucugcuuguucgugugugugucguugcaggccuuauucaagcuuaccaugggccagaucgugaccuucuuccaggaggugccccacgugaucgaggaggugaugaacaucgugcugaucgcccugagcauccuggccgugcugaagggccuguacaacguggccaccugcggccugaucggccuggugaccuuccugcugcugugcggcagaagcugcaccaccacccuguacaagggcguguacgagcugcagacccuggagcugaacauggagacccugaacaugugcaugccccugagcugcaccaagaacaacagccaccacuacaucagagugggcaacgagaccggccuggagcugacccugaccaacaccagcaucaucaaccacaaguucugcaaccugagcgacgcccacaagaagaaccuguacgaccacgcccugaugagcaucaucagcaccuuccaccugagcauccccaacuucaaccaguacgaggccaugagcugcgacuucaacggcggcaagaucagcgugcaguacaaccugagccacagcuacgccggcgacgccgccaaccacugcggcaccguggccaacggcgugcugcagaccuucaugagaauggccuggggcggcagcuacaucgcccuggacagcggcagaggcaacugggacugcaucaugaccagcuaccaguaccugaucauccagaacaccaccugggacgaccacugccaguucagcagacccagccccaucggcuaccugggccugcugagccagagaaccagagacguguacaucagcagaagacugcugggcaccuucaccuggacccugagcgacagcgagggcaaggacacccccggcggcuacugccugaccagauggaugcugaucgaggccgagcugaagugcuucggcaacaccgccguggccaagugcaacgagaagcacgacgaggaguucugcgacaugcugagacuguucgacuucugcaagcaggccauccagagacugaaggccgaggcccagaugagcauccagcugaucaacaaggccgugaacgcccugaucaacgaccagcugaucaugaagaaccaccugagagacaucaugggcauccccuacugcaacuacagcaaguacugguaccugaacaacaccgccaccggcaagaccagccugcccaagugcuggcugaucagcaacggcagcuaccugaacgagacccacuucagcgacgacaucgagcaggaggccgacaacaugaucaccgagaugcugcagaaggaguacauggagagacagggcaagaccccccugggccugguggaccuguucguguucagcaccagcuucuaccugaucagcaucuuccugcaccuggugaagauccccacccacagacacaucgugggcaagagcugccccaagccccacagacugaaccacaugggcaucugcagcugcggccuguacaagcagcccggcgugcccgugagauggaagagaugaggacuaguaauaaggaaacuguaugaaugucugugggcaggaagugaagagauccuucuguaaagguuuuuggaauuaugucugcugaauaauaaacuuuuuugaaauaauaaaucugguagaaaaaugagaucuaaaaaaaaaaaaaaaaaaaaaaaaaaaaaaaaaaaaaaaaaaaaaaaaaaaaaaaaaaaaaaaaaaaaaaaaaaaaaaaaaaaaaaaaaaaaaaaaaaaa

SEQ ID NO: 37789 - RNA, 1788 nt, Artificial Sequence
  mRNA product Design b-4 (A100) comprising derived and/or modified sequence from LASV(G3010-SLE-2013;Clade IV)__AIT17344__GPCmut10 (opt4)
aggagagucccgcagucggcguccagcggcucugcuuguucgugugugugucguugcaggccuuauucaagcuuaccaugggccagaucgugaccuucuuccaggaggugccccacgugaucgaggaggugaugaacaucgugcugaucgcccugagcauccuggccgugcugaagggccuguacaacuucgccaccugcggccuggugggccuggugaccuuccugcugcugugcggcagaagcugcaccaccagccuguacaagggcguguacgagcugcagacccuggagcugaacauggagacccugaacaugugcaugccccugagcugcaccaagaacaacagccaccacuacaucauggugggcaacgagaccggccuggagcugacccugaccaacaccagcaucaucaaccacaaguucugcaaccugagcgacgcccacaagaagaaccuguacaaccacgcccugaugagcaucaucagcaccuuccaccugagcauccccaacuucaaccaguacgaggccaugagcugcgacuucaacggcggcaagaucagcgugcaguacaaccugagccacagcuacgccggcgacgccgccagccacugcggcaccguggccaacggcgugcugcagaccuucaugagaauggccuggggcggcagcuacaucgcccuggacagcggcuacggcaagugggacugcaucaugaccagcuaccaguaccugaucauccagaacaccaccugggaggaccacugccaguucagcagacccagccccaucggcuaccugggccugcugagccagagaaccagagacaucuacaucagcagaagacugcugggcaccuucaccuggacccugagcgacagcgagggcaaggacacccccggcggcuacugccugaccagauggaugcugaucgaggccgagcugaagugcuucggcaacaccgccguggccaagugcaacgagaagcacgacgaggaguucugcgacaugcugagacuguucgacuucugcaagcaggccauccagagacugaagaccgaggcccagaugagcauccagcugaucaacaaggccgugaacgcccugaucaacgaccagcugaucaugaagaaccaccugagagacaucaugggcauccccuacugcaacuacagcaaguacugguaccugaaccacaccaccaccggcaagaccagccugcccaagugcuggcuggugagcaacggcagcuaccugaacgagacccacuucagcgacgacaucgagcagcaggccgacaacaugaucaccgagaugcugcagaaggaguacauggagagacagggcaagaccccccugggccugguggaccuguucguguucagcaccagcuucuaccugaucagcaucuuccugcaccuggugaagauccccacccacagacacaucgugggcaagagcugccccaagccccacagacugaaccacaugggcaucugcagcugcggccuguacaagcagcccggcgugcccgugagauggaagagaugaggacuaguaauaaggaaacuguaugaaugucugugggcaggaagugaagagauccuucuguaaagguuuuuggaauuaugucugcugaauaauaaacuuuuuugaaauaauaaaucugguagaaaaaugagaucuaaaaaaaaaaaaaaaaaaaaaaaaaaaaaaaaaaaaaaaaaaaaaaaaaaaaaaaaaaaaaaaaaaaaaaaaaaaaaaaaaaaaaaaaaaaaaaaaaaaa

SEQ ID NO: 37790 - RNA, 1788 nt, Artificial Sequence
  mRNA product Design b-4 (A100) comprising derived and/or modified sequence from LASV(G502-SLE-2009;Clade IV)__AIT17126__GPCmut10 (opt4)
aggagagucccgcagucggcguccagcggcucugcuuguucgugugugugucguugcaggccuuauucaagcuuaccaugggccagaucgugaccuucuuccaggaggugccccacgugaucgaggaggugaugaacaucgugcugaucgcccugagcauccuggccgugcugaagggccuguacaacuucgccaccugcggccuggugggccugcugaccuuccugcugcugugcggcagaagcugcaccaccggccuguacaagggcguguacgagcugcagacccuggagcugaacauggagacccugaacaugugcaugccccugagcugcaccaagaacaacagccaccacuacaucauggugggcaacgagaccggccuggagcugacccugaccaacaccagcaucaucaaccacaaguucugcaaccugagcgacgcccacaagaagaaccuguacgaccacgcccugaugagcaucaucagcaccuuccaccugagcauccccaacuucaaccaguacgaggccaugagcugcgacuucaacggcggcaagaucagcgugcaguacaaccugagccacagcuacgccggcgacgccgccgaccacugcggcaccguggccaacggcgugcugcagaccuucaugagaauggccuggggcggcagcuacaucgcccuggacagcggcagaggcagaugggacugcaucaugaccagcuaccaguaccugaucauccagaacaccaccugggaggaccacugccaguucagcagacccagccccaucggcuaccugggccugcugagccagagaaccagagacaucuacaucagcagaagacugcugggcaccuucaccuggacccugagcgacagcgagggcaaggacacccccggcggcuacugccugaccagauggaugcugaucgaggccgagcugaagugcuucggcaacaccgccguggccaagugcaacgagaagcacgacgaggaguucugcgacaugcugagacuguucgacuucugcaagcaggccauccagagacugaaggccgaggcccagaugagcauccagcugaucaacaaggccgugaacgcccugaucaacgaccagcuggugaugaagaaccaccugagagacaucaugggcauccccuacugcaacuacagcagauacugguaccugaaccacaccaccaccggcagaaccagccugcccaagugcuggcuggugagcaacggcagcuaccugaacgagacccacuucagcgacgacaucgagcagcaggccgacaacaugaucaccgagaugcugcagaaggaguacauggagagacagggcaagaccccccugggccugguggaccuguucguguucagcaccagcuucuaccugaucagcaucuuccugcaccuggugaagauccccacccacagacacaucgugggcaagagcugccccaagccccacagacugaaccacaugggcaucugcagcugcggccuguacaagcagcccggcgugcccgugaaguggaagagaugaggacuaguaauaaggaaacuguaugaaugucugugggcaggaagugaagagauccuucuguaaagguuuuuggaauuaugucugcugaauaauaaacuuuuuugaaauaauaaaucugguagaaaaaugagaucuaaaaaaaaaaaaaaaaaaaaaaaaaaaaaaaaaaaaaaaaaaaaaaaaaaaaaaaaaaaaaaaaaaaaaaaaaaaaaaaaaaaaaaaaaaaaaaaaaaaa

SEQ ID NO: 37791 - RNA, 1788 nt, Artificial Sequence
  mRNA product Design b-4 (A100) comprising derived and/or modified sequence from LASV(G733-SLE-2010;Clade IV)__AIT17154__GPCmut10 (opt4)
aggagagucccgcagucggcguccagcggcucugcuuguucgugugugugucguugcaggccuuauucaagcuuaccaugggccagaucgugaccuucuuccaggaggugccccacgugaucgaggaggugaugaacaucgugcugaucgcccugagcauccuggccgugcugaagggccuguacaacuucgccaccugcggcaucgugggccuggugagcuuccugcugcugugcggcagaagcugcaccaccagccuguacaagggcguguacgagcugcagacccuggagcugaacauggagacccugaacaugugcaugccccugagcugcaccaagaacaacagccaccacuacaucauggugggcaacgagaccggccuggagcugacccugaccaacaccagcaucaucaaccacaaguucugcaaccugagcgacgcccacaagaagaaccuguacgaccacgcccugaugagcaucaucagcaccuuccaccugagcauccccaacuucaaccaguacgaggccaugagcugcgacuucaacggcggcaagaucagcgugcaguacaaccugagccacagcuacgccggcgacgccgccaaccacugcggcaccaucgccaacggcgugcugcagaccuucaugagaauggccuggggcggcagcuacaucgcccuggacagcggcagagacagaugggacugcaucaugaccagcuaccaguaccugaucauccagaacaccaccugggaggaccacugccaguucagcagacccagccccaucggcuaccugggccugcugagccagagaaccagagacaucuacaucagcagaagacugcugggcaccuucaccuggacccugagcgacagcgagggcaaggacacccccggcggcuacugccugaccagauggaugcugaucgaggccgagcugaagugcuucggcaacaccgccguggccaagugcaacgagaagcacgacgaggaguucugcgacaugcugagacuguucgacuucugcaagcaggccauccagagacugaaggccgaggcccagaugagcauccagcugaucaacaaggccgugaacgcccugaucaacgaccagcugaucaugaagaaccaccugagagacaucaugggcauccccuacugcaacuacagcaaguacugguaccugaaccacaccaccaccggcaagaccagccugcccaagugcuggcuggugagcaacggcagcuaccugaacgagacccacuucagcgacgacaucgagcagcaggccgacaacaugaucaccgagaugcugcagaaggaguacauggagagacagggcaagaccccccugggccugguggaccuguucguguucagcaccagcuucuaccugaucagcaucuuccugcaccuggugaagauccccacccacagacacguggugggcaagagcugccccaagccccacagacugaaccacaugggcaucugcagcugcggccuguacggccagcccggcgugcccgugaaguggaagagaugaggacuaguaauaaggaaacuguaugaaugucugugggcaggaagugaagagauccuucuguaaagguuuuuggaauuaugucugcugaauaauaaacuuuuuugaaauaauaaaucugguagaaaaaugagaucuaaaaaaaaaaaaaaaaaaaaaaaaaaaaaaaaaaaaaaaaaaaaaaaaaaaaaaaaaaaaaaaaaaaaaaaaaaaaaaaaaaaaaaaaaaaaaaaaaaaa

SEQ ID NO: 37792 - RNA, 1788 nt, Artificial Sequence
  mRNA product Design b-4 (A100) comprising derived and/or modified sequence from MOPV/LASV reassortant(IGS-1;Clade IV)__AFY05576__GPCmut10 (opt4)
aggagagucccgcagucggcguccagcggcucugcuuguucgugugugugucguugcaggccuuauucaagcuuaccaugggccagaucgugaccuucuuccaggaggugccccacgugaucgaggaggugaugaacaucgugcugaucgcccugagcgugcuggccgugcugaagggccuguacaacuucgccaccugcggccuggugggccuggugaccuuccugcugcugugcggcagaagcugcaccaccagccuguacaagggcguguacgagcugcagacccuggagcugaacauggagacccugaacaugugcaugccccugagcugcaccaagaacaacagccaccacuacaucauggugggcaacgagaccggccuggagcugacccugaccaacaccagcaucaucaaccacaaguucugcaaccugagcgacgcccacaagaagaaccuguacgaccacgcccugaugagcaucaucagcaccuuccaccugagcauccccaacuucaaccaguacgaggccaugagcugcgacuucaacggcggcaagaucagcgugcaguacaaccugagccacagcuacgccggcgacgccgccaaccacugcggcaccguggccaacggcgugcugcagaccuucaugagaauggccuggggcggcagcuacaucgcccuggacagcggcagaggcaacugggacugcaucaugaccagcuaccaguaccugaucauccagaacaccaccugggaggaccacugccaguucagcagacccagccccaucggcuaccugggccugcugagccagagaaccagagacaucuacaucagcagaagacugcugggcaccuucaccuggacccugagcgacagcgagggcgaggacacccccggcggcuacugccugaccagauggaugcugaucgaggccgagcugaagugcuucggcaacaccgccguggccaagugcaacgagaagcacgacgaggaguucugcgacaugcugagacuguucgacuucugcaagcaggccauccagagacugaaggccgaggcccagaugagcauccagcugaucaacaaggccgugaacgcccugaucaacgaccagcugaucaugaagaaccaccugagagacaucaugggcauccccuacugcaacuacagcaaguacugguaccugaaccacaccaccaccggcagaaccagccugcccaagugcuggcuggugagcaacggcagcuaccugaacgagacccacuucagcgacgacaucgagcagcaggccgacaacaugaucaccgagaugcugcagaaggaguacauggagagacagggcaagaccccccugggccugguggaccuguucguguucagcaccagcuucuaccugaucagcaucuuccugcaccuggugaagauccccacccacagacacaucgugggcaagagcugccccaagccccacagacugaaccacaugggcaucugcagcugcggccuguacaagcagcccggcgugcccgugaaguggaagagaugaggacuaguaauaaggaaacuguaugaaugucugugggcaggaagugaagagauccuucuguaaagguuuuuggaauuaugucugcugaauaauaaacuuuuuugaaauaauaaaucugguagaaaaaugagaucuaaaaaaaaaaaaaaaaaaaaaaaaaaaaaaaaaaaaaaaaaaaaaaaaaaaaaaaaaaaaaaaaaaaaaaaaaaaaaaaaaaaaaaaaaaaaaaaaaaaa

SEQ ID NO: 37793 - RNA, 1788 nt, Artificial Sequence
  mRNA product Design b-4 (A100) comprising derived and/or modified sequence from LASV(LM765-SLE-2012;Clade IV)__AIT17814__GPCmut10 (opt4)
aggagagucccgcagucggcguccagcggcucugcuuguucgugugugugucguugcaggccuuauucaagcuuaccaugggccagaucgugaccuucuuccaggaggugccccacgugaucgaggaggugaugaacaucgugcugaucgcccugagcauccuggccgugcugaagggccuguacaacuucgccaccugcggccuggugggccuggugaccuuccugcugcugugcggcagaagcugcaccaccagccuguacaagggcguguacgagcugcagacccuggagcugaacauggagacccugaacaugugcaugccccugagcugcaccaagaacaacagccaccacuacaucauggugggcaacgagaccggccuggagcugacccugaccaacaccagcaucaucgaccacaaguucugcaaccugagcgacgcccacagaaagaaccuguacgaccacgcccugaugagcaucaucagcaccuuccaccugagcauccccaacuucaaccaguacgaggccaugagcugcgacuucaacggcggcaagaucagcgugcaguacaaccugagccacagcuacgccaaggacgccgccgaccacugcggcaccguggccaacggcgugcugcagaccuucaugagaauggccuggggcggcagcuacaucgcccuggacagcggcagaggcagaugggacugcaucaugaccagcuaccaguaccugaucauccagaacaccaccugggaggaccacugccaguucagcagacccagccccaucggcuaccugggccugcugagccagagaaccagagacaucuacaucagcagaagacugcugggcaccuucaccuggacccugagcgacagcgagggcaaggacacccccggcggcuacugccugaccagauggaugcugaucgaggccgagcugaagugcuucggcaacaccgccguggccaagugcaacgagaagcacgacgaggaguucugcgacaugcugagacuguucgacuucugcaagcaggccauccagagacugaaggccgaggcccagaugagcauccagcugaucaacaaggccgugaacgcccugaucaacgaccagcugaucaugaagaaccaccugagagacaucaugggcauccccuacugcaacuacagcaaguacugguaccugaaccacaccaccaccggcaagaccagccugcccaagugcuggcuggugagcaacggcagcuaccugaacgagacccacuucagcgacgacaucgagcagcaggccgacaacaugaucaccgagaugcugcagaaggaguacauggagagacagggcaagaccccccugggccugguggaccuguucguguucagcaccagcuucuaccugaucagcaucuuccugcaccuggugaagauccccacccacagacacaucgugggcaagcccugccccaagccccacagacugaaccacaugggcaucugcagcugcggccuguacaagcagcccggcgugcccgugaaguggaagagaugaggacuaguaauaaggaaacuguaugaaugucugugggcaggaagugaagagauccuucuguaaagguuuuuggaauuaugucugcugaauaauaaacuuuuuugaaauaauaaaucugguagaaaaaugagaucuaaaaaaaaaaaaaaaaaaaaaaaaaaaaaaaaaaaaaaaaaaaaaaaaaaaaaaaaaaaaaaaaaaaaaaaaaaaaaaaaaaaaaaaaaaaaaaaaaaaa

SEQ ID NO: 37794 - RNA, 1788 nt, Artificial Sequence
  mRNA product Design b-4 (A100) comprising derived and/or modified sequence from LASV(LM776-SLE-2012;Clade IV)__AIT17824__GPCmut10 (opt4)
aggagagucccgcagucggcguccagcggcucugcuuguucgugugugugucguugcaggccuuauucaagcuuaccaugggccagaucgugaccuucuuccaggaggugccccacgugaucgaggaggugaugaacaucgugcugaucgcccugagcauccuggccgugcugaagggccuguacaacuucgccaccugcggccuggugggccuggugaccuuccugcugcugugcggcagaagcugcaccaccagcguguacaagggcguguacgagcugcagacccuggagcugaacauggagacccugaacaugugcaugccccugagcugcaccaagaacaacagccaccacuacaucauggugggcaacgagaccggccuggagcugacccugaccaacaccagcaucaucaaccacaaguucugcaaccugagcgacgcccacaagaagaaccuguacgaccacgcccugaugagcaucaucagcaccuuccaccugagcauccccaacuucaaccaguacgaggccaugagcugcgacuucaacggcggcaagaucagcgugcaguacaaccugagccacagcuacgccggcgacgccgccaaccacugcggcaccguggccaacggcgugcugcagaccuucaugagaauggccuggggcggcagcuacaucgcccuggacagcggccacggcaagugggacugcaucaugaccagcuaccaguaccugaucauccagaacaccaccugggaggaccacugccaguucagcagacccagccccaucggcuaccugggccugcugagccagagaaccagagacaucuacaucagcagaagacugcugggcaccuucaccuggacccugagcgacagcgagggcaaggacacccccggcggcuacugccugaccagauggaugcugaucgaggccgagcugaagugcuucggcaacaccgccguggccaagugcaacgagaagcacgacgaggaguucugcgacaugcugagacuguucgacuucugcaagcaggccauccagagacugaaggccgaggcccagaugagcauccagcugaucaacaaggccgugaacgcccugaucaacgaccagcugaucaugaagaaccaccugagagacaucaugggcauccccuacugcaacuacagcaaguacugguaccugaaccacaccaccaccggcaagaccagccugcccaagugcuggcuggugagcaacggcagcuaccugaacgagacccacuucagcgacgacaucgagcagcaggccgacaacaugaucaccgagaugcugcagaaggaguacauggagagacagggcaagaccccccugggccugguggaccuguucguguucagcaccagcuucuaccugaucagcaucuuccugcaccuggugaagauccccacccacagacacaucgugggcaagagcugccccaagccccacagacugaaccacaugggcaucugcagcugcggccuguacaagcagcccggcgugcccgugagauggaagagaugaggacuaguaauaaggaaacuguaugaaugucugugggcaggaagugaagagauccuucuguaaagguuuuuggaauuaugucugcugaauaauaaacuuuuuugaaauaauaaaucugguagaaaaaugagaucuaaaaaaaaaaaaaaaaaaaaaaaaaaaaaaaaaaaaaaaaaaaaaaaaaaaaaaaaaaaaaaaaaaaaaaaaaaaaaaaaaaaaaaaaaaaaaaaaaaaa

SEQ ID NO: 37795 - RNA, 1788 nt, Artificial Sequence
  mRNA product Design b-4 (A100) comprising derived and/or modified sequence from LASV(Mad39;Clade IV)__ANH09722__GPCmut10 (opt4)
aggagagucccgcagucggcguccagcggcucugcuuguucgugugugugucguugcaggccuuauucaagcuuaccaugggccagaucgugaccuucuuccaggaggugccccacgugaucgaggaggugaugaacaucgugcugaucgcccugagcauccuggccgugcugaagggccuguacaacguggccaccugcggccugaucggccuggugaccuuccugcugcugugcggcagaagcugcaccaccacccuguacaagggcguguacgagcugcaggcccuggagcugaacauggagacccugaacaugugcaugccccugagcugcaccaagaacaacagccaccacuacaucagagugggcaacgagaccggccuggagcugacccugaccaacaccagccugaucaaccacaaguucugcaaccugagcgacgcccacaagaagaaccuguacgaccacgcccugaugagcaucaucagcaccuuccaccugagcauccccaacuucaaccaguacgaggccaugagcugcgacuucaacgacggcaagaucagcgugcaguacaaccugagccacaccuacgccggcgacaccgccaaccacugcggcaccguggccaacggcgugcugcagaccuucaugagaauggccuggggcggcagcuacaucgcccuggacagcggcagaggcggcugggacugcaucaugaccagcuaccaguaccugaucauccagaacaccaccugggaggaccacugccaguucagcagacccagccccaucggcuaccugggccugcugagccagagaaccagagacaucuacaucagcagaagacugcugggcaccuucaccuggacccugagcgacagcgagggcaaggacacccccggcggcuacugccugaccagauggaugcugaucgaggccgagcugaagugcuucggcaacaccgccguggccaagugcaacgagaagcacgacgaggaguucugcgacaugcugagacuguucgacuucugcaagcaggccauccagagacugaaggccgaggcccagaugagcauccagcugaucaacaaggccgugaacgcccugaucaacgaccagcugaucaugaagaaccaccugagagacaucaugggcauccccuacugcaacuacagcaaguacugguaccugaaccacaccgugaccggcaagaccagccugcccaagugcuggcuggugagcaacggcagcuaccugaacgagacccacuucagcgacgacaucgagcagcaggccgacaacaugaucaccgagaugcugcagaaggaguacauggagagacagggcaagaccccccugggccugguggaccuguucguguucagcaccagcuucuaccugaucagcaucuuccugcaccuggugaagauccccacccacagacacguggugggcaagcccugccccaagccccacagacugaaccacaugggcaucugcagcugcggcuucuacaagcagcccggcgugcccgugagauggaagagaugaggacuaguaauaaggaaacuguaugaaugucugugggcaggaagugaagagauccuucuguaaagguuuuuggaauuaugucugcugaauaauaaacuuuuuugaaauaauaaaucugguagaaaaaugagaucuaaaaaaaaaaaaaaaaaaaaaaaaaaaaaaaaaaaaaaaaaaaaaaaaaaaaaaaaaaaaaaaaaaaaaaaaaaaaaaaaaaaaaaaaaaaaaaaaaaaa

SEQ ID NO: 37796 - RNA, 1788 nt, Artificial Sequence
  mRNA product Design b-4 (A100) comprising derived and/or modified sequence from LASV(Z0947-SLE-2011;Clade IV)__AIT17840__GPCmut10 (opt4)
aggagagucccgcagucggcguccagcggcucugcuuguucgugugugugucguugcaggccuuauucaagcuuaccaugggccagaucgugaccuucuuccaggaggugccccacgugaucgaggaggugaugaacaucgugcugaucgcccugagcauccuggccgugcugaagggccuguacaacuucgccaccugcggccuggugggccuggugaccuuccugcugcugugcggcagaagcugcaccaucagccuguacaagggcguguacgagcugcagacccuggagcugaacauggagacccugaacaugugcaugccccugagcugcaccaagaacaacagccaccacuacaucauggugggcaacgagaccggccuggagcugacccugaccaacaccagcaucaucaaccacaaguucugcaaccugagcgacgcccacaagaagaaccuguacgaccacgcccugaugagcaucaucagcaccuuccaccugagcauccccaacuucaaccaguacgaggccaugagcugcgacuucaacggcggcaagaucagcgugcaguacaaccugagccacagcuacgccggcgacgccgccaaccacugcggcaccguggccaacggcgugcugcagaccuucaugagaauggccuggggcggcagcuacaucgcccuggacagcggcagagacagaugggacugcaucaugaccagcuaccaguaccugaucauccagaacaccaccugggaggaccacugccaguucagcagacccagccccaucggcuaccugggccugcugagccagagaaccagagacaucuacaucagcagaagacugcugggcaccuucaccuggacccugagcgacagcgagggcaaggacacccccggcggcuacugccugaccagauggaugcugaucgaggccgagcugaagugcuucggcaacaccgccguggccaagugcaacgagaagcacgacgaggaguucugcgacaugcugagacuguucgacuucugcaagcaggccauccagagacugaaggccgaggcccagaugagcauccagcugaucaacaaggccgugaacgcccugaucaacgaccagcugaucaugaagaaccaccugagagacaucaugggcauccccuacugcaacuacagcaaguacugguaccugaaccacaccaccaccggcaagaccagccugcccaagugcuggcuggugagcaacggcagcuaccugaacgagacccacuucagcgacgacaucgagcagcaggccgacaacaugaucaccgagaugcugcagaaggaguacauggagagacagggcaagaccccccugggccugguggaccuguucguguucagcaccagcuucuaccugaucagcaucuuccugcaccuggugaagauccccacccacagacacaucgugggcaagcccugccccaagccccacagacugaaccacaugggcaucugcagcugcggccuguacaagcagcccggcgugcccgugaaguggaagagaugaggacuaguaauaaggaaacuguaugaaugucugugggcaggaagugaagagauccuucuguaaagguuuuuggaauuaugucugcugaauaauaaacuuuuuugaaauaauaaaucugguagaaaaaugagaucuaaaaaaaaaaaaaaaaaaaaaaaaaaaaaaaaaaaaaaaaaaaaaaaaaaaaaaaaaaaaaaaaaaaaaaaaaaaaaaaaaaaaaaaaaaaaaaaaaaaa

SEQ ID NO: 37797 - RNA, 1788 nt, Artificial Sequence
  mRNA product Design b-4 (A100) comprising derived and/or modified sequence from LASV(Josiah;Clade IV)__NP_694870__GPCmut10 (opt5)
aggagagucccgcagucggcguccagcggcucugcuuguucgugugugugucguugcaggccuuauucaagcuuaccaugggccagaucgugaccuucuuucaagaggucccccacguuauugaagaggugaugaacaucgugcugauugcccucagcguccuggcugugcuuaaggggcuguacaauuucgccacaugcggacucguuggccuggugacguuucuucugcucugugggagauccugcaccacaucucuguauaaaggagucuacgaacugcagacccucgagcugaacauggaaacacuuaauauguguaugccucugagcugcaccaagaacaauucccaucacuauaucauggugggcaacgagacagggcucgagcugacccuuacgaauaccucuauuaucaaccauaaauucuguaaucugagcgacgcgcacaagaaaaaccucuacgaucaugcucugauguccaucauuucuacauuucaccugagcaucccgaauuucaaccaguaugaagccauguccugcgacuuuaauggaggcaagauuagcguucaguacaaccucucucacuccuaugccggcgaugcugccaaucauugugggaccguggcuaacggaguccugcaaacauucaugcggauggccuggggcgggagcuacaucgcgcuugacucuggacgcggcaacugggauugcauuaugaccuccuaccaguaucugaucauucagaauacgacaugggaggaccacugucaguuuagcagacccucuccuaucggguaccucggacugcuuucccaacggacccgcgauaucuauauuagcagacggcugcucggcacauucaccuggacccuguccgacucugaaggcaaggauacacccgggggauacugccugacgcgcuggaugcucaucgaggccgagcugaaauguuuuggcaacaccgcuguggccaagugcaaugaaaaacaugacgaggaguucugcgauaugcuuagacuguuugacuucuguaagcaggcuauucagcggcucaaagccgaagcgcagaugagcauccaacugauuaacaaggccgugaaugcucuuaucaacgaucagcugaucaugaagaaucaccuccgcgacauuauggggaucccuuauugcaacuacuccaaauauugguaccugaaucacacaaccacaggaagaaccagccugcccaaguguuggcucgucucuaacggcuccuaccugaaugaaacgcauuucagcgacgauauugagcagcaagccgacaacaugaucacagagaugcuucagaaagaauauauggagcggcaggggaagaccccucugggacucguugaucuguuuguguucucuaccagcuuuuaccugauuuccaucuuccuucaccucgugaaaaucccgacacaucgccacauugucggcaagucuugccccaaaccucauagacugaaucacaugggcaucuguagcugcgggcuguauaagcagcccggagugccuguuaaguggaaacggugaggacuaguaauaaggaaacuguaugaaugucugugggcaggaagugaagagauccuucuguaaagguuuuuggaauuaugucugcugaauaauaaacuuuuuugaaauaauaaaucugguagaaaaaugagaucuaaaaaaaaaaaaaaaaaaaaaaaaaaaaaaaaaaaaaaaaaaaaaaaaaaaaaaaaaaaaaaaaaaaaaaaaaaaaaaaaaaaaaaaaaaaaaaaaaaaa

SEQ ID NO: 37798 - RNA, 1785 nt, Artificial Sequence
  mRNA product Design b-4 (A100) comprising derived and/or modified sequence from LASV(LP;Clade I)__AAF86701__GPCmut10 (opt5)
aggagagucccgcagucggcguccagcggcucugcuuguucgugugugugucguugcaggccuuauucaagcuuaccaugggccagaucauuaccuucuuucaagaggugccccacgucaucgaagagguuaugaacauugugcugaucgcccucagccugcuugcuauucugaaggggcucuacaauaucgccacaugcggaaucauuggccugguggcguuccuuuuucugugugggaaauccugcucucucacgcugaagggaggcuaugaacugcagacccucgagcugaacauggaaacacuuaauauguguaugccucugagcugcaccaaaaacuccucucaucacuacaucagagucgggaaugagacaggacucgagcugacccuuacaaacaccagcauuaucaaucauaaguucuguaaccuguccgacgcucacaaaaagaaucucuaugaucaugcccugaugucuauuaucagcacguuucaccuguccauuccgaacuucaaucaguacgaagccaugagcugcgacuuuaacggcggcaagaucucugugcaguauaaucucucccacagcuacgcuggggaugccgcugagcauuguggaaccguugccaacggcgugcugcaaacauucaugcggauggcguggggagggcgcuauaucgcccuugacucuggcaaagggaauugggauugcauuaugaccuccuaccaguaccugaucauucagaacacaaccugggaagaccacugucaguuuagcagacccucuccuaucggauaucucggccugcuuucccaacggacgcgcgauauuuacaucagcagacggcugcucggcacauucaccuggacacuguccgacucugaggggaacgagacccccggaggcuauugccugacccgcuggaugcucaucgaagcugagcugaaguguuuugggaauacagccgucgcuaaaugcaacgaaaagcaugaugaggaguucugcgacaugcuuagacuguuugauuucuguaaacaggccauucggcgccucaaggcggaagcccagaugagcauccagcugauuaauaaggcugugaacgcccuuaucaaugaccaacugauuaugaaaaaccaccucagagauaucaugggaaucccuuacugcaauuauuccaaguacugguaucugaaccacacgagcucuggccggaccucccugcccaaauguuggcucauuagcaaugggucuuaccugaacgagacacaguucagcgacgacaucgaacagcaagcugauaauaugauuaccgagaugcuucagaaggaauacaucgagcgccagggaaaaacaccucugggccucguugacauuuuuaucuucuccaccucuuuuuaucugauuagcaucuuccugcaucuuaucaagauuccgacgcacagacauaucgugggcaaacccugcccuaagccccaccggcucaaccauaugggggucuguuccugcggacuguacaagcacccuggcgugcccacaaaauggaagcgcugaggacuaguaauaaggaaacuguaugaaugucugugggcaggaagugaagagauccuucuguaaagguuuuuggaauuaugucugcugaauaauaaacuuuuuugaaauaauaaaucugguagaaaaaugagaucuaaaaaaaaaaaaaaaaaaaaaaaaaaaaaaaaaaaaaaaaaaaaaaaaaaaaaaaaaaaaaaaaaaaaaaaaaaaaaaaaaaaaaaaaaaaaaaaaaaaa

SEQ ID NO: 37799 - RNA, 1785 nt, Artificial Sequence
  mRNA product Design b-4 (A100) comprising derived and/or modified sequence from LASV(803213;Clade II)__AAF86703__GPCmut10 (opt5)
aggagagucccgcagucggcguccagcggcucugcuuguucgugugugugucguugcaggccuuauucaagcuuaccaugggccagaucauuaccuucuuucaagaggugccccacgucaucgaagagguuaugaacauugugcugaucgcccucagccugcuugcuauucugaaggggaucuacaauguggccacaugcggacucuucggccugaucuccuuucuucugcucugugggagaucuugcagcgucacguauaaaggaguguacgaacugcagacccuggagcucaacauggcgaaucugaacauguguaugccucuuuccugcacaaagaauaacucucaucacuauauuaugguuggcaaugaaaccgggcuggagcucacacugaccaacacaagcaucauuaaucauaaauucuguaaccuuuccgacgcucacaagaaaaaucuguacgaucaugcccucaugucuaucauuagcaccuuucaccuguccaucccgaacuucaaucaguaugaggccaugagcugcgacuuuaacggaggcaagauuucugugcaguacaaucugucccacagcuucgcugucgaugccgcuaaccauuguggcacgaucgccaacggggugcuccaaaccuuuaugcggauggcguggggaggcucuuauaucgcccuggacuccgggaagggaaauugggauugcauuaugacaagcuaccaguaccuuaucauucagaacaccacaugggaagaccacugucaguucucucgccccuccccuaucggcuaucuggggcuccugagccaaagaacccgggauauuuacaucucccgcagacuucugggaacguuuacauggacccucucugacagcgagggcaaugaagcucccggcggguauugccugacacgguggaugcugaucgaggccgagcucaaauguuucggaaacaccgcuguugccaagugcaaugaaaaacaugaugaggaauuuugcgacaugcugcgccuuuucgauuucuguaagcaggcgauuaaaagacugaagaccgaggcccagauguccauccagcucauuaacaaggcugugaaugcccugaucaacgaccaacuuauuaugaaaaaucaucugcgggauaucaugggcaucccuuacugcaacuauagccgcuacugguaucucaaucacacagucacggggaagaccucucugcccagauguuggcugguguccaacggaagcuaccucaaugaaacacacuuuucugacgacauugagcagcaggcugauaacaugaucaccgagaugcugcaaaaagaauacauggaccggcagggcaagacaccucuugggcugguggaucucuucgucuuuagcaccuccuucuaucugauuucuaucuuucugcaccuuguuaaaauuccgacgcaucgccacaucgugggaaagcccugcccuaaaccccauagacucaaucacaugggcauuuguagcugcggccuguacaagcacccuggggugcccgucaaguggaaacggugaggacuaguaauaaggaaacuguaugaaugucugugggcaggaagugaagagauccuucuguaaagguuuuuggaauuaugucugcugaauaauaaacuuuuuugaaauaauaaaucugguagaaaaaugagaucuaaaaaaaaaaaaaaaaaaaaaaaaaaaaaaaaaaaaaaaaaaaaaaaaaaaaaaaaaaaaaaaaaaaaaaaaaaaaaaaaaaaaaaaaaaaaaaaaaaaa

SEQ ID NO: 37800 - RNA, 1785 nt, Artificial Sequence
  mRNA product Design b-4 (A100) comprising derived and/or modified sequence from LASV(GA391;Clade III)__CAA36645__GPCmut10 (opt5)
aggagagucccgcagucggcguccagcggcucugcuuguucgugugugugucguugcaggccuuauucaagcuuaccaugggccagaucgugaccuucuuucaagaggucccccacguuauugaagaggugaugaacaucgugcugauugcccucagcauccuggcuauucuuaaggggcuguacaaugucgccacaugcggacucaucggccuggugacguuccuucugcucuccgggagaucuuguagccugaucuauaaaggaaccuacgaacugcagacacucgagcugaacauggaaacccuuaauaugugcaugccucuguccuguacaaagaacaauucucaucacuauauucggguuggcaacgagaccgggcucgagcugacacuuaccaauacgagcauccugaaccauaaauuuugcaaucucuccgacgcgcacaagcgcaaccuguacgaucauucucugaugagcauuaucuccaccuuccaccucagcauuccgaauuuuaaccaguaugaagcuaugucuugugacuucaauggaggcaaaaucacagugcaguacaaccugucccacagcuuugccgucgaugccgcuggccauugcgggacccuugccaauggagugcugcaaacauucaugagaauggcuuggggcgggucuuauauugcccucgacuccggacggggcaacugggauuguaucaugaccagcuaccaguaccugaucauucagaacacgacaugggacgaucacugccaguuuucucgccccuccccuaucggguaucuuggacugcucagccaaagaacccgggacauuuacaucucccgcagacugcugggcacauucaccuggacccucucugauagcgagggcaaugaaacacccgggggauauugucugacgcgguggaugcuuauugaggcggagcugaagugcuuuggcaacaccgccguugcuaaguguaaugaaaaacaugacgaggaguucugcgauaugcuccgccuguuugacuucugcaagcaggccaucagacggcuuaaaacagaagcucagauguccauccagcugauuaacaaggccgugaaugcgcucaucaacgaucaacugauuaugaaaaaucaucugcgcgacaucauggggauuccuuacuguaacuauagcagauacugguaucucaaucacaccucuacaggaaagaccucccugccccggugcuggcuuaucagcaacggcucuuaccugaaugaaacgaaguucagcgacgauaucgagcagcaggccgacaacaugauuacagagaugcuccaaaaagaauacaucgaucgccaggggaagaccccucugggacuggucgaccuuuuuguguucuccaccucuuuuuaucucauuagcaucuuccugcaccuggugaaaauuccgacacacagacauaucgucggcaagcccuguccuaaaccccaccggcucaaucauaugggcauuugcuccugugggcuguacaagcagccuggaguucccgugagauggaaacgcugaggacuaguaauaaggaaacuguaugaaugucugugggcaggaagugaagagauccuucuguaaagguuuuuggaauuaugucugcugaauaauaaacuuuuuugaaauaauaaaucugguagaaaaaugagaucuaaaaaaaaaaaaaaaaaaaaaaaaaaaaaaaaaaaaaaaaaaaaaaaaaaaaaaaaaaaaaaaaaaaaaaaaaaaaaaaaaaaaaaaaaaaaaaaaaaaa

SEQ ID NO: 37801 - RNA, 1788 nt, Artificial Sequence
  mRNA product Design b-4 (A100) comprising derived and/or modified sequence from LASV(AV;Clade V)__CCA30314__GPCmut10 (opt5)
aggagagucccgcagucggcguccagcggcucugcuuguucgugugugugucguugcaggccuuauucaagcuuaccaugggccagaucgugaccuucuuucaagaggucccccacguuauugaagaggugaugaacaucgugcugauugcccucagcauccuggcuguccuuaaggggcuguacaauauugccacaugcggacucaucggccugaucacguuccuucugcucugugggagauccugcucuagcaaccuguauaaaggaguguacgaacugcagucccucgaccugaauauggagacccuuaacauguguaugccucugucuugcacaaagaauaacagccaucacuauauucggguuggcaaugauaccgggcucgaacugacacuuaccaacacauccauccugaaucauaaauuuuguaaccucucugacgcgcacaagaaagaucuguacgaccaugcucugaugagcauuaucuccaccuuccaccucagcauuccgaauuuuaaccaguaugaggccaugucuugcgauuucaauggaggcaagaucuccgugcaguacaaccugagccacucuuaugccauugacgcugccaaucauuguggcacggucgcuaacgggauccuucaaaccuuuaugcgcauggccuggggaggcuccuacaucgcgcuggauagcgggagaggaaacugggacugcauuaugacaucuuaccaguaucucaucauucagaauaccacaugggagaaccacugucaguucucccggcccagcccuaucggcuaccuggggcuucugucccaacgcaccagagauauuuauaucucucggcgccuccugggaacguuuacauggacccugagcgacuccgaaggcaaugccacacccggcggguacugccucaccagauggaugcugaucgaggcugaacuuaaguguuucggaaacaccgccguggcuaaaugcaaugagaagcaugaugaggaauuuugcgacaugcugcgccucuucgauuuuuguaaacaggccauuagccggcugaagucugaggcgcagauguccauccagcuuauuaacaaagccguuaaugcucugaucaacgaccaacucauuaugaagaaucaccugagagacaucaugggcaucccuuauugcaacuacagcaaguauugguaccugaaucacacaauuacggggaaaaccucucuccccaaguguuggcuggugagcaacggauccuaccuuaaugaaacacauuucucugaugacaucgagcagcaggccgauaacaugauuaccgaaaugcugcaaaaagaguauauggagcggcagggcaagacaccucucgggcuggucgaccuguucguguuuagcaccuccuucuaccuuaucagcauuuuucuccgccuggugaaaaucccgacgcacagacauauugucggaaagcccugcccuaaaccccaccggcugaaucauaugggcaucuguucuugcggccucuauaagcagccugggguucccgugcgcuggaagagaugaggacuaguaauaaggaaacuguaugaaugucugugggcaggaagugaagagauccuucuguaaagguuuuuggaauuaugucugcugaauaauaaacuuuuuugaaauaauaaaucugguagaaaaaugagaucuaaaaaaaaaaaaaaaaaaaaaaaaaaaaaaaaaaaaaaaaaaaaaaaaaaaaaaaaaaaaaaaaaaaaaaaaaaaaaaaaaaaaaaaaaaaaaaaaaaaa

SEQ ID NO: 37802 - RNA, 1785 nt, Artificial Sequence
  mRNA product Design b-4 (A100) comprising derived and/or modified sequence from LASV(Togo/2016/7082;Clade VI)__AMR44577__GPCmut10 (opt5)
aggagagucccgcagucggcguccagcggcucugcuuguucgugugugugucguugcaggccuuauucaagcuuaccaugggccagaucauuaccuucuuucaagaggugccccacgucaucgaagagguuaugaacauugugcugaucgcccucagccugcuugcuauucugaaggggguguacaaugucgccacaugcggaaucaucggccucgugacguuccuguuucuuugugggagauccugcucucugauuuauaaaggaagcuacgaacuccagacccuggagcugaacauggaaacacucaauauguguaugccucuguccugcaccaagaacucuagccaucacuauauccggguuggcaaugagacagggcuugagcugacccucacaaacaccuccauuaucaaucauaaauucuguaaccugucugacgcgcacaagcgcaaucuuuacgaucaugcucugaugagcauucucuccacguuucaccugagcaucccgaacuucaaucaguaugaagccaugucuugcgacuuuaacggaggcaaaauuuccgugcaguacaaucugagccacgccuaugcugucgaugccgcugagcauuguggcaccguggccaacgggguucuccaaacauucaugagaauggcguggggaggcucuuacaucgcccuggacuccgggcggggaaauugggauugcaucaugaccagcuaccaguaucuuauuauccagaacacaaccugggaagaccacugucaguuuucucgccccuccccuauuggcuaccuggggcuccugagccaaagaacgcgggauaucuauauuucccgcagacuucugggaacauucaccuggacacucucugacagcgagggcaacgagacccccggcggguacugccugacccgguggaugcugaucgaagcugagcucaaguguuuuggaaauacagccguggcuaagugcaacgaaaaacaugaugaggaguucugcgacaugcugcgccuuuuugauuucuguaagcaggccauccagagacugaaauccgaagcgcagaugagcauucaacucaucaauaaggccgucaacgcucugauuaaugaccagcuuaucaugaaaaaccaucugcgggauaugaugggcauuccuuauugcaauuacucuaaguauugguaccucaaccacacguccagcgggcgcaccucucugcccaaguguuggcuggugagcaauggauccuaccucaacgagacacacuucucugacgacaucgaacagcaagccgauaauaugaucaccgagaugcugcagaaagaauauauugacagacagggcaagacaccucuugggcugguggaucucuuugucuucagcaccuccuuuuaccugaucagcauuuuccugcaccuuaucaaaauuccgacgcaucggcacaucguuggaaagcccugcccuaaaccccaucgccucaaccacaugggcauuuguucuugcggccuguauaagcagccuggggugcccacaagauggaaacggugaggacuaguaauaaggaaacuguaugaaugucugugggcaggaagugaagagauccuucuguaaagguuuuuggaauuaugucugcugaauaauaaacuuuuuugaaauaauaaaucugguagaaaaaugagaucuaaaaaaaaaaaaaaaaaaaaaaaaaaaaaaaaaaaaaaaaaaaaaaaaaaaaaaaaaaaaaaaaaaaaaaaaaaaaaaaaaaaaaaaaaaaaaaaaaaaa

SEQ ID NO: 37803 - RNA, 1785 nt, Artificial Sequence
  mRNA product Design b-4 (A100) comprising derived and/or modified sequence from LASV(KAK-428;Clade n.d. (VII))__ANH09740__GPCmut10 (opt5)
aggagagucccgcagucggcguccagcggcucugcuuguucgugugugugucguugcaggccuuauucaagcuuaccaugggccagaucgugaccuucuuucaagaggucccccacguuauugaagaggugaugaacaucgugcugauugcccucagccugcuugcuauccugaaggggcucuacaauuucgccacaugcggagucauuggccugaucacguuucuucugcucugugggagauccugcucugcgaccuauaaaggacaguacgaacugcagacacuggagcucaacauggaaagccugaauauguguaugccucuuuccugcaccaagaacaauucucaucacuauauccgggcuggcaacaauacagggcuggagcucacccugacaaacaccagcauuaucucccauaaauucuguaaucuuucugacgcccacaagaaaaaccuguacgaucauacgcucaugagcauuaucaccacauuucaccuguccauuccgaauuucaaccaguaugaggccaugagcugcgacuuuaauggaggcaagaucucuauucaauacaaccugucccacagcuaugcuggcgaugccgcucagcauugugggaccguggccaauggaguucuccagacauucaugcgcauggcguggggcgggucuuaccuggcccuugacuccggaagacggggcugggauugcaucaucagcucuuaccaguaucugauuauccaaaacaccacgugggacgaucacugucaguuuucccgccccagcccuauuggguaccucggauucgugucccagaagacaagagacaucuauauuucucggcgccugcuuggcaccuuuacauggacccugagcgauuccgaaggccaugacaugcccgggggauacugccucaccagauggaugcugaucgaggcugaucugaaauguuucggcaacacagccgucgcuaagugcaaugaaaaacacgacgaggaguuuugcgauauguggcgccucuucgacuucuguaagcaggccauccaacggcugaaagcggaagcccagaugaacauucagcuuaucaauaaggcugugaacgcccugauuaaugaccaacucaugaugaagaaccaccugagagauaucauggggauuccuuauugcaauuacagcaaauuuugguaucuuaacaauacgaccacaggacggaccucucugccccgcuguuggcucaucuccaacggcagcuaccugaaugagacacauuucucugacgauaucgaacagcaggcugacaacaugauuaccgagaugcugcagaaggaauacauggauagacaagggaaaacgccucucggacugguugaccuuuuuguguucagcacauccuuuuaucugaucaccauuuuccuccaccuggucaagaucccgacccaucggcacauugugggcaaacccugcccuaagccccaucgccugaaucacaugggcaucuguucuugcgggcuuuacaaacagccuggagugcccgucagauggaagcggugaggacuaguaauaaggaaacuguaugaaugucugugggcaggaagugaagagauccuucuguaaagguuuuuggaauuaugucugcugaauaauaaacuuuuuugaaauaauaaaucugguagaaaaaugagaucuaaaaaaaaaaaaaaaaaaaaaaaaaaaaaaaaaaaaaaaaaaaaaaaaaaaaaaaaaaaaaaaaaaaaaaaaaaaaaaaaaaaaaaaaaaaaaaaaaaaa

SEQ ID NO: 37804 - RNA, 1785 nt, Artificial Sequence; identical to SEQ ID NO: 37798
  mRNA product Design b-4 (A100) comprising derived and/or modified sequence from LASV(Pinneo-NIG-1969;Clade I)__AIT17836__GPCmut10 (opt5)

SEQ ID NO: 37805 - RNA, 1785 nt, Artificial Sequence
  mRNA product Design b-4 (A100) comprising derived and/or modified sequence from LASV(ISTH0009-NIG-2011;Clade II)__AIT17404__GPCmut10 (opt5)
aggagagucccgcagucggcguccagcggcucugcuuguucgugugugugucguugcaggccuuauucaagcuuaccaugggccagaucauuaccuucuuucaagaggugccccacgucaucgaagagguuaugaacauugugcugaucgcccucagccugcuugcuauucugaaggggaucuacaauguggccacaugcggacucuucggccuggucuccuuucuucugcucugugggagaucuugcagcacgaccuauaaaggaguguacgaacugcagacacuggagcucgacauggcgucccugaacauguguaugccucuuucuugcaccaagaauaacagccaucacuauaucaugguuggcaaugaaacagggcuggagcucacccugacaaacaccuccauuaucaaucauaaauucuguaaccuuucugaugcucacaagaaaaaucuguacgaccaugcccucaugagcauuaucuccacguuucaccugagcauuccgaacuucaaucaguaugaggccaugucuugcgauuuuaacggaggcaagaucuccgugcaguacaaucugagccacgcuuaugccgucgacgcugccaaccauuguggcaccauugcgaauggggugcuccaaacauucaugcggauggccuggggaggcucuuacaucgcucuggauuccgggaagggaagcugggacugcaucaugaccucuuaccaguaucuuauuauccagaacacaaccugggaagaucacugucaguuuucccgccccagcccuauuggcuaccuggggcuccugucccaaagaacgcgggacaucuauauuucucgcagacuucugggaacauucaccuggacacucagcgauuccgagggcaacgaaacccccggcggguacugccugacccgguggaugcugaucgaggccgagcucaaauguuuuggaaauacagcuguugccaagugcaacgaaaaacaugacgaggaguucugcgauaugcugcgccuuuuugacuucuguaagcaggcgaucagacggcugaaaacggaagcccagaugagcauucagcucaucaauaaggcugugaacgcccugauuaaugaucaacuuaucaugaagaaccaucugcgcgacauuaugggcaucccuuauugcaauuacucuaaauauugguaccucaaccacaccgucacagggaagaccucccugcccagauguuggcuggugagcaauggaucuuaccucaacgaaacacacuucagcgacgauaucgagcagcaggcugacaauaugauuaccgagcugcuucaaaaagaauauauggaucggcagggcaagacgccucuggggcucguggaccuguuugucuucuccacaucuuuuuaccugaucagcauuuuccuucaccucaucaaaauuccgacccaucgccacaucaccggaaagcccugcccuaaaccccauagacugaaccacaugggcauuuguuccugcggccuguauaagcacccugggguucccgugaaguggaaacggugaggacuaguaauaaggaaacuguaugaaugucugugggcaggaagugaagagauccuucuguaaagguuuuuggaauuaugucugcugaauaauaaacuuuuuugaaauaauaaaucugguagaaaaaugagaucuaaaaaaaaaaaaaaaaaaaaaaaaaaaaaaaaaaaaaaaaaaaaaaaaaaaaaaaaaaaaaaaaaaaaaaaaaaaaaaaaaaaaaaaaaaaaaaaaaaaa

SEQ ID NO: 37806 - RNA, 1785 nt, Artificial Sequence
  mRNA product Design b-4 (A100) comprising derived and/or modified sequence from LASV(ISTH2010-NIG-2012;Clade II)__AIT17482__GPCmut10 (opt5)
aggagagucccgcagucggcguccagcggcucugcuuguucgugugugugucguugcaggccuuauucaagcuuaccaugggccagaucauuaccuucuuucaagaggugccccacgucaucgaagagguuaugaacauugugcugaucgcccucagccugcuugcuauucugaaggggaucuacaauguggccacaugcggacucuucggccuggucuccuuucuucugcucugugggagaucuugcagcacgaccuauaaaggaguguacgaacugcagacacuggagcucgacauggcgucccugaacauguguaugccucuuucuugcaccaagaauaacagccaucacuauaucaugguuggcaaugaaacagggcuggagcucacccugacaaacaccuccauuaucaaucauaaauucuguaaccuuucugaugcucacaagaaaaaucuguacgaccaugcccucaugagcauuaucuccacguuucaccugagcauuccgaacuucaaucaguaugaggccaugucuugcgauuuuaacggaggcaagaucuccgugcaguacaaucugagccacgcuuaugccgucgacgcugccaaccauuguggcaccauugcgaauggggugcuccaaacauucaugcggauggccuggggaggcucuuacaucgcucuggauuccgggaagggaagcugggacugcaucaugaccucuuaccaguaucuuauuauccagaacauuacaugggaagaucacugucaguuuucccgccccagcccuaucggcuaccuggggcuccugucccaaagaacccgggacauuuauaucucucgcagacuucugggaacguucacauggacccucagcgauuccgagggcaacgaaacacccggcggguacugccugacccgguggaugcugaucgaggccgagcucaaauguuuuggaaauaccgcuguugccaagugcaacgaaaaacaugacgaggaguucugcgauaugcugcgccuuuuugacuucuguaagcaggcgauuagacggcugaaaacagaagcccagaugagcauccagcucauuaauaaggcugugaacgcccugaucaaugaucaacuuauuaugaagaaccaucugcgcgacaucaugggcaucccuuauugcaauuacucuaaauauugguaccucaaccacacggucaccgggaagacaucccugcccagauguuggcuggugagcaauggaucuuaccucaacgaaacccacuucagcgacgauauugagcagcaggcugacaauaugaucacagagcugcuucaaaaagaauauauugaucggcagggcaagaccccucuggggcucguggaccuguuugucuucuccacgucuuuuuaccugaucagcauuuuccuucaccucguuaaaaucccgacacaucgccacguggugggaaagcccugcccuaaaccccauagacugaaccacaugggcauuuguuccugcggccuguauaagcacccugggguccccgugaaguggaaacggugaggacuaguaauaaggaaacuguaugaaugucugugggcaggaagugaagagauccuucuguaaagguuuuuggaauuaugucugcugaauaauaaacuuuuuugaaauaauaaaucugguagaaaaaugagaucuaaaaaaaaaaaaaaaaaaaaaaaaaaaaaaaaaaaaaaaaaaaaaaaaaaaaaaaaaaaaaaaaaaaaaaaaaaaaaaaaaaaaaaaaaaaaaaaaaaaa

SEQ ID NO: 37807 - RNA, 1785 nt, Artificial Sequence
  mRNA product Design b-4 (A100) comprising derived and/or modified sequence from LASV(Lassa virus/H.sapiens-wt/NGA/2015/ISTH_0543;Clade II)__AVO03639__GPCmut10 (opt5)
aggagagucccgcagucggcguccagcggcucugcuuguucgugugugugucguugcaggccuuauucaagcuuaccaugggccagaucauuaccuucuuucaagaggugccccacgucaucgaagagguuaugaacauugugcugaucgcccucagccugcuugcuauucugaaggggaucuacaauguggccacaugcggacucuucggccuggucuccuuucuucugcucugugggagaucuugcagcacgaccuauaaaggaguguacgaacugcagacacuggagcucgacauggcgaaccugaauauguguaugccucuuuccugcaccaagaacaauucucaucacuauaucaugguuggcaacgaaacagggcuggagcucacccugacaaauaccagcauuaucaaccauaaauucuguaaucuuuccgaugcucacaagaaaaaccuguacgaccaugcccucaugucuauuaucagcacguuucaccuguccauuccgaauuucaaccaguaugaggccaugagcugcgauuuuaauggaggcaagaucucugugcaguacaaccugucccacaccuaugcugucgacgccgcuaaucauuguggcacaauugccaacggggugcuccaaaccuucaugcggauggcguggggaggcagcuacaucgcccuggauucugggaagggauccugggacugcaucaugacaagcuaccaguaucuuguuauucagaacaccacgugggaagaucacugucaguuuucucgccccuccccuaucggcuaccuggggcuccugagccaaagaacacgggacauuuauaucucccgcagacuucugggaaccuucacauggacccucucugauagcgagggcaaugaaacccccggcggguacugccugacacgguggaugcugauugaggcugagcucaaauguuuuggaaacacggccguggcuaagugcaaugaaaaacaugacgaggaguucugcgauaugcugcgccuuuuugacuucuguaagcaggccaucagacggcugaaaaccgaagcgcagauguccauccagcucauuaacaaggccgucaaugcucugaucaacgaucaacuuauuaugaagaaucaucugcgcgacaucaugggcauuccuuauugcaacuacagcaaauauugguaccucaaucacacagugaccgggaagacaucucugcccagauguuggcugguguccaacggaagcuaccucaaugaaacccacuucucugacgauaucgagcagcaggccgacaacaugaucacggagcugcuucaaaaagaauauauugaucggcagggcaagacaccucuggggcucgucgaccuguuuguuuucagcaccuccuuuuaccugaucucuauuuuccuucaccucgugaaaaucccgacccaucgccacauuacaggaaagcccugcccuaaaccccauagacugaaucacaugggcaucuguagcugcggccuguauaagcacccuggggugcccgucaaguggaaacggugaggacuaguaauaaggaaacuguaugaaugucugugggcaggaagugaagagauccuucuguaaagguuuuuggaauuaugucugcugaauaauaaacuuuuuugaaauaauaaaucugguagaaaaaugagaucuaaaaaaaaaaaaaaaaaaaaaaaaaaaaaaaaaaaaaaaaaaaaaaaaaaaaaaaaaaaaaaaaaaaaaaaaaaaaaaaaaaaaaaaaaaaaaaaaaaaa

SEQ ID NO: 37808 - RNA, 1785 nt, Artificial Sequence
  mRNA product Design b-4 (A100) comprising derived and/or modified sequence from LASV(Lassa virus/H.sapiens-wt/NGA/2016/ISTH_0009;Clade II)__AVO03571__GPCmut10 (opt5)
aggagagucccgcagucggcguccagcggcucugcuuguucgugugugugucguugcaggccuuauucaagcuuaccaugggccagaucauuaccuucuuucaagaggugccccacgucaucgaagagguuaugaacauugugcugaucgcccucagccugcuugcuauucugaaggggaucuacaauguggccacaugcggacuccugggccuugucuccuuccugcuccugugugggagaucuugcagcacgaccuauaaaggaguguacgaacugcagacacucgagcuggacauggcgucccuuaacauguguaugccucugucuugcaccaagaauaacagccaucacuauaucaugguuggcaaugaaacagggcucgagcugacccuuacaaacaccuccauuaucaaucauaaauuuuguaaccugucugaugcucacaagaaaaaucucuacgaccaugcccugaugagcauuaucuccacguuccaccugagcauuccgaacuuuaaucaguaugaggccaugucuugcgauuucaacggaggccggaucuccgugcaguacaaucucagccacucuuaugcugucgacgccgcuaaccauuguggcaccauugccaauggggugcugcaaacauuuaugcgcauggcguggggaggcuccuacaucgcccuugauagcgggaagggaucuugggacugcaucaugaccuccuaccaguaucugauuauccagaacacaaccugggaagaucacugucaguucagcagacccuccccuauuggcuaccucgggcugcuuucucaacggacgcgcgacaucuauauuagcagacggcugcucggaacauuuaccuggacacuguccgauagcgagggcaacgaaacccccggcggguacugccugacccgcuggaugcucaucgaggcugagcugaaguguuucggaaauacagccguugcuaaaugcaacgaaaagcaugacgaggaauuuugcgauaugcuuagacuguucgacuuuuguaaacaggccauccggcgccucaagacggaggcgcagaugucuauucagcugaucaauaaagccgugaacgcucuuauuaaugaucaacugaucaugaagaaccaccucagagacauuaugggcaucccuuauugcaauuacuccaaguauugguaccugaaccacaccgucacagggaaaaccagccugccccgguguuggcucgugucuaauggaagcuaccugaacgaaacacauuucuccgacgauaucgagcagcaggccgacaauaugauuaccgagcuucugcaaaaggaauauaucgaucgccagggcaaaacgccucucgggcugguggaccuguucgucuuuucuaccagcuucuaccuuauuuccaucuuucuccaccugguuaagauuccgacacauagacacaucaccggaaaacccugcccuaagccccaucggcugaaccacaugggcauuuguagcugcggccucuauaaucacccuggggugcccgugaaauggaagcgcugaggacuaguaauaaggaaacuguaugaaugucugugggcaggaagugaagagauccuucuguaaagguuuuuggaauuaugucugcugaauaauaaacuuuuuugaaauaauaaaucugguagaaaaaugagaucuaaaaaaaaaaaaaaaaaaaaaaaaaaaaaaaaaaaaaaaaaaaaaaaaaaaaaaaaaaaaaaaaaaaaaaaaaaaaaaaaaaaaaaaaaaaaaaaaaaaa

SEQ ID NO: 37809 - RNA, 1785 nt, Artificial Sequence
  mRNA product Design b-4 (A100) comprising derived and/or modified sequence from LASV(Lassa virus/H.sapiens-wt/NGA/2016/ISTH_0017;Clade II)__AVO03567__GPCmut10 (opt5)
aggagagucccgcagucggcguccagcggcucugcuuguucgugugugugucguugcaggccuuauucaagcuuaccaugggccagaucauuaccuucuuucaagaggugccccacgucaucgaagagguuaugaacauugugcugaucgcccucagccugcuugcuauucugaaggggaucuacaauguggccacaugcggacucuucggccuggucuccuuucuucugcucugugggagaucuugcagcacgaccuauaaaggaguguacgaacugcagacacuggagcucgacauggcgucccugaacauguguaugccucuuucuugcaccaagaauaacagccaucacuauaucaugguuggcaaugaaacagggcuggagcucacccugacaaacaccuccauuaucaaucauaaauucuguaaccuuucugaugcucacaagaaaaaucuguacgaccaugcccucaugagcauuaucuccacguuucaccugagcauuccgaacuucaaucaguaugaggccaugucuugcgauuuuaacggaggcaagaucuccgugcaguacaaucugagccacaccuaugcuauugacgccgcuaaccauuguggcacaaucgccaaugggguccuccaaaccuucaugcggauggcguggggaggcucuuacaucgcccuggauuccgggaagggaagcugggacugcauuaugacaucuuaccaguaucuuaucauucagaacaccacgugggaagaucacugucaguuuucccgccccagcccuaucggcuaccuggggcuccugucccaaagaacacgggacauuuauaucucucgcagacuucugggaaccuucacauggacccucagcgauuccgagggcaacgaaacccccggcggguacugccugacacgguggaugcugaucgaggcugagcucaaauguuuuggaaauacggccguggcuaagugcaacgaaaaacaugacgaggaguucugcgauaugcugcgccuuuuugacuucuguaagcaggccauuagacggcugaaaaccgaagcgcagaugagcauccagcucauuaauaaggccguuaacgcucugaucaaugaucaacuuauuaugaagaaccaucugcgcgacaucaugggcaucccuuauugcaauuacucuaaauauugguaccucaaccacacagugaccgggaagacaucccugcccagauguuggcuggucagcaauggaucuuaccucaacgaaacccacuucagcgacgauauugagcagcaggccgacaauaugaucacggagcugcuucaaaaagaauauauggaucggcagggcaagacaccucuggggcucguggaccuguuuguguucuccaccucuuuuuaccugauuagcaucuuccuucaccucguccgcauuccgacccauagacacguuaucggaaaacccugcccuaagccccaucggcugaaccacaugggcauuuguuccugcggccuguauaaacacccuggggugcccgugaaguggaagcgcugaggacuaguaauaaggaaacuguaugaaugucugugggcaggaagugaagagauccuucuguaaagguuuuuggaauuaugucugcugaauaauaaacuuuuuugaaauaauaaaucugguagaaaaaugagaucuaaaaaaaaaaaaaaaaaaaaaaaaaaaaaaaaaaaaaaaaaaaaaaaaaaaaaaaaaaaaaaaaaaaaaaaaaaaaaaaaaaaaaaaaaaaaaaaaaaaa

SEQ ID NO: 37810 - RNA, 1785 nt, Artificial Sequence
  mRNA product Design b-4 (A100) comprising derived and/or modified sequence from LASV(Lassa virus/H.sapiens-wt/NGA/2018/ISTH_0959;Clade II)__AVV65099__GPCmut10 (opt5)
aggagagucccgcagucggcguccagcggcucugcuuguucgugugugugucguugcaggccuuauucaagcuuaccaugggccagaucauuaccuucuuucaagaggugccccacgucaucgaagagguuaugaacauugugcugaucgcccucagccugcuugcuauucugaaggggaucuacaauguggucacaugcggacucuucggccugguguccuuucuucugcucugugggagaucuugcagcacgaccuauaaaggaguuuacgaacugcagacacuggagcucgacauggccucccugaacauguguaugccucuuucuugcaccaagaauaacagccaucacuauaucauggugggcaaugaaacagggcuggagcucacccugacaaacaccuccauuaucaaucauaaauucuguaaccuuucugaugcgcacaagaaaaaucuguacgaccaugcucucaugagcauuaucuccacguuucaccugagcauuccgaacuucaaucaguaugaggccaugucuugcgauuuuaacggaggcaagaucuccguccaguacaaucugagccacgccuaugcuauugacgccgcuaaccauuguggcaccaucgccaauggggugcuccaaacauucaugcggauggcguggggaggcucuuacaucgcccuggauuccgggaagggaagcugggacugcauuaugaccucuuaccaguaucuuaucauucagaacacaaccugggaagaucacugucaguuuucccgccccagcccuaucggcuaccuggggcuccugucccaaagaacgcgggacauuuauaucucucgcagacuucugggaacauucaccuggacacucagcgauuccgagggcaacgaaacccccggcggguacugccugacccgguggaugcugaucgaggcugagcucaaauguuuuggaaauacagccguugcuaagugcaacgaaaaacaugacgaggaguucugcgauaugcugcgccuuuuugacuucuguaagcaggccauuagacggcugaaaacggaagcgcagaugagcauccagcucauuaauaaggccgugaacgcucugaucaaugaucaacuuauuaugaagaaccaucugcgcgacaucaugggcaucccuuauugcaauuacucuaaauauugguaccucaaccacaccgucacagggaagaccucccugcccagauguuggcuggugagcaauggaucuuaccucaacgaaacacacuucagcgacgauauugagcagcaggccgacaauaugaucaccgagcugcuucaaaaagaauauauugaucggcagggcaagacgccucuggggcucguggaccuguuugucuucuccacaucuuuuuaccugaucagcauuuuccuucaccucguuaaaaucccgacccaucgccacgugauuggaaagcccugcccuaaaccccauagacugaaccacaugggcaucuguuccugcggccuguauaagcacccuggggugcccgucaaguggaaacggugaggacuaguaauaaggaaacuguaugaaugucugugggcaggaagugaagagauccuucuguaaagguuuuuggaauuaugucugcugaauaauaaacuuuuuugaaauaauaaaucugguagaaaaaugagaucuaaaaaaaaaaaaaaaaaaaaaaaaaaaaaaaaaaaaaaaaaaaaaaaaaaaaaaaaaaaaaaaaaaaaaaaaaaaaaaaaaaaaaaaaaaaaaaaaaaaa

SEQ ID NO: 37811 - RNA, 1785 nt, Artificial Sequence
  mRNA product Design b-4 (A100) comprising derived and/or modified sequence from LASV(LASV003-NIG-2008;Clade II)__AIT17580__GPCmut10 (opt5)
aggagagucccgcagucggcguccagcggcucugcuuguucgugugugugucguugcaggccuuauucaagcuuaccaugggccagaucauuaccuucuuucaagaggugccccacgucaucgaagagguuaugaacauugugcugaucgcccucagccugcuugcuauucugaaggggaucuacaauguggccacaugcggacucuucggccuggucuccuuucuucugcucugugggagaucuugcagcacgaccuauaaaggaguguacgaacugcagacacuggagcucgacauggcgucccugaacauguguaugccucuuucuugcaccaagaauaacagccaucacuauaucaugguuggcaaugaaacagggcuggagcucacccugacaaacaccuccauuaucaaucauaaauucuguaaccuuucugaugcucacaagaaaaaucuguacgaccaugcccucaugagcauuaucuccacguuucaccugagcauuccgaacuucaaucaguaugaggccaugucuugcgauuuuaacggaggcaagaucuccgugcaguacaaucugagccacaccuaugcugucgacgccgcuaaccauuguggcacaauugccaauggggugcuccaaaccuucaugcggauggcguggggaggcucuuacaucgcccuggauuccgggaagggaagcugggacugcaucaugacaucuuaccaguaucuuauuauccagaacaccacgugggaagaucacugucaguuuucccgccccagcccuauuggcuaccuggggcuccugucccaaagaacacgggacaucuauauuucucgcagacuucugggaaccuucacauggacccucagcgauuccgagagcaacgaaacccccggcggcuacugccugacacgguggaugcugaucgaggcugagcucaaauguuuugggaauacggccguugcuaagugcaacgaaaaacaugacgaggaguucugcgauaugcugcgccuuuuugacuucuguaagcaggccaucagacggcugaaagcggaagcccagaugucuauucagcucaucaauaaggcugugaacgcccugauuaaugaucaacuuaucaugaagaaccaucugcgcgacauuaugggaaucccuuauugcaauuacuccaaauauugguaccucaaccacaccgucacaggcagaaccagccugccccgguguuggcuggugucuaaugggagcuaccucaacgaaacacacuucuccgacgauaucgagcagcaggcugacaauaugauuaccgagcugcuucaaaaggaauauauggaucgccagggaaaaacgccucugggccucguggaccuguuugucuucucuaccagcuuuuaccugaucuccauuuuccuucaccucguuaagaucccgacacauagacacgugauugggaaacccugcccuaagccccaucggcugaaccacaugggaaucuguagcugcggccuguauaaacacccuggcgugcccgucaaguggaagcgcugaggacuaguaauaaggaaacuguaugaaugucugugggcaggaagugaagagauccuucuguaaagguuuuuggaauuaugucugcugaauaauaaacuuuuuugaaauaauaaaucugguagaaaaaugagaucuaaaaaaaaaaaaaaaaaaaaaaaaaaaaaaaaaaaaaaaaaaaaaaaaaaaaaaaaaaaaaaaaaaaaaaaaaaaaaaaaaaaaaaaaaaaaaaaaaaaa

SEQ ID NO: 37812 - RNA, 1785 nt, Artificial Sequence
  mRNA product Design b-4 (A100) comprising derived and/or modified sequence from LASV(LASV035-NIG-2009;Clade II)__AIT17588__GPCmut10 (opt5)
aggagagucccgcagucggcguccagcggcucugcuuguucgugugugugucguugcaggccuuauucaagcuuaccaugggccagaucauuaccuucuuucaagaggugccccacgucaucgaagagguuaugaacauugugcugaucgcccucagccugcuugcuauucugaaggggaucuacaauguggccacaugcggacucuucggccuggucuccuuucuucugcucugugggagaucuugcagcacgaccuauaaaggaguguacgaacugcagacacuggagcucgacauggcgucccugaacauguguaugccucuuucuugcaccaagaauaacagccaucacuauaucaugguuggcaaugaaacagggcuggagcucacccugacaaacaccuccauuaucaaucauaaauucuguaaccuuucugaugcucacaagaaaaaucuguacgaccaugcccucaugagcauuaucuccacguuucaccugagcauuccgaacuucaaucaguaugaggccaugucuugcgauuuuaacggaggcaagaucuccgugcaguacaaucugagccacgcuuaugccgucgacgcugccaaccauuguggcaccauugcgaauggggugcuccaaacauucaugcggauggccuggggaggcucuuacaucgcucuggauuccgggaagggaagcugggacugcaucaugaccucuuaccaguaucuuauuauccagaacacaaccugggaagaucacugucaguuuucccgccccagcccuauuggcuaccuggggcuccugucccaaagaacgcgggacaucuauauuucucgcagacuucugggaacauucaccuggacacucagcgauuccgagggcaacgaaacccccggcggguacugccugacccgguggaugcugaucgaggccgagcucaaauguuuuggaaauacagcuguugccaagugcaacgaaaaacaugacgaggaguucugcgauaugcugcgccuuuuugacuucuguaagcaggcgaucagacggcugaaagccgaagcucagaugagcauucagcucaucaauaaggccgugaacgcucugauuaaugaucaacuuaucaugaagaaccaucugcgcgacauuaugggcaucccuuauugcaauuacucuaaauauugguaccucaaccacacggucaccgggaagacaucccugcccagauguuggcuggugagcaauggaucuuaccucaacgaaacccacuucagcgacgauaucgagcagcaggccgacaauaugauuacagagcugcuucaaaaagaauauaucgaucggcagggcaagaccccucuggggcucguggaccuguuugucuucuccacgucuuuuuaccugauuagcaucuuccuucaccucguuaaaauuccgacacaucgccacgugaucggaaagcccugcccuaaaccccauagacugaaccacaugggcauuuguuccugcggccuguauaagcacccuggggugcccgucaaguggaaacggugaggacuaguaauaaggaaacuguaugaaugucugugggcaggaagugaagagauccuucuguaaagguuuuuggaauuaugucugcugaauaauaaacuuuuuugaaauaauaaaucugguagaaaaaugagaucuaaaaaaaaaaaaaaaaaaaaaaaaaaaaaaaaaaaaaaaaaaaaaaaaaaaaaaaaaaaaaaaaaaaaaaaaaaaaaaaaaaaaaaaaaaaaaaaaaaaa

SEQ ID NO: 37813 - RNA, 1785 nt, Artificial Sequence
  mRNA product Design b-4 (A100) comprising derived and/or modified sequence from LASV(LASV1000-NIG-2009;Clade II)__AIT17782__GPCmut10 (opt5)
aggagagucccgcagucggcguccagcggcucugcuuguucgugugugugucguugcaggccuuauucaagcuuaccaugggccagaucauuaccuucuuucaagaggugccccacgucaucgaagagguuaugaacauugugcugaucgcccucagccugcuugcuauucugaaggggaucuacaauguggccacaugcggacucuucggccuggucuccuuucuucugcucugugggagaucuugcagcacgaccuauaaaggaguguacgaacugcagacacuggagcucgacauggcgucccugaacauguguaugccucuuucuugcaccaagaauaacagccaucacuauaucaugguuggcaaugaaacagggcuggagcucacccugacaaacaccuccauuaucaaucauaaauucuguaaccuuucugaugcucacaagaaaaaucuguacgaccaugcccucaugagcauuaucuccacguuucaccugagcauuccgaacuucaaucaguaugaggccaugucuugcgauuuuaacggaggcaagaucuccgugcaguacaaucugagccacaccuaugcugucgacgccgcuaaccauuguggcacaauugccaauggggugcuccaaaccuucaugcggauggcguggggaggcucuuacaucgcccuggauuccgggaagggaagcugggacugcaucaugacaucuuaccaguaucuuauuauccagaacaccacgugggaagaucacugucaguuuucccgccccagcccuauuggcuaccuggggcuccugucccaaagaacacgggacaucuauauuucucgcagacuucugggaaccuucacauggacccucagcgauuccgagggcaacgaaacccccggcggguacugccugacacgguggaugcugaucgaggcugagcucaaauguuuuggaaauacggccguugcuaagugcaacgaaaaacaugacgaggaguucugcgauaugcugcgccuuuuugacuucuguaagcaggccaucaaaagacugaagaccgaagcgcagaugagcauucagcucaucaauaaggccgugaacgcucugauuaaugaucaacuuaucaugaaaaaccaucugcgggacauuaugggcaucccuuauugcaauuacucuaaguauugguaccucaaccacacagucaccgggaaaacaucccugccccgcuguuggcuggugagcaauggaucuuaccucaacgaaacccacuucagcgacgauaucgagcagcaggccgacaauaugauuacggagcugcuucaaaaggaauauaucgauagacagggcaaaacaccucuggggcucguggaccuguuugucuucuccaccucuuuuuaccugauuagcaucuuccuucaccucguuaagauuccgacccaucggcacguggugggaaaacccugcccuaagccccaucgccugaaccacaugggcaucuguuccugcggccuguauaagcacccugggguccccgugaaauggaagagaugaggacuaguaauaaggaaacuguaugaaugucugugggcaggaagugaagagauccuucuguaaagguuuuuggaauuaugucugcugaauaauaaacuuuuuugaaauaauaaaucugguagaaaaaugagaucuaaaaaaaaaaaaaaaaaaaaaaaaaaaaaaaaaaaaaaaaaaaaaaaaaaaaaaaaaaaaaaaaaaaaaaaaaaaaaaaaaaaaaaaaaaaaaaaaaaaa

SEQ ID NO: 37814 - RNA, 1785 nt, Artificial Sequence
  mRNA product Design b-4 (A100) comprising derived and/or modified sequence from LASV(LASV221-NIG-2010;Clade II)__AIT17624__GPCmut10 (opt5)
aggagagucccgcagucggcguccagcggcucugcuuguucgugugugugucguugcaggccuuauucaagcuuaccaugggccagaucauuaccuucuuucaagaggugccccacgucaucgaagagguuaugaacauugugcugaucgcccucagccugcuugcuauucugaaggggaucuacaauguggccacaugcggacucuucggccuggucuccuuucuucugcucugugggagaucuugcagcacgaccuauaaaggaguguacgaacugcagacacuggagcucgacauggcgucccugaacauguguaugccucuuucuugcaccaagaauaacagccaucacuauaucaugguuggcaaugaaacagggcuggagcucacccugacaaacaccuccauuaucaaucauaaauucuguaaccuuucugaugcucacaagaaaaaucuguacgaccaugcccucaugagcauuaucuccacguuucaccugagcauuccgaacuucaaucaguaugaggccaugucuugcgauuuuaacggaggcaagaucuccgugcaguacaaucugagccacaccuaugcuauugacgccgcuaaccauuguggcacaaucgccaaugggguccuccaaaccuucaugcggauggcguggggaggcucuuacaucgcccuggauuccgggaagggaagcugggacugcauuaugacaucuuaccaguaucuuaucauucagaacaccacgugggaagaucacugucaguuuucccgccccagcccuaucggcuaccuggggcuccugucccaaagaacacgggacauuuauaucucucgcagacuucugggaaccuucacauggacccucagcgauuccgagggcaacgaaacccccggcggguacugccugacacgguggaugcugaucgaggcugagcucaaauguuuuggaaauacggccguggcuaagugcaacgaaaaacaugacgaggaguucugcgauaugcugcgccuuuuugacuucuguaagcaggccauuagacggcugaaaaccgaagcgcagaugagcauccagcucauuaauaaggccguuaacgcucugaucaaugaucaacuuauuaugaagaaccaucugcgcgacaucaugggcaucccuuauugcaauuacucuaaauauugguaccucaaccacacagugaccgggaagacaucccugcccagauguuggcuggucagcaauggaucuuaccucaacgaaacccacuucagcgacgauauugagcagcaggccgacaauaugaucacggagaugcugcaaaaagaauauauggaucggcagggcaagacaccucuugggcugguggaccucuuuguguucuccaccucuuuuuaccugauuagcaucuuccugcaccuugucaaaauuccgacccaucgccacguuaucggaaagcccugcccuaaaccccauagacucaaccacaugggcauuuguuccugcggccuguauaagcacccuggggugcccgugaaguggaaacggugaggacuaguaauaaggaaacuguaugaaugucugugggcaggaagugaagagauccuucuguaaagguuuuuggaauuaugucugcugaauaauaaacuuuuuugaaauaauaaaucugguagaaaaaugagaucuaaaaaaaaaaaaaaaaaaaaaaaaaaaaaaaaaaaaaaaaaaaaaaaaaaaaaaaaaaaaaaaaaaaaaaaaaaaaaaaaaaaaaaaaaaaaaaaaaaaa

SEQ ID NO: 37815 - RNA, 1785 nt, Artificial Sequence
  mRNA product Design b-4 (A100) comprising derived and/or modified sequence from LASV(LASV237-NIG-2010;Clade II)__AIT17638__GPCmut10 (opt5)
aggagagucccgcagucggcguccagcggcucugcuuguucgugugugugucguugcaggccuuauucaagcuuaccaugggccagaucauuaccuucuuucaagaggugccccacgucaucgaagagguuaugaacauugugcugaucgcccucagccugcuugcuauucugaaggggaucuacaauguggccacaugcggacucuucggccuggucuccuuucuucugcucugugggagaucuugcagcacgaccuauaaaggaguguacgaacugcagacacuggagcucgacauggcgucccugaacauguguaugccucuuucuugcaccaagaauaacagccaucacuauaucaugguuggcaaugaaacagggcuggagcucacccugacaaacaccuccauuaucaaucauaaauucuguaaccuuucugaugcucacaagaaagaccuguacgaucaugcccucaugagcauuaucuccacguuucaccugagcauuccgaauuucaaccaguaugaggccaugucuugcgacuuuaauggaggcaagaucuccgugcaguacaaccugagccacaccuaugcugucgaugccgcuaaucauuguggcacaauugccaacggggugcuccaaaccuucaugcggauggcguggggaggcucuuacaucgcccuggacuccgggaagggaagcugggauugcaucaugacaucuuaccaguaucuuauuauccagaauaccacgugggaagaccacugucaguuuucccgccccagcccuauuggcuaccuggggcuccugucccaaagaacacgggauaucuauauuucucgcagacuucugggaaccuucacauggacccucagcgacuccgagggcaacgaaacccccggcggguacugccugacacgguggaugcugaucgaggcugagcucaaauguuuuggaaacacggccguugcuaagugcaaugaaaaacaugaugaggaguucugcgacaugcugcgccuuuuugauuucuguaagcaggccaucagacggcugaaaaccgaagcgcagaugagcauucagcucaucaacaaggccgugaaugcucugauuaacgaccaacuuaucaugaagaaucaucugcgcgacauuaugggcaucccuuauugcaacuacucuaaauauugguaccucaaucacacagucaccgggaagacaucccugcccagauguuggcuggugagcaacggaucuuaccucaaugaaacccacuucagcgaugacaucgagcagcaggccgauaacaugauuacggagcugcuucaaaaagaauauauggaccggcagggcaagacaccucuggggcucguggaucuguuugucuucuccaccucuuuuuaccugaucagcauuuuccuucaccucaucaaaauuccgacccaucgccacaucacaggaaagcccugcccuaaaccccauagacugaaucacaugggcauuuguuccugcggccuguauaagcacccugggguucccgugaaguggaaacggugaggacuaguaauaaggaaacuguaugaaugucugugggcaggaagugaagagauccuucuguaaagguuuuuggaauuaugucugcugaauaauaaacuuuuuugaaauaauaaaucugguagaaaaaugagaucuaaaaaaaaaaaaaaaaaaaaaaaaaaaaaaaaaaaaaaaaaaaaaaaaaaaaaaaaaaaaaaaaaaaaaaaaaaaaaaaaaaaaaaaaaaaaaaaaaaaa

SEQ ID NO: 37816 - RNA, 1785 nt, Artificial Sequence
  mRNA product Design b-4 (A100) comprising derived and/or modified sequence from LASV(LASV253-NIG-2011;Clade II)__AIT17670__GPCmut10 (opt5)
aggagagucccgcagucggcguccagcggcucugcuuguucgugugugugucguugcaggccuuauucaagcuuaccaugggccagaucauuaccuucuuucaagaggugccccacgucaucgaagagguuaugaacauugugcugaucgcccucagccugcuugcuauucugaaggggaucuacaauguggccacaugcggacucuucggccuggucuccuuucuucugcucugugggagaucuugcagcacgaccuauaaaggaguguacgaacugcagacacuggagcucgacauggcgucccugaacauguguaugccucuuucuugcaccaagaauaacagccaucacuauaucaugguuggcaaugaaacagggcuggagcucacccugacaaacaccuccauuaucaaucauaaauucuguaaccuuucugaugcucacaagaaaaaucuguacgaccaugcccucaugagcauuaucuccacguuucaccugagcauuccgaacuucaaucaguaugaggccaugucuugcgauuuuaacggaggcaagaucuccgugcaguacaaucugagccacaccuaugcugucgacgccgcuaaccauuguggcacaauugccaauggggugcuccaaaccuucaugcggauggcguggggaggcucuuacaucgcccuggauuccgggaagggaagcugggacugcaucaugacaucuuaccaguaucuuauuauccagaacaccacgugggaagaucacugucaguuuucccgccccagcccuauuggcuaccuggggcuccugucccaaagaacacgggacaucuauauuucucgcagacuucugggaaccuucacauggacccucagcgauuccgagggcaacgaaacccccggcggguacugccugacacgguggaugcugaucgaggcugagcucaaauguuuuggaaauacggccguugcuaagugcaacgaaaaacaugacgaggaguucugcgauaugcugcgccuuuuugacuucuguaagcaggccaucagacggcugaaagcggaagcccagaugagcauucagcucaucaauaaggcugugaacgcccugauuaaugaucaacuuaucaugaagaaccaucugcgcgacauuaugggcaucccuuauugcaauuacucuaaauauugguaccucaaccacaccgucacagggagaaccucccugccccgguguuggcuggugagcaauggaucuuaccucaacgaaacacacuucagcgacgauaucgagcagcaggcugacaauaugauuaccgagcugcuucaaaaggaauauaucgaucgccagggcaaaacgccucuggggcucguggaccuguuugucuucuccacaucuuuuuaccugauuagcaucuuccuucaccucguuaagauuccgacccauagacacaucauuggaaaacccugcccuaagccccaucggcugaaccacaugggcaucuguuccugcggccuguauaaacacccuggggugcccgugaaguggaagcgcugaggacuaguaauaaggaaacuguaugaaugucugugggcaggaagugaagagauccuucuguaaagguuuuuggaauuaugucugcugaauaauaaacuuuuuugaaauaauaaaucugguagaaaaaugagaucuaaaaaaaaaaaaaaaaaaaaaaaaaaaaaaaaaaaaaaaaaaaaaaaaaaaaaaaaaaaaaaaaaaaaaaaaaaaaaaaaaaaaaaaaaaaaaaaaaaaa

SEQ ID NO: 37817 - RNA, 1785 nt, Artificial Sequence
  mRNA product Design b-4 (A100) comprising derived and/or modified sequence from LASV(LASV254-NIG-2011;Clade II)__AIT17674__GPCmut10 (opt5)
aggagagucccgcagucggcguccagcggcucugcuuguucgugugugugucguugcaggccuuauucaagcuuaccaugggccagaucauuaccuucuuucaagaggugccccacgucaucgaagagguuaugaacauugugcugaucgcccucagccugcuugcuauucugaaggggaucuacaauguggccacaugcggacucuucggccuggucuccuuucuucugcucugugggagaucuugcagcacgaccuauaaaggaguguacgaacugcagacacuggagcucgacaugaccaaccugaauauguguaugccucuuuccugcacaaagaacaauucucaucacuauaucaugguuggcaacgaaaccgggcuggagcucacacugaccaauacgagcauuaucaaccauaaauucuguaaucuuuccgaugcgcacaagaaaaaccuguacaaucaugcucucaugucuauuaucagcaccuuucaccuguccauuccgaacuucaaucaguaugaggccaugagcugcgacuuuaacggaggcaagaucucugugcaguacaaucugucccacagcuaugccgucgaugcugccaaccauuguggcacaauugcuaacggggugcuccaaaccuucaugcggauggccuggggaggcucuuacaucgcgcuggacuccgggaagggaaauugggauugcaucaugacaagcuaccaguaucuuauuauccagaacaccacgugggaagaccacugucaguuuucucgccccuccccuauuggcuaccuggggcuccugagccaaagaacacgggauaucuauauuucccgcagacuucugggaaccuucacauggacccucucugacagcgagggcaaugaaacccccggcggguacugccugacacgguggaugcugaucgaggccgagcucaaauguuuuggaaacacggcuguugccaagugcaaugaaaaacaugaugaggaguucugcgacaugcugcgccuuuuugauuucuguaagcaggcuaucagacggcugaaaaccgaagcccaggcgaacauucagcucaucaauaaggccgugaacgcucugauuaaugaccaacuuaucaugaagaaccaucugcgcgauauuaugggcaucccuuauugcaauuacuccaaauauugguaccucaaccacacagucaccgggaagacaagccugcccagauguuggcuggugucuaauggauccuaccucaacgaaacccacuucagcgacgacaucgagcagcaggccgauaauaugauuacggagcugcuucaaaaagaauauauggaccggcagggcaagacaccucuggggcucguggaucuguuugucuucucuaccagcuuuuaccugaucuccauuuuccuucaccucguuaaaaucccgacccaucgccacgugauuggaaagcccugcccuaaaccccauagacugaaccacaugggcaucuguucuugcggccuguauaagcacccuggggugcccgucaaguggaaacggugaggacuaguaauaaggaaacuguaugaaugucugugggcaggaagugaagagauccuucuguaaagguuuuuggaauuaugucugcugaauaauaaacuuuuuugaaauaauaaaucugguagaaaaaugagaucuaaaaaaaaaaaaaaaaaaaaaaaaaaaaaaaaaaaaaaaaaaaaaaaaaaaaaaaaaaaaaaaaaaaaaaaaaaaaaaaaaaaaaaaaaaaaaaaaaaaa

SEQ ID NO: 37818 - RNA, 1785 nt, Artificial Sequence
  mRNA product Design b-4 (A100) comprising derived and/or modified sequence from LASV(Nig08-A19;Clade III)__ADU56618__GPCmut10 (opt5)
aggagagucccgcagucggcguccagcggcucugcuuguucgugugugugucguugcaggccuuauucaagcuuaccaugggccagaucgugaccuucuuucaagaggucccccacguuauugaagaggugaugaacaucgugcugauugcccucagcauccuggcuauucuuaaggggcuguacaauaucgccacaugcggacucaucggccuggucacguuccuucugcucuccgggagaucuuguagcaugaccuauaaaggaguguacgaacugcagacacuggagcucaacaugaauacccugaacaugugcaugccucuuuccuguacaaagaauaacucucaucacuauauuaugguuggcaaugaaaccgggcuggagcucacacugaccaacacgagccuucugcaucacaaauuuugcaaucucuccgacgcgcauaagaaaaaccuguacgaucacacccugaugucuaucauuagcacauuccaccucuccaucccgaauuuuaaccaguaugaggcuaugagcugugacuucaauggaggcaagauuaccgugcaguacaaccugucucauuccuaugccaucgaugccgcuaaucacugcggcacagucgccaacggggugcuucaaaccuuuaugcggauggcuuggggaggcagcuacauugcccuggacucugggcgcggaaagugggauuguaucaugacguccuaccaguaucucaucauucagaacacaaccugggaagaccauugccaguucagcagacccucuccuaucggcuaccuggggcuucugucccaacggacacgcgauauuuauaucagcagacggcuccugggaaccuuuaccuggacacuguccgacucugagggcaaugaaacgcccggcggguacugucucacccgcuggaugcugauugaggcggagcuuaaaugcuucggaaacacagccguugcuaaguguaaugaaaaacacgaugaggaauuuugcgacaugcugagacucuucgauuuuugcaagcaggccauccggcgccugaaagcugaggcccagaugagcauccagcuuauuaacaaggcggugaaugcccugaucaacgaccaacucauuaugaagaaucaccugagagauaucaugggcauuccuuauuguaacuacuccaaauauugguaccugaaucauaccagcacagggcggaccucucucccccgcugcuggcuggucuccaacggaagcuaccuuaaugaaacgcacuucucugacgacaucgagcagcaggcugauaacaugaucacagagaugcugcaaaaggaauaucucgacagacagggcaaaaccccucuggggcugguggaucuuuucguguuuagcaccuccuucuaccucauuucuaucuuucugcaucuggucaagauuccgacacaccggcauaucguuggaaaacccuguccuaagccccaccgccucaaucacaugggcauuugcagcuguggccuguauaaacagccuggggugcccgugagauggaagcggugaggacuaguaauaaggaaacuguaugaaugucugugggcaggaagugaagagauccuucuguaaagguuuuuggaauuaugucugcugaauaauaaacuuuuuugaaauaauaaaucugguagaaaaaugagaucuaaaaaaaaaaaaaaaaaaaaaaaaaaaaaaaaaaaaaaaaaaaaaaaaaaaaaaaaaaaaaaaaaaaaaaaaaaaaaaaaaaaaaaaaaaaaaaaaaaaa

SEQ ID NO: 37819 - RNA, 1788 nt, Artificial Sequence
  mRNA product Design b-4 (A100) comprising derived and/or modified sequence from LASV(G1180-SLE-2010;Clade IV)__AIT17168__GPCmut10 (opt5)
aggagagucccgcagucggcguccagcggcucugcuuguucgugugugugucguugcaggccuuauucaagcuuaccaugggccagaucgugaccuucuuucaagaggucccccacguuauugaagaggugaugaacaucgugcugauugcccucagcauccuggcuguccuuaaggggcuguacaauuucgccacaugcggacucgugggccugcuuacguuucugcuccugugugggagauccugcaccgcgucucgguauaaaggaguuuacgaacugcagacacucgagcugaacauggaaacccuuaauauguguaugccucugagcugcacaaagaacaauucccaucacuauauuauggugggcaacgagaccgggcucgagcugacacuuaccaauacgucuaucaucaaccauaaauucuguaaucugagcgacgcucacaagaaaaaccucuacgaucaugcccugauguccauuaucucuaccuuucaccugagcauuccgaauuucaaccaguaugaagccauguccugcgacuuuaauggaggcaagaucagcguccaguacaaccucucucacuccuaugcuggcgaugccgcuaaucauugugggacaguggccaacggaguucugcaaaccuucaugcgcauggcguggggcgggagcuacauugcccuugacucuggacacggcuccugggauugcaucaugacaagcuaccaguaucugauuauccagaacaccacgugggaggaccauugucaguuuucuagacccuccccuaucggguaccucggacugcuuagccaacggacacgcgauauuuauaucuccagacggcugcucggcaccuucacauggacccugucugacagcgaaggcaaggauacccccgggggauacugccugacacgcuggaugcucauugaggcugagcugaaauguuuuggcaauacggccguggcuaagugcaacgaaaaacacgacgaggaguucugcgauaugcuuagacuguuugacuucuguaagcaggccauccagcggcucaaagcggaagcccagauguccauucaacugaucaauaaggcugucaacgcccuuaucaaugaucagcugauuaugaagaaccaccuccgcgacaucauggggauuccuuauugcaauuacagcaaauauugguaccugaaccauaccacaaccggaaagacaucucugcccaaauguuggcucguguccaauggcagcuaccugaacgaaacccacuucucugacgauaucgagcagcaagcugacaauaugauuacggagaugcuucagaaggaauauauggagagacaggggaaaacaccucugggacucguggaucuguuugucuucagcaccuccuuuuaccugaucucuaucuuccuucaucucguuaagauuccgacccaccggcauaucgugggcaaaagcugccccaagccucaccgccugaaccacaugggcauuuguuccugcgggcuguauaagcagcccggagugccugucaaauggaagagaugaggacuaguaauaaggaaacuguaugaaugucugugggcaggaagugaagagauccuucuguaaagguuuuuggaauuaugucugcugaauaauaaacuuuuuugaaauaauaaaucugguagaaaaaugagaucuaaaaaaaaaaaaaaaaaaaaaaaaaaaaaaaaaaaaaaaaaaaaaaaaaaaaaaaaaaaaaaaaaaaaaaaaaaaaaaaaaaaaaaaaaaaaaaaaaaaa

SEQ ID NO: 37820 - RNA, 1788 nt, Artificial Sequence
  mRNA product Design b-4 (A100) comprising derived and/or modified sequence from LASV(G1442-SLE-2011;Clade IV)__AIT17180__GPCmut10 (opt5)
aggagagucccgcagucggcguccagcggcucugcuuguucgugugugugucguugcaggccuuauucaagcuuaccaugggccagaucgugaccuucuuucaagaggucccccacguuauugaagaggugaugaacaucgugcugauugcccucagcauccuggcuguccuuaaggggcuguacaauguggccacaugcggacucauuggccugguuacguuccuucugcucugugggagauccugcaccacaacccuguauaaaggaguguacgaacugcagacacucgagcugaacauggaaacccuuaauauguguaugccucugucuugcacaaagaacaauagccaucacuauauccgggucggcaacgagaccgggcucgagcugacgcuuaccaauacauccaucauuaaccauaaauuuuguaaucugucugacgcgcacaagaaaaaccucuacgaucaugcucugaugagcaucauuuccaccuuccaccugucuaucccgaauuuuaaccaguaugaagccaugagcugcgacuucaauggaggcaagauuuccgugcaguacaaccucagccacucuuaugccggcgaugcugccaaucauugugggacaguugcuaacggagugcugcaaaccuuuaugcgcauggccuggggcggguccuacaucgcgcuugacagcggaagaggcaacugggauugcauuaugacgucuuaccaguaucugaucauccagaauacaaccugggacgaucacugucaguucucccggcccagcccuauuggguaccucggacugcuuucucaacgcacaagagacgucuauaucucccggcgccugcucggcaccuuuaccuggacacugagcgauuccgagggcaaggacacgcccgggggauacugccugaccagauggaugcucauugaagccgagcugaaauguuucggcaacacagcuguggccaagugcaaugagaaacaugaugaagaguuuugcgacaugcuucggcuguucgauuuuuguaagcaggcuauccagcgccucaaagccgaagcgcagaugucuauucaacugaucaacaaggccgugaaugcucuuaucaacgaccagcugauuaugaagaaucaccucagagacaucauggggauuccuuauugcaacuacagcaaauauugguaccugaauaacaccgccacaggaaagaccucccugcccaaauguuggcucaucagcaauggcucuuaccugaacgagacgcacuucuccgaugacauugaacaggaggcugauaauaugaucacagagaugcuucaaaaggaauauauggagcggcaggggaaaaccccucugggacucgucgaccuguucguuuuuagcaccucuuucuaccugaucagcauuuuucuucaucucgugaagaucccgacacaccgccauauugugggcaaauccugccccaagccucacagacugaaccauaugggcaucuguucuugcgggcuguauaagcagcccggagucccugugcgguggaaacgcugaggacuaguaauaaggaaacuguaugaaugucugugggcaggaagugaagagauccuucuguaaagguuuuuggaauuaugucugcugaauaauaaacuuuuuugaaauaauaaaucugguagaaaaaugagaucuaaaaaaaaaaaaaaaaaaaaaaaaaaaaaaaaaaaaaaaaaaaaaaaaaaaaaaaaaaaaaaaaaaaaaaaaaaaaaaaaaaaaaaaaaaaaaaaaaaaa

SEQ ID NO: 37821 - RNA, 1788 nt, Artificial Sequence
  mRNA product Design b-4 (A100) comprising derived and/or modified sequence from LASV(G3010-SLE-2013;Clade IV)__AIT17344__GPCmut10 (opt5)
aggagagucccgcagucggcguccagcggcucugcuuguucgugugugugucguugcaggccuuauucaagcuuaccaugggccagaucgugaccuucuuucaagaggucccccacguuauugaagaggugaugaacaucgugcugauugcccucagcauccuggcuguccuuaaggggcuguacaauuucgccacaugcggacucgugggccugguuacguuucuucugcucugugggagauccugcaccacaucucuguauaaaggaguguacgaacugcagacccucgagcugaacauggaaacacuuaauauguguaugccucugagcugcaccaagaacaauucccaucacuauauuauggucggcaacgagacagggcucgagcugacccuuacgaauaccucuaucaucaaccauaaauucuguaaucugagcgacgcgcacaagaaaaaccucuacaaucaugcucugauguccauuaucucuacauuucaccugagcauuccgaacuucaaucaguaugaagccauguccugcgauuuuaacggaggcaagaucagcgugcaguacaaucucucucacuccuaugccggcgacgcugccagccauugugggaccguugcuaacggagugcugcaaacauucaugcggauggccuggggcgggucuuacauugcgcuugauuccggauacggcaagugggacugcaucaugaccagcuaucaguaccugauuauccagaacacgacaugggaggaucacugucaguuuucucgccccuccccuaucggguaucucggacugcuuagccaaagaacccgggacauuuacaucucccgcagacugcucggcacauucaccuggacccugucugauagcgaaggcaaagacacacccgggggauauugccugacgcgguggaugcucauugaggccgagcugaaguguuuuggcaauaccgcugucgccaaaugcaacgaaaagcaugaugaggaguucugcgacaugcuucgccuguuugauuucuguaaacaggcuauccagagacucaagacagaagcccagauguccauucaacugaucaauaaggcggugaacgcccuuaucaaugaccagcugauuaugaaaaaccaccuccgggauaucauggggauuccuuacugcaauuauagcaaguacugguaccugaaccacaccacaaccggaaaaacgucucugcccaaguguuggcucguguccaauggcagcuaucugaacgaaacacauuucucugacgacaucgagcagcaagcugauaauaugauuaccgagaugcuucagaaagaauacauggagcgccaggggaagaccccucugggacucgucgaccuguuuguuuucagcacauccuuuuaucugaucucuaucuuccuucaccucgugaaaauuccgacccauagacacaucgugggcaagagcugccccaagccucaucggcugaaccacaugggcauuuguuccugcgggcuguacaaacagcccggagucccugugcgcuggaagagaugaggacuaguaauaaggaaacuguaugaaugucugugggcaggaagugaagagauccuucuguaaagguuuuuggaauuaugucugcugaauaauaaacuuuuuugaaauaauaaaucugguagaaaaaugagaucuaaaaaaaaaaaaaaaaaaaaaaaaaaaaaaaaaaaaaaaaaaaaaaaaaaaaaaaaaaaaaaaaaaaaaaaaaaaaaaaaaaaaaaaaaaaaaaaaaaaa

SEQ ID NO: 37822 - RNA, 1788 nt, Artificial Sequence
  mRNA product Design b-4 (A100) comprising derived and/or modified sequence from LASV(G502-SLE-2009;Clade IV)__AIT17126__GPCmut10 (opt5)
aggagagucccgcagucggcguccagcggcucugcuuguucgugugugugucguugcaggccuuauucaagcuuaccaugggccagaucgugaccuucuuucaagaggucccccacguuauugaagaggugaugaacaucgugcugauugcccucagcauccuggcuguccuuaaggggcuguacaauuucgccacaugcggacucgugggccugcuuacguuucugcuccugugugggagauccugcaccacaggacuguauaaaggcguuuacgaacuccagacccuggagcuuaacauggaaacacugaauauguguaugccucucucuugcaccaagaacaauagccaucacuauauuaugguggggaacgagacaggacuggagcuuacccugacgaauaccuccaucaucaaccauaaauucuguaaucucucugacgcgcacaagaaaaaccuguacgaucaugcucugaugagcauuaucuccacauuucaccucucuauuccgaauuucaaccaguaugaagccaugagcugcgacuuuaauggcggcaagaucuccguccaguacaaccugagccacucuuaugccggggaugcugccgaccauuguggaaccguggcuaauggcguucuucaaacauucaugcggauggccuggggaggguccuacauugcgcuggauagcggccgcgggagaugggacugcaucaugaccucuuaccaguaucucauuauccagaacacgacaugggaggaucacugucaguuuucccggcccagcccuaucggauaccugggccuucugucucaacgcaccagagacauuuauaucucccggcgccuccugggcacauucaccuggacccugagcgauuccgaagggaaggacacacccggaggcuacugccucacgagauggaugcugauugaggccgagcuuaaauguuuugggaacaccgcuguggccaagugcaaugaaaaacaugaugaggaguucugcgacaugcugcggcucuuugauuucuguaagcaggcuauccagcgccugaaagccgaagcgcagaugucuauucaacuuaucaacaaggccgucaaugcucugaucaacgaccagcucgugaugaagaaucaccugagagacauuaugggaaucccuuauugcaacuacagccgguauugguaccugaaucacacaaccacaggccgcaccucccuccccaaauguuggcuggugagcaacgggucuuaccuuaaugaaacgcauuucuccgaugacauugagcagcaagccgauaacaugaucacagagaugcugcagaaggaauauauggagagacagggaaaaaccccucucggccuggucgaccuguuuguuuucagcaccucuuuuuaccuuauuagcaucuuccuccaccuggugaagaucccgacacaucggcacauugugggcaaauccugccccaagccucaucgccugaaucacauggggaucuguucuugcggacucuauaaacagcccggcgucccugugaaguggaagagaugaggacuaguaauaaggaaacuguaugaaugucugugggcaggaagugaagagauccuucuguaaagguuuuuggaauuaugucugcugaauaauaaacuuuuuugaaauaauaaaucugguagaaaaaugagaucuaaaaaaaaaaaaaaaaaaaaaaaaaaaaaaaaaaaaaaaaaaaaaaaaaaaaaaaaaaaaaaaaaaaaaaaaaaaaaaaaaaaaaaaaaaaaaaaaaaaa

SEQ ID NO: 37823 - RNA, 1788 nt, Artificial Sequence
  mRNA product Design b-4 (A100) comprising derived and/or modified sequence from LASV(G733-SLE-2010;Clade IV)__AIT17154__GPCmut10 (opt5)
aggagagucccgcagucggcguccagcggcucugcuuguucgugugugugucguugcaggccuuauucaagcuuaccaugggccagaucgugaccuucuuucaagaggucccccacguuauugaagaggugaugaacaucgugcugauugcccucagcauccuggcuguccuuaaggggcuguacaauuucgccacaugcggaauugugggccucguuuccuuucugcuucugugugggagaucuugcacgaccagccucuauaaaggaguguacgaacugcagacacuggagcucaacauggaaacccugaauauguguaugccucuuuccugcacaaagaacaauucucaucacuauaucauggucggcaacgagaccgggcuggagcucacacugaccaauacgagcaucauuaaccauaaauucuguaaucuuuccgacgcgcacaagaaaaaccuguacgaucaugcucucaugucuaucauuagcaccuuucaccuguccaucccgaauuucaaccaguaugaagccaugagcugcgacuuuaauggaggcaagauuucugugcaguacaaccugucccacagcuaugccggcgaugcugccaaucauugugggacaaucgcuaacggaguucuccaaaccuucaugcggauggccuggggcgggucuuacauugcgcuggacuccggacgcgauagaugggacugcaucaugacaagcuaccaguaucuuaucauucagaacaccacgugggaggaucacugucaguuuucucggcccuccccuaucggcuaccuggggcuccugagccaacgcacaagagacauuuauaucucccggcgccuucugggaaccuucacauggacccucucugauagcgaaggcaaggacacccccggcggguacugccugacaagauggaugcugauugaggccgagcucaaauguuuuggaaauacggcuguggccaagugcaacgaaaaacaugaugaggaguucugcgacaugcugcggcuuuuugauuucuguaagcaggcuauccagcgccugaaagccgaagcgcagauguccauccaacucauuaauaaggccgucaacgcucugaucaaugaccagcuuauuaugaagaaccaccugagagacaucaugggcauuccuuauugcaauuacagcaaauauugguaccucaaccacaccacaaccgggaagacaucucugcccaaauguuggcugguguccaauggaagcuaccucaacgaaacccauuucucugaugacaucgagcagcaagccgauaauaugaucacggagaugcugcagaaggaauauauggagcggcagggcaaaacaccucuugggcugguggaccucuuugucuucagcaccuccuuuuaccugauuucuaucuuccugcaccuuguuaagauuccgacccaucgccacguggugggaaaaagcugccccaagccucauagacucaaccacaugggcaucuguuccugcggccuguaugggcagcccggagucccugugaaguggaaacggugaggacuaguaauaaggaaacuguaugaaugucugugggcaggaagugaagagauccuucuguaaagguuuuuggaauuaugucugcugaauaauaaacuuuuuugaaauaauaaaucugguagaaaaaugagaucuaaaaaaaaaaaaaaaaaaaaaaaaaaaaaaaaaaaaaaaaaaaaaaaaaaaaaaaaaaaaaaaaaaaaaaaaaaaaaaaaaaaaaaaaaaaaaaaaaaaa

SEQ ID NO: 37824 - RNA, 1788 nt, Artificial Sequence
  mRNA product Design b-4 (A100) comprising derived and/or modified sequence from MOPV/LASV reassortant(IGS-1;Clade IV)__AFY05576__GPCmut10 (opt5)
aggagagucccgcagucggcguccagcggcucugcuuguucgugugugugucguugcaggccuuauucaagcuuaccaugggccagaucgugaccuucuuucaagaggucccccacguuauugaagaggugaugaacaucgugcugauugcccucagcguccuggcugugcuuaaggggcuguacaauuucgccacaugcggacucguuggccuggugacguuucuucugcucugugggagauccugcaccacaucucuguauaaaggagucuacgaacugcagacccucgagcugaacauggaaacacuuaauauguguaugccucugagcugcaccaagaacaauucccaucacuauaucauggugggcaacgagacagggcucgagcugacccuuacgaauaccucuauuaucaaccauaaauucuguaaucugagcgacgcgcacaagaaaaaccucuacgaucaugcucugauguccaucauuucuacauuucaccugagcaucccgaauuucaaccaguaugaagccauguccugcgacuuuaauggaggcaagauuagcguucaguacaaccucucucacuccuaugccggcgaugcugccaaucauugugggaccguggcuaacggaguccugcaaacauucaugcggauggccuggggcgggagcuacaucgcgcuugacucuggacgcggcaacugggauugcauuaugaccuccuaccaguaucugaucauucagaauacgacaugggaggaccacugucaguuuagcagacccucuccuaucggguaccucggacugcuuucccaacggacccgcgauaucuauauuagcagacggcugcucggcacauucaccuggacccuguccgacucugaaggcgaggauacacccgggggauacugccugacgcgcuggaugcucaucgaggccgaacugaaguguuuuggcaacaccgcuguggccaaaugcaaugagaagcaugacgaagaguucugcgauaugcuuagacuguuugacuucuguaaacaggcuauucagcggcucaaggccgaagcgcagaugagcauccaacugauuaacaaagccgugaaugcucuuaucaacgaucagcugaucaugaagaaucaccuccgcgacauuauggggaucccuuauugcaacuacuccaaguauugguaccugaaucacacaaccacaggaagaaccagccugcccaaauguuggcucgucucuaacggcuccuaccugaaugagacgcauuucagcgacgauauugagcagcaagccgacaacaugaucacagaaaugcuucagaaggaguauauggaacggcaggggaaaaccccucugggacucguugaucuguuuguguucucuaccagcuuuuaccugauuuccaucuuccuucaccucgugaagaucccgacacaucgccacauugucggcaaaucuugccccaagccucauagacugaaucacaugggcaucuguagcugcgggcuguauaaacagcccggagugccuguuaaguggaagcggugaggacuaguaauaaggaaacuguaugaaugucugugggcaggaagugaagagauccuucuguaaagguuuuuggaauuaugucugcugaauaauaaacuuuuuugaaauaauaaaucugguagaaaaaugagaucuaaaaaaaaaaaaaaaaaaaaaaaaaaaaaaaaaaaaaaaaaaaaaaaaaaaaaaaaaaaaaaaaaaaaaaaaaaaaaaaaaaaaaaaaaaaaaaaaaaaa

SEQ ID NO: 37825 - RNA, 1788 nt, Artificial Sequence
  mRNA product Design b-4 (A100) comprising derived and/or modified sequence from LASV(LM765-SLE-2012;Clade IV)__AIT17814__GPCmut10 (opt5)
aggagagucccgcagucggcguccagcggcucugcuuguucgugugugugucguugcaggccuuauucaagcuuaccaugggccagaucgugaccuucuuucaagaggucccccacguuauugaagaggugaugaacaucgugcugauugcccucagcauccuggcuguccuuaaggggcuguacaauuucgccacaugcggacucgugggccugguuacguuucuucugcucugugggagauccugcaccacaucucuguauaaaggaguguacgaacugcagacccucgagcugaacauggaaacacuuaauauguguaugccucugagcugcaccaagaacaauucccaucacuauauuauggucggcaacgagacagggcucgagcugacccuuacgaauaccucuaucaucgaccauaaauucuguaaccugagcgaugcgcaccggaagaaucucuacgaccaugcucugauguccauuaucucuacauuucaccugagcauuccgaacuucaaucaguaugaagccauguccugcgauuuuaacggaggcaaaaucagcgugcaguacaaucucucucacuccuaugccaaggacgcugccgaucauuguggcaccguugcuaacggggugcugcaaacauucaugcgcauggccuggggaggcagcuacauugcgcuugacucugggagaggacggugggauugcaucaugaccuccuaccaguaucugauuauccagaauacgacaugggaggaccacugucaguuuagccgccccucuccuaucggcuaccucgggcugcuuucccaaagaacccgggauauuuauaucagccgcagacugcucggaacauucaccuggacccuguccgacucugaaggcaaggauacacccggcggguacugccugacgcgguggaugcucauugaggccgagcugaaauguuuuggaaacaccgcugucgccaagugcaacgaaaaacaugacgaggaguucugcgauaugcuucgccuguuugacuucuguaagcaggcuauccagagacucaaagccgaagcgcagaugagcauucaacugaucaauaaggccgugaacgcucuuaucaaugaccagcugauuaugaagaaccaccuccgggauaucaugggcauuccuuauugcaauuacuccaaauauugguaccugaaccacacaaccacagggaagaccagccugcccaaauguuggcucgugucuaauggauccuaccugaacgaaacgcauuucagcgacgauaucgagcagcaagccgacaauaugauuacagagaugcuucagaaggaauauauggagcgccagggcaaaaccccucuggggcucgucgaucuguuuguuuucucuaccagcuuuuaccugaucuccaucuuccuucaccucgugaagauuccgacacauagacacaucgugggaaaacccugcccuaagccccaucggcugaaccacaugggcauuuguucuugcggccuguauaagcagccugggguccccgugaaauggaagcgcugaggacuaguaauaaggaaacuguaugaaugucugugggcaggaagugaagagauccuucuguaaagguuuuuggaauuaugucugcugaauaauaaacuuuuuugaaauaauaaaucugguagaaaaaugagaucuaaaaaaaaaaaaaaaaaaaaaaaaaaaaaaaaaaaaaaaaaaaaaaaaaaaaaaaaaaaaaaaaaaaaaaaaaaaaaaaaaaaaaaaaaaaaaaaaaaaa

SEQ ID NO: 37826 - RNA, 1788 nt, Artificial Sequence
  mRNA product Design b-4 (A100) comprising derived and/or modified sequence from LASV(LM776-SLE-2012;Clade IV)__AIT17824__GPCmut10 (opt5)
aggagagucccgcagucggcguccagcggcucugcuuguucgugugugugucguugcaggccuuauucaagcuuaccaugggccagaucgugaccuucuuucaagaggucccccacguuauugaagaggugaugaacaucgugcugauugcccucagcauccuggcuguccuuaaggggcuguacaauuucgccacaugcggacucgugggccugguuacguuucuucugcucugugggagauccugcaccacaucuguguauaaaggagucuacgaacugcagacccuggagcucaacauggaaacacugaauauguguaugccucuuagcugcaccaagaacaauucccaucacuauauuauggugggcaacgagacagggcuggagcucacccugacgaauaccucuaucaucaaccauaaauucuguaaucuuagcgacgcgcacaagaaaaaccuguacgaucaugcucucauguccauuaucucuacauuucaccugagcauuccgaauuucaaccaguaugaagccauguccugcgacuuuaauggaggcaagaucagcguucaguacaaccugucucacuccuaugccggcgaugcugccaaucauugugggaccguggcuaacggaguccuccaaacauucaugcggauggccuggggcgggagcuacauugcgcuggacucuggacacggcaagugggauugcaucaugaccuccuaccaguaucuuauuauccagaacacgacaugggaggaccauugucaguuuagccgccccucuccuaucggguaccugggacuccugucccaaagaacccgggauauuuauaucagccgcagacuucugggcacauucaccuggacccucuccgacucugaaggcaaagauacacccgggggauacugccugacgcgguggaugcugauugaggccgagcucaaguguuuuggcaauaccgcuguggccaaaugcaacgaaaagcacgacgaggaguucugcgauaugcugcgccuuuuugacuucuguaaacaggcuauccagagacugaaggccgaagcgcagaugagcauucaacucaucaauaaggccgugaacgcucugaucaaugaucagcuuauuaugaaaaaccaucugcgggacaucauggggauuccuuauugcaauuacuccaaguauugguaccucaaccacacaaccacaggaaaaaccagccugcccaaguguuggcuggucucuaauggcuccuaccucaacgaaacgcacuucagcgacgauaucgagcagcaagccgacaauaugauuacagagaugcugcagaaagaauauauggagcgccaggggaagaccccucuuggacugguugaucucuuuguguucucuaccagcuuuuaccugaucuccaucuuccugcaucuugugaaaauuccgacacacagacauaucgucggcaagucuugccccaagccucaccggcucaaccacaugggcauuuguagcugcgggcuguauaaacagcccggagugccuguucgcuggaagagaugaggacuaguaauaaggaaacuguaugaaugucugugggcaggaagugaagagauccuucuguaaagguuuuuggaauuaugucugcugaauaauaaacuuuuuugaaauaauaaaucugguagaaaaaugagaucuaaaaaaaaaaaaaaaaaaaaaaaaaaaaaaaaaaaaaaaaaaaaaaaaaaaaaaaaaaaaaaaaaaaaaaaaaaaaaaaaaaaaaaaaaaaaaaaaaaaa

SEQ ID NO: 37827 - RNA, 1788 nt, Artificial Sequence
  mRNA product Design b-4 (A100) comprising derived and/or modified sequence from LASV(Mad39;Clade IV)__ANH09722__GPCmut10 (opt5)
aggagagucccgcagucggcguccagcggcucugcuuguucgugugugugucguugcaggccuuauucaagcuuaccaugggccagaucgugaccuucuuucaagaggucccccacguuauugaagaggugaugaacaucgugcugauugcccucagcauccuggcuguccuuaaggggcuguacaauguggccacaugcggacucauuggccugguuacguuccuucugcucugugggagauccugcaccacaacccuguauaaaggaguguacgaacugcaggcgcucgagcugaacauggaaacacuuaauauguguaugccucugucuugcaccaagaacaauagccaucacuauauccgggucggcaacgagacagggcucgagcugacccuuacgaauaccucccugaucaaccauaaauuuuguaaucucucugacgcucacaagaaaaaccuguacgaucaugcccugaugagcauuaucuccacauuccaccucucuauuccgaauuuuaaccaguaugaagccaugagcugcgacuucaaugauggaaagaucuccgugcaguacaaccugagccacaccuaugcuggcgacacagccaaucauuguggcaccguugcuaacggggugcuucaaacguuuaugcgcauggccuggggaggcucuuacauugcgcuggauuccgggagaggaggcugggacugcaucaugacaagcuaccaguaucucauuauccagaacaccacaugggaggaucacugucaguucucucggcccuccccuaucggguaccugggacuucugagccaacgcaccagagacauuuauaucucucggcgccuccugggcaccuuuacauggacgcuguccgauagcgaaggcaaggacacccccgggggauacugccucacaagauggaugcugauugaggccgagcuuaaauguuucggcaauaccgcugucgccaagugcaacgaaaaacaugaugaggaauuuugcgacaugcugcgccucuucgauuuuuguaagcaggcuauccagcggcugaaagccgaggcgcagauguccauucaacuuaucaauaaggccgugaacgcucugaucaaugaccagcucauuaugaagaaccaccugagagacaucauggggauuccuuauugcaauuacucuaaauauugguaccugaaccacacagugaccggaaagacgagccuccccaaauguuggcuggucuccaauggcagcuaccuuaacgaaacacauuucucugaugacaucgagcagcaagccgauaauaugauuaccgagaugcugcagaaggaauauauggagcggcaggggaaaaccccucucggacugguugaccuguucguguuuuccaccagcuucuaccuuaucucuaucuuucuccaccuggugaagauuccgacacaucgccacgucgugggcaaacccugcccuaagccccauagacugaaccacaugggcaucuguagcugcggguucuauaagcagccuggaguucccgugcgguggaaacgcugaggacuaguaauaaggaaacuguaugaaugucugugggcaggaagugaagagauccuucuguaaagguuuuuggaauuaugucugcugaauaauaaacuuuuuugaaauaauaaaucugguagaaaaaugagaucuaaaaaaaaaaaaaaaaaaaaaaaaaaaaaaaaaaaaaaaaaaaaaaaaaaaaaaaaaaaaaaaaaaaaaaaaaaaaaaaaaaaaaaaaaaaaaaaaaaaa

SEQ ID NO: 37828 - RNA, 1788 nt, Artificial Sequence
  mRNA product Design b-4 (A100) comprising derived and/or modified sequence from LASV(Z0947-SLE-2011;Clade IV)__AIT17840__GPCmut10 (opt5)
aggagagucccgcagucggcguccagcggcucugcuuguucgugugugugucguugcaggccuuauucaagcuuaccaugggccagaucgugaccuucuuucaagaggucccccacguuauugaagaggugaugaacaucgugcugauugcccucagcauccuggcuguccuuaaggggcuguacaauuucgccacaugcggacucgugggccugguuacguuucuucugcucugugggagauccugcaccauuucucuguauaaaggaguguacgaacugcagacacucgagcugaacauggaaacccuuaauauguguaugccucugagcugcacaaagaacaauucccaucacuauaucauggucggcaacgagaccgggcucgagcugacacuuaccaauacgucuaucauuaaccauaaauucuguaaucugagcgacgcgcacaagaaaaaccucuacgaucaugcucugauguccaucauuucuaccuuucaccugagcaucccgaauuucaaccaguaugaagccauguccugcgacuuuaauggaggcaagauuagcgugcaguacaaccucucucacuccuaugccggcgaugcugccaaucauugugggacaguugcuaacggagugcugcaaaccuucaugcggauggccuggggcgggagcuacaucgcgcuugacucuggacgcgauagaugggacugcauuaugacauccuaccaguaucugaucauccagaacaccacgugggaggaucacugucaguuuagccggcccucuccuauuggcuaccucgggcugcuuucccaacgcacaagagacaucuauauuagccggcgccugcucggaaccuucacauggacccuguccgauucugaaggcaaggacacccccggcggguacugccugacaagauggaugcucaucgaggccgagcugaaauguuuuggaaauacggcugucgccaagugcaacgaaaaacaugaugaggaguucugcgacaugcuucggcuguuugauuucuguaagcaggcuauucagcgccucaaagccgaagcgcagaugagcauccaacugaucaauaaggccgugaacgcucuuauuaaugaccagcugaucaugaagaaccaccucagagacauuaugggcaucccuuauugcaauuacuccaaauauugguaccugaaccacaccacaaccgggaagacaagccugcccaaauguuggcucgugucuaauggauccuaccugaacgaaacccauuucagcgaugacauugagcagcaagccgauaauaugaucacggagaugcuucagaaggaauauauggagcggcagggcaaaacaccucuggggcucgucgaccuguuuguuuucucuaccagcuuuuaccugaucuccauuuuccuucaccucgugaagaucccgacccaucgccacauugugggaaaacccugcccuaagccccauagacugaaccacaugggcaucuguucuugcggccuguauaagcagccugggguccccgugaaauggaagcggugaggacuaguaauaaggaaacuguaugaaugucugugggcaggaagugaagagauccuucuguaaagguuuuuggaauuaugucugcugaauaauaaacuuuuuugaaauaauaaaucugguagaaaaaugagaucuaaaaaaaaaaaaaaaaaaaaaaaaaaaaaaaaaaaaaaaaaaaaaaaaaaaaaaaaaaaaaaaaaaaaaaaaaaaaaaaaaaaaaaaaaaaaaaaaaaaa

SEQ ID NO: 37829 - RNA, 1658 nt, Artificial Sequence
  mRNA product Design i-3 (hSL-A64-N5) comprising derived and/or modified sequence from LASV(Josiah;Clade IV)__NP_694870__GPCmut10 (opt1)
aggagaaagcuuaccaugggccagaucgugaccuucuuccaggaggucccccacgugaucgaggaggugaugaacaucguccugaucgcccucagcgugcuggccgugcugaaggggcucuacaacuucgcgaccugcggccuggucgggcuggugacguuccuccugcugugcggccgcuccugcaccaccagccucuacaaggggguguacgagcugcagacccuggagcucaacauggagacgcugaacaugugcaugccgcuguccugcaccaagaacaacagccaccacuacaucauggucggcaacgagaccggccucgagcugacgcugaccaacaccuccaucaucaaccacaaguucugcaaccucagcgacgcccacaagaagaaccuguacgaccacgcccugauguccaucaucagcaccuuccaccucuccauccccaacuucaaccaguacgaggccaugagcugcgacuucaacgggggcaagaucuccgugcaguacaaccugagccacuccuacgccggggacgcggccaaccacugcggcacgguggccaacgggguccugcagaccuucaugcggauggccuggggcggcagcuacaucgcgcucgacuccgggcgcggcaacugggacugcaucaugaccagcuaccaguaccugaucauccagaacaccacgugggaggaccacugccaguucucccggcccagccccaucggguaccugggccuccugucccagcgcacccgggacaucuacaucagccgccggcugcucggcaccuucaccuggacgcugagcgacuccgaggggaaggacaccccgggcggguacugccugacccgcuggaugcucaucgaggccgagcugaagugcuucggcaacaccgccguggccaagugcaacgagaagcacgacgaggaguucugcgacaugcugcggcuguucgacuucugcaagcaggccauccagcgccugaaggcggaggcccagaugagcauccagcugaucaacaaggccgugaacgcccucaucaacgaccagcugaucaugaagaaccaccuccgggacaucauggggauccccuacugcaacuacuccaaguacugguaccucaaccacacgaccaccggccgcaccagccugcccaagugcuggcuggucuccaacggcagcuaccucaacgagacgcacuucuccgacgacaucgagcagcaggccgacaacaugaucaccgagaugcugcagaaggaguacauggagcggcaggggaagacgccccugggccucguggaccuguucguguucagcaccuccuucuaccugaucagcaucuuccugcaccucgucaagaucccgacccaccgccacaucguggggaaguccugccccaagccccaccggcugaaccacaugggcaucugcagcugcgggcuguacaagcagcccggcgugccggucaaguggaagcgcugaggacuaguuauaagacugacuagcccgaugggccucccaacgggcccuccuccccuccuugcaccgagauuaaucaaaggcucuuuucagagccaccaaaaaaaaaaaaaaaaaaaaaaaaaaaaaaaaaaaaaaaaaaaaaaaaaaaaaaaaaaaaaaaaagaauu

SEQ ID NO: 37830 - RNA, 1655 nt, Artificial Sequence
  mRNA product Design i-3 (hSL-A64-N5) comprising derived and/or modified sequence from LASV(LP;Clade I)__AAF86701__GPCmut10 (opt1)
aggagaaagcuuaccaugggccagaucaucaccuucuuccaggaggugccccacgucaucgaggaggugaugaacaucgugcugaucgcccucagccugcuggccauccucaaggggcuguacaacaucgcgaccugcggcaucaucgggcuggucgccuuccucuuccugugcggcaaguccugcagccugacgcucaagggcggguacgagcugcagacccuggagcucaacauggagacccugaacaugugcaugccgcuguccugcacgaagaacagcucccaccacuacauccgcgugggcaacgagaccgggcucgagcugacccugaccaacacgagcaucaucaaccacaaguucugcaaccucuccgacgcccacaagaagaaccuguacgaccacgcccugaugagcaucaucuccaccuuccaccucagcauccccaacuucaaccaguacgaggccauguccugcgacuucaacggcgggaagaucagcgugcaguacaaccugucccacagcuacgcgggcgacgccgccgagcacugcgggaccgucgccaacggcgugcugcagaccuucaugcggauggcguggggcgggcgcuacaucgcccucgacuccggcaaggggaacugggacugcaucaugacgagcuaccaguaccugaucauccagaacaccaccugggaggaccacugccaguucucccggcccagccccaucggcuaccugggccuccugucccagcgcacccgggacaucuacaucagccgccggcugcucgggacguucaccuggacccugagcgacuccgagggcaacgagacccccgggggcuacugccugacgcgcuggaugcucaucgaggccgagcugaagugcuucgggaacaccgccguggccaagugcaacgagaagcacgacgaggaguucugcgacaugcugcggcuguucgacuucugcaagcaggcgauccgccggcugaaggccgaggcccagaugagcauccagcugaucaacaaggccgucaacgcccucaucaacgaccagcugaucaugaagaaccaccuccgcgacaucaugggcauccccuacugcaacuacuccaaguacugguaccucaaccacaccagcuccggccggaccagccugcccaagugcuggcugaucuccaacgggagcuaccucaacgagacgcaguucuccgacgacaucgagcagcaggcggacaacaugaucaccgagaugcugcagaaggaguacaucgagcgccagggcaagaccccgcuggggcucguggacaucuucaucuucagcaccuccuucuaccugaucagcaucuuccugcaccugaucaagaucccgacgcaccggcacaucgugggcaagcccugccccaagccccaccgccucaaccacaugggggucugcuccugcggccuguacaagcacccgggcgugcccaccaaguggaagcggugaggacuaguuauaagacugacuagcccgaugggccucccaacgggcccuccuccccuccuugcaccgagauuaaucaaaggcucuuuucagagccaccaaaaaaaaaaaaaaaaaaaaaaaaaaaaaaaaaaaaaaaaaaaaaaaaaaaaaaaaaaaaaaaaagaauu

SEQ ID NO: 37831 - RNA, 1655 nt, Artificial Sequence
  mRNA product Design i-3 (hSL-A64-N5) comprising derived and/or modified sequence from LASV(803213;Clade II)__AAF86703__GPCmut10 (opt1)
aggagaaagcuuaccaugggccagaucaucaccuucuuccaggaggugccccacgucaucgaggaggugaugaacaucgugcugaucgcccucagccugcuggccauccucaaggggaucuacaacgucgcgaccugcggccuguucgggcugaucuccuuccuccugcugugcggccgcagcugcuccgugacguacaaggggguguacgagcuccagacccuggagcugaacauggccaaccucaacaugugcaugccgcugagcugcaccaagaacaacucccaccacuacaucauggucggcaacgagacgggccuggagcucacccugaccaacaccagcaucaucaaccacaaguucugcaaccuguccgacgcccacaagaagaaccucuacgaccacgcccugaugagcaucaucuccacguuccaccugagcauccccaacuucaaccaguacgaggccauguccugcgacuucaacgggggcaagaucagcgugcaguacaaccucucccacagcuucgcgguggacgccgccaaccacugcgggaccaucgccaacggcguccugcagaccuucaugcggauggcguggggcggguccuacaucgcccuggacagcggcaaggggaacugggacugcaucaugaccuccuaccaguaccucaucauccagaacacgaccugggaggaccacugccaguucagccgccccucccccaucggcuaccuggggcugcucagccagcggacccgcgacaucuacaucagccggcgccugcugggcaccuucacguggacccucuccgacagcgagggcaacgaggcccccgggggcuacugccugacccgguggaugcugaucgaggccgagcucaagugcuucgggaacaccgccguggcgaagugcaacgagaagcacgacgaggaguucugcgacaugcugcgccuguucgacuucugcaagcaggccaucaagcggcucaagacggaggcccagauguccauccagcugaucaacaaggccgugaacgcccugaucaacgaccagcucaucaugaagaaccaccuccgcgacaucaugggcauccccuacugcaacuacagccgguacugguaccugaaccacaccgucaccgggaagaccucccugccccgcugcuggcuggugagcaacggcuccuaccugaacgagacgcacuucagcgacgacaucgagcagcaggcggacaacaugaucaccgagaugcuccagaaggaguacauggaccggcagggcaagaccccgcuggggcugguggaccucuucgucuucuccaccagcuucuaccugaucuccaucuuccugcaccuggugaagaucccgacgcaccgccacaucgugggcaagcccugccccaagccccaccggcucaaccacauggggaucugcagcugcggccuguacaagcacccggggguccccgugaaguggaagcgcugaggacuaguuauaagacugacuagcccgaugggccucccaacgggcccuccuccccuccuugcaccgagauuaaucaaaggcucuuuucagagccaccaaaaaaaaaaaaaaaaaaaaaaaaaaaaaaaaaaaaaaaaaaaaaaaaaaaaaaaaaaaaaaaaagaauu

SEQ ID NO: 37832 - RNA, 1655 nt, Artificial Sequence
  mRNA product Design i-3 (hSL-A64-N5) comprising derived and/or modified sequence from LASV(GA391;Clade III)__CAA36645__GPCmut10 (opt1)
aggagaaagcuuaccaugggccagaucgugaccuucuuccaggaggucccccacgugaucgaggaggugaugaacaucguccugaucgcccucagcauccuggccauccugaaggggcucuacaacguggcgaccugcggccugaucgggcuggugacguuccuccugcuguccggccgcagcugcucccucaucuacaaggggaccuacgagcugcagacccuggagcucaacauggagacccugaacaugugcaugccgcugagcugcaccaagaacaacucccaccacuacauccgggucggcaacgagaccggccucgagcugacccugacgaacaccagcauccucaaccacaaguucugcaaccuguccgacgcccacaagcgcaaccuguacgaccacagccucauguccaucaucagcaccuuccaccuguccauccccaacuucaaccaguacgaggccaugagcugcgacuucaacgggggcaagaucaccgugcaguacaaccugucccacagcuucgccguggacgccgcggggcacugcggcacgcucgccaacgggguccugcagaccuucaugcggauggccuggggcggcuccuacaucgcccuggacagcgggcgcggcaacugggacugcaucaugaccuccuaccaguaccucaucauccagaacaccacgugggacgaccacugccaguucagccggcccucccccaucggguaccugggccugcucagccagcgcacccgggacaucuacaucagccgccggcugcugggcaccuucaccuggacgcucuccgacagcgaggggaacgagaccccgggcggguacugccugacccgcuggaugcugaucgaggcggagcucaagugcuucggcaacaccgccguggccaagugcaacgagaagcacgacgaggaguucugcgacaugcugcggcuguucgacuucugcaagcaggccauccgccggcucaagacggaggcccagauguccauccagcugaucaacaaggcggugaacgcccugaucaacgaccagcucaucaugaagaaccaccuccgcgacaucauggggauccccuacugcaacuacagccgguacugguaccugaaccacaccuccaccggcaagaccagccugccccgcugcuggcugaucuccaacggcagcuaccugaacgagacgaaguucuccgacgacaucgagcagcaggccgacaacaugaucaccgagaugcuccagaaggaguacaucgaccggcaggggaagacgccccugggccuggucgaccuguucguguucagcaccuccuucuaccucaucagcaucuuccugcaccuggugaagaucccgacccaccgccacaucgucgggaagcccugccccaagccccaccggcucaaccacaugggcaucugcuccugcgggcuguacaagcagccgggcgugcccgugcgcuggaagcggugaggacuaguuauaagacugacuagcccgaugggccucccaacgggcccuccuccccuccuugcaccgagauuaaucaaaggcucuuuucagagccaccaaaaaaaaaaaaaaaaaaaaaaaaaaaaaaaaaaaaaaaaaaaaaaaaaaaaaaaaaaaaaaaaagaauu

SEQ ID NO: 37833 - RNA, 1658 nt, Artificial Sequence
  mRNA product Design i-3 (hSL-A64-N5) comprising derived and/or modified sequence from LASV(AV;Clade V)__CCA30314__GPCmut10 (opt1)
aggagaaagcuuaccaugggccagaucgugaccuucuuccaggaggucccccacgugaucgaggaggugaugaacaucguccugaucgcccucagcauccuggccgugcugaaggggcucuacaacaucgcgaccugcggccugaucgggcugaucacguuccuccugcugugcggccgcuccugcagcuccaaccucuacaaggggguguacgagcugcagagccuggaccucaacauggagacccugaacaugugcaugccgcuguccugcaccaagaacaacagccaccacuacauccgggucggcaacgacacgggccucgagcugacccugaccaacaccuccauccucaaccacaaguucugcaaccugagcgacgcccacaagaaggaccuguacgaccacgcccucauguccaucaucagcacguuccaccuguccauccccaacuucaaccaguacgaggccaugagcugcgacuucaacgggggcaagaucuccgugcaguacaaccugagccacuccuacgccaucgacgcggccaaccacugcgggaccguggccaacggcauccuccagaccuucaugcgcauggccuggggcgggagcuacaucgcgcuggacuccggccgggggaacugggacugcaucaugaccagcuaccaguaccugaucauccagaacacgaccugggagaaccacugccaguucucccgccccagccccaucggcuaccucgggcugcugagccagcggacccgcgacaucuacaucucccggcgccuccugggcaccuucacguggacccugagcgacuccgagggcaacgccacccccgggggcuacugccucacccgguggaugcugaucgaggccgagcugaagugcuucgggaacacggccgucgccaagugcaacgagaagcacgacgaggaguucugcgacaugcuccgccuguucgacuucugcaagcaggcgaucagccggcugaaguccgaggcccagaugagcauccagcucaucaacaaggccgugaacgcccugaucaacgaccagcugaucaugaagaaccaccuccgcgacaucaugggcauccccuacugcaacuacuccaaguacugguaccugaaccacaccaucaccgggaagaccagccugcccaagugcuggcucguguccaacggcagcuaccugaacgagacgcacuucuccgacgacaucgagcagcaggccgacaacaugaucaccgagaugcugcagaaggaguacauggagcggcagggcaagaccccgcucgggcuggucgaccuguucguguucagcaccuccuucuaccugaucagcaucuuccuccgccuggugaagaucccgacgcaccggcacaucgucggcaagcccugccccaagccccaccgccugaaccacauggggaucugcuccugcggccucuacaagcagccgggggugcccgugcgguggaagcgcugaggacuaguuauaagacugacuagcccgaugggccucccaacgggcccuccuccccuccuugcaccgagauuaaucaaaggcucuuuucagagccaccaaaaaaaaaaaaaaaaaaaaaaaaaaaaaaaaaaaaaaaaaaaaaaaaaaaaaaaaaaaaaaaaagaauu

SEQ ID NO: 37834 - RNA, 1655 nt, Artificial Sequence
  mRNA product Design i-3 (hSL-A64-N5) comprising derived and/or modified sequence from LASV(Togo/2016/7082;Clade VI)__AMR44577__GPCmut10 (opt1)
aggagaaagcuuaccaugggccagaucaucaccuucuuccaggaggugccccacgucaucgaggaggugaugaacaucgugcugaucgcccucagccugcuggccauccucaagggggucuacaacguggcgaccugcggcaucaucgggcuggugacguuccuguuccucugcggccgcuccugcagccugaucuacaagggguccuacgagcugcagacccucgagcugaacauggagacccugaacaugugcaugccgcucagcugcacgaagaacuccagccaccacuacauccgggucggcaacgagaccggccuggagcugacccucaccaacacguccaucaucaaccacaaguucugcaaccugagcgacgcccacaagcgcaaccuguacgaccacgcccucauguccauccugagcaccuuccaccuguccauccccaacuucaaccaguacgaggccaugagcugcgacuucaacgggggcaagaucuccgugcaguacaaccucagccacgccuacgcgguggacgccgccgagcacugcgggaccgucgccaacggcgugcugcagaccuucaugcggauggcguggggcggguccuacaucgcccuggacagcggccgcgggaacugggacugcaucaugacguccuaccaguaccucaucauccagaacaccaccugggaggaccacugccaguucagccggcccucccccaucggcuaccuggggcugcucagccagcgcacccgggacaucuacaucagccgccggcugcugggcacguucaccuggacccucuccgacagcgagggcaacgagacccccgggggcuacugccugacgcgcuggaugcugaucgaggccgagcucaagugcuucgggaacaccgccguggccaagugcaacgagaagcacgacgaggaguucugcgacaugcugcggcuguucgacuucugcaagcaggcgauccagcgccucaaguccgaggcccagaugagcauccagcugaucaacaaggccgucaacgcccugaucaacgaccagcucaucaugaagaaccaccuccgggacaugaugggcauccccuacugcaacuacuccaaguacugguaccugaaccacaccagcuccgggcgcaccagccugcccaagugcuggcugguguccaacggcagcuaccugaacgagacgcacuucuccgacgacaucgagcagcaggccgacaacaugaucaccgagaugcuccagaaggaguacaucgaccggcagggcaagaccccgcuggggcugguggaccucuucgucuucagcaccuccuucuaccugaucagcaucuuccugcaccugaucaagaucccgacgcaccgccacaucgugggcaagcccugccccaagccccaccggcucaaccacauggggaucugcuccugcggccuguacaagcagccgggggugcccacccgcuggaagcggugaggacuaguuauaagacugacuagcccgaugggccucccaacgggcccuccuccccuccuugcaccgagauuaaucaaaggcucuuuucagagccaccaaaaaaaaaaaaaaaaaaaaaaaaaaaaaaaaaaaaaaaaaaaaaaaaaaaaaaaaaaaaaaaaagaauu

SEQ ID NO: 37835 - RNA, 1655 nt, Artificial Sequence
  mRNA product Design i-3 (hSL-A64-N5) comprising derived and/or modified sequence from LASV(KAK-428;Clade n.d. (VII))__ANH09740__GPCmut10 (opt1)
aggagaaagcuuaccaugggccagaucgugaccuucuuccaggaggucccccacgugaucgaggaggugaugaacaucguccugaucgcccucagccugcuggccauccucaaggggcuguacaacuucgcgaccugcggcgugaucgggcugaucacguuccuccugcugugcggccgcuccugcagcgccaccuacaaggggcaguacgagcuccagacccuggagcugaacauggagucccucaacaugugcaugccgcugagcugcacgaagaacaacucccaccacuacauccgggccggcaacaacaccggccuggagcucacccugaccaacacgagcaucaucucccacaaguucugcaaccugagcgacgcccacaagaagaaccucuacgaccacacccugauguccaucaucaccaccuuccaccugagcauccccaacuucaaccaguacgaggccauguccugcgacuucaacgggggcaagaucagcauccaguacaaccucucccacagcuacgcgggggacgccgcccagcacugcggcacgguggccaacgggguccugcagaccuucaugcgcauggcguggggcggcuccuaccuggcccucgacagcgggcggcgcggcugggacugcaucaucuccagcuaccaguaccugaucauccagaacaccaccugggacgaccacugccaguucucccggcccagccccaucggguaccugggcuucgugagccagaagacgcgcgacaucuacaucucccggcgccuccugggcaccuucaccuggacccugagcgacuccgaggggcacgacaugccgggcggguacugccucacgcgguggaugcugaucgaggccgaccugaagugcuucggcaacaccgccguggccaagugcaacgagaagcacgacgaggaguucugcgacauguggcgccucuucgacuucugcaagcaggcgauccagcggcugaaggccgaggcccagaugaacauccagcugaucaacaaggccgucaacgcccucaucaacgaccagcugaugaugaagaaccaccuccgcgacaucauggggauccccuacugcaacuacagcaaguucugguaccugaacaacaccaccacgggccggaccucccugccccgcugcuggcugaucagcaacggcuccuaccucaacgagacccacuucagcgacgacaucgagcagcaggcggacaacaugaucaccgagaugcugcagaaggaguacauggaccggcaggggaagacgccccugggccucguggaccuguucguguucuccaccagcuucuaccugaucaccaucuuccuccaccuggucaagaucccgacccaccgccacaucguggggaagcccugccccaagccccaccggcugaaccacaugggcaucugcuccugcgggcuguacaagcagccgggcgugcccguccgcuggaagcggugaggacuaguuauaagacugacuagcccgaugggccucccaacgggcccuccuccccuccuugcaccgagauuaaucaaaggcucuuuucagagccaccaaaaaaaaaaaaaaaaaaaaaaaaaaaaaaaaaaaaaaaaaaaaaaaaaaaaaaaaaaaaaaaaagaauu

SEQ ID NO: 37836 - RNA, 1655 nt, Artificial Sequence; identical to SEQ ID NO: 37830
  mRNA product Design i-3 (hSL-A64-N5) comprising derived and/or modified sequence from LASV(Pinneo-NIG-1969;Clade I)__AIT17836__GPCmut10 (opt1)

SEQ ID NO: 37837 - RNA, 1655 nt, Artificial Sequence
  mRNA product Design i-3 (hSL-A64-N5) comprising derived and/or modified sequence from LASV(ISTH0009-NIG-2011;Clade II)__AIT17404__GPCmut10 (opt1)
aggagaaagcuuaccaugggccagaucaucaccuucuuccaggaggugccccacgucaucgaggaggugaugaacaucgugcugaucgcccucagccugcuggccauccucaaggggaucuacaacgucgcgaccugcggccuguucgggcugguguccuuccuccugcugugcggccgcagcugcuccacgaccuacaaggggguguacgagcuccagacccuggagcuggacauggccagccucaacaugugcaugccgcuguccugcacgaagaacaacagccaccacuacaucauggucggcaacgagaccggccuggagcucacccugaccaacacguccaucaucaaccacaaguucugcaaccugagcgacgcccacaagaagaaccucuacgaccacgcccugauguccaucaucagcaccuuccaccuguccauccccaacuucaaccaguacgaggccaugagcugcgacuucaacgggggcaagaucuccgugcaguacaaccucagccacgcguacgccguggacgccgccaaccacugcgggaccaucgcgaacggcguccugcagaccuucaugcggauggccuggggcggguccuacaucgcccuggacagcggcaagggguccugggacugcaucaugacgagcuaccaguaccucaucauccagaacaccaccugggaggaccacugccaguucucccgccccagccccaucggcuaccuggggcugcucagccagcggacccgcgacaucuacaucucccggcgccugcugggcacguucaccuggacccucagcgacuccgagggcaacgagacccccgggggcuacugccugacgcgguggaugcugaucgaggccgagcucaagugcuucgggaacaccgccguggcgaagugcaacgagaagcacgacgaggaguucugcgacaugcugcgccuguucgacuucugcaagcaggccauccggcgccucaagaccgaggcccagaugagcauccagcugaucaacaaggccgugaacgcccugaucaacgaccagcucaucaugaagaaccaccuccgggacaucaugggcaucccguacugcaacuacuccaaguacugguaccugaaccacaccgucacggggaagaccagccugccccgcugcuggcugguguccaacggcagcuaccugaacgagacccacuucuccgacgacaucgagcagcaggcggacaacaugaucaccgagcuccugcagaaggaguacauggaccggcagggcaagacgccccuggggcucguggaccuguucgucuucagcaccuccuucuaccugaucagcaucuuccugcaccucaucaagaucccgacccaccgccacaucaccggcaagcccugccccaagccccaccggcugaaccacauggggaucugcuccugcggccuguacaagcacccgggggugcccgugaaguggaagcgcugaggacuaguuauaagacugacuagcccgaugggccucccaacgggcccuccuccccuccuugcaccgagauuaaucaaaggcucuuuucagagccaccaaaaaaaaaaaaaaaaaaaaaaaaaaaaaaaaaaaaaaaaaaaaaaaaaaaaaaaaaaaaaaaaagaauu

SEQ ID NO: 37838 - RNA, 1655 nt, Artificial Sequence
  mRNA product Design i-3 (hSL-A64-N5) comprising derived and/or modified sequence from LASV(ISTH2010-NIG-2012;Clade II)__AIT17482__GPCmut10 (opt1)
aggagaaagcuuaccaugggccagaucaucaccuucuuccaggaggugccccacgucaucgaggaggugaugaacaucgugcugaucgcccucagccugcuggccauccucaaggggaucuacaacgucgcgaccugcggccuguucgggcugguguccuuccuccugcugugcggccgcagcugcuccacgaccuacaaggggguguacgagcuccagacccuggagcuggacauggccagccucaacaugugcaugccgcuguccugcacgaagaacaacagccaccacuacaucauggucggcaacgagaccggccuggagcucacccugaccaacacguccaucaucaaccacaaguucugcaaccugagcgacgcccacaagaagaaccucuacgaccacgcccugauguccaucaucagcaccuuccaccuguccauccccaacuucaaccaguacgaggccaugagcugcgacuucaacgggggcaagaucuccgugcaguacaaccucagccacgcguacgccguggacgccgccaaccacugcgggaccaucgcgaacggcguccugcagaccuucaugcggauggccuggggcggguccuacaucgcccuggacagcggcaagggguccugggacugcaucaugacgagcuaccaguaccucaucauccagaacaucaccugggaggaccacugccaguucucccgccccagccccaucggcuaccuggggcugcucagccagcggacccgcgacaucuacaucucccggcgccugcugggcaccuucacguggacccucagcgacuccgagggcaacgagacccccgggggcuacugccugacccgguggaugcugaucgaggccgagcucaagugcuucgggaacacggccguggcgaagugcaacgagaagcacgacgaggaguucugcgacaugcugcgccuguucgacuucugcaagcaggccauccggcgccucaagaccgaggcccagaugagcauccagcugaucaacaaggccgugaacgcccugaucaacgaccagcucaucaugaagaaccaccuccgggacaucaugggcauccccuacugcaacuacuccaaguacugguaccugaaccacaccgucaccgggaagacgagccugccccgcugcuggcugguguccaacggcagcuaccugaacgagacccacuucuccgacgacaucgagcagcaggcggacaacaugaucaccgagcuccugcagaaggaguacaucgaccggcagggcaagaccccgcuggggcucguggaccuguucgucuucagcacguccuucuaccugaucagcaucuuccugcaccucgugaagaucccgacccaccgccacguggucggcaagcccugccccaagccccaccggcugaaccacauggggaucugcuccugcggccuguacaagcacccgggggugcccgugaaguggaagcgcugaggacuaguuauaagacugacuagcccgaugggccucccaacgggcccuccuccccuccuugcaccgagauuaaucaaaggcucuuuucagagccaccaaaaaaaaaaaaaaaaaaaaaaaaaaaaaaaaaaaaaaaaaaaaaaaaaaaaaaaaaaaaaaaaagaauu

SEQ ID NO: 37839 - RNA, 1655 nt, Artificial Sequence
  mRNA product Design i-3 (hSL-A64-N5) comprising derived and/or modified sequence from LASV(Lassa virus/H.sapiens-wt/NGA/2015/ISTH_0543;Clade II)__AVO03639__GPCmut10 (opt1)
aggagaaagcuuaccaugggccagaucaucaccuucuuccaggaggugccccacgucaucgaggaggugaugaacaucgugcugaucgcccucagccugcuggccauccucaaggggaucuacaacgucgcgaccugcggccuguucgggcugguguccuuccuccugcugugcggccgcagcugcuccacgaccuacaaggggguguacgagcuccagacccuggagcuggacauggccaaccucaacaugugcaugccgcugagcugcacgaagaacaacucccaccacuacaucauggucggcaacgagaccggccuggagcucacccugaccaacacgagcaucaucaaccacaaguucugcaaccuguccgacgcccacaagaagaaccucuacgaccacgcccugaugagcaucaucuccaccuuccaccugagcauccccaacuucaaccaguacgaggccauguccugcgacuucaacgggggcaagaucagcgugcaguacaaccucucccacaccuacgcgguggacgccgccaaccacugcgggaccaucgccaacggcguccugcagacguucaugcggauggcguggggcgggagcuacaucgcccuggacuccggcaaggggagcugggacugcaucaugaccuccuaccaguaccucgugauccagaacaccaccugggaggaccacugccaguucagccgccccucccccaucggcuaccuggggcugcucagccagcggacgcgcgacaucuacaucagccggcgccugcugggcaccuucaccuggacccucuccgacagcgagggcaacgagacgcccgggggcuacugccugacccgguggaugcugaucgaggccgagcucaagugcuucgggaacaccgccguggccaagugcaacgagaagcacgacgaggaguucugcgacaugcugcgccuguucgacuucugcaagcaggcgauccggcgccucaagaccgaggcccagauguccauccagcugaucaacaaggccgucaacgcccugaucaacgaccagcucaucaugaagaaccaccuccgggacaucaugggcauccccuacugcaacuacagcaaguacugguaccugaaccacacggugaccgggaagaccucccugccccgcugcuggcuggugagcaacggcuccuaccugaacgagacccacuucagcgacgacaucgagcagcaggccgacaacaugaucacggagcuccugcagaaggaguacaucgaccggcagggcaagaccccgcuggggcucgucgaccuguucguguucuccaccagcuucuaccugaucuccaucuuccugcaccucgugaagaucccgacccaccgccacaucacgggcaagcccugccccaagccccaccggcugaaccacauggggaucugcagcugcggccuguacaagcacccggggguccccgugaaguggaagcgcugaggacuaguuauaagacugacuagcccgaugggccucccaacgggcccuccuccccuccuugcaccgagauuaaucaaaggcucuuuucagagccaccaaaaaaaaaaaaaaaaaaaaaaaaaaaaaaaaaaaaaaaaaaaaaaaaaaaaaaaaaaaaaaaaagaauu

SEQ ID NO: 37840 - RNA, 1655 nt, Artificial Sequence
  mRNA product Design i-3 (hSL-A64-N5) comprising derived and/or modified sequence from LASV(Lassa virus/H.sapiens-wt/NGA/2016/ISTH_0009;Clade II)__AVO03571__GPCmut10 (opt1)
aggagaaagcuuaccaugggccagaucaucaccuucuuccaggaggugccccacgucaucgaggaggugaugaacaucgugcugaucgcccucagccugcuggccauccucaaggggaucuacaacgucgcgaccugcggccugcuggggcucguguccuuccugcugcucugcggccgcagcugcuccacgaccuacaaggggguguacgagcugcagacccuggagcucgacauggccagccugaacaugugcaugccgcuguccugcacgaagaacaacagccaccacuacaucauggucggcaacgagaccggccucgagcugacccugaccaacacguccaucaucaaccacaaguucugcaaccucagcgacgcccacaagaagaaccuguacgaccacgcccugauguccaucaucagcaccuuccaccucuccauccccaacuucaaccaguacgaggccaugagcugcgacuucaacgggggccggaucuccgugcaguacaaccugagccacuccuacgcgguggacgccgccaaccacugcgggaccaucgccaacggcguccugcagaccuucaugcgcauggcguggggcgggagcuacaucgcccucgacuccggcaaggggagcugggacugcaucaugacguccuaccaguaccugaucauccagaacaccaccugggaggaccacugccaguucagccggcccagccccaucggcuaccuggggcuccugucccagcgcacccgggacaucuacaucagccgccggcugcucggcacguucaccuggacccuguccgacagcgagggcaacgagacccccgggggcuacugccugacgcgcuggaugcucaucgaggccgagcugaagugcuucgggaacaccgccguggccaagugcaacgagaagcacgacgaggaguucugcgacaugcugcggcuguucgacuucugcaagcaggcgauccgccggcugaagaccgaggcccagauguccauccagcugaucaacaaggccgugaacgcccucaucaacgaccagcugaucaugaagaaccaccuccgcgacaucaugggcaucccguacugcaacuacagcaaguacugguaccucaaccacaccgucacggggaagaccucccugccccggugcuggcuggugagcaacggcuccuaccucaacgagacccacuucagcgacgacaucgagcagcaggccgacaacaugaucaccgagcugcugcagaaggaguacaucgaccgccagggcaagacgccccucgggcugguggaccuguucgucuucuccaccagcuucuaccugaucuccaucuuccuccaccuggugaagaucccgacccaccggcacaucaccggcaagcccugccccaagccccaccgccugaaccacauggggaucugcagcugcggccucuacaaccacccgggggugcccgucaaguggaagcggugaggacuaguuauaagacugacuagcccgaugggccucccaacgggcccuccuccccuccuugcaccgagauuaaucaaaggcucuuuucagagccaccaaaaaaaaaaaaaaaaaaaaaaaaaaaaaaaaaaaaaaaaaaaaaaaaaaaaaaaaaaaaaaaaagaauu

SEQ ID NO: 37841 - RNA, 1655 nt, Artificial Sequence
  mRNA product Design i-3 (hSL-A64-N5) comprising derived and/or modified sequence from LASV(Lassa virus/H.sapiens-wt/NGA/2016/ISTH_0017;Clade II)__AVO03567__GPCmut10 (opt1)
aggagaaagcuuaccaugggccagaucaucaccuucuuccaggaggugccccacgucaucgaggaggugaugaacaucgugcugaucgcccucagccugcuggccauccucaaggggaucuacaacgucgcgaccugcggccuguucgggcugguguccuuccuccugcugugcggccgcagcugcuccacgaccuacaaggggguguacgagcuccagacccuggagcuggacauggccagccucaacaugugcaugccgcuguccugcacgaagaacaacagccaccacuacaucauggucggcaacgagaccggccuggagcucacccugaccaacacguccaucaucaaccacaaguucugcaaccugagcgacgcccacaagaagaaccucuacgaccacgcccugauguccaucaucagcaccuuccaccuguccauccccaacuucaaccaguacgaggccaugagcugcgacuucaacgggggcaagaucuccgugcaguacaaccucagccacaccuacgcgaucgacgccgccaaccacugcgggaccaucgccaacggcgugcugcagacguucaugcggauggcguggggcggguccuacaucgcccuggacagcggcaagggguccugggacugcaucaugaccagcuaccaguaccucaucauccagaacaccaccugggaggaccacugccaguucucccgccccagccccaucggcuaccuggggcugcucagccagcggacgcgcgacaucuacaucucccggcgccugcugggcaccuucaccuggacccucagcgacuccgagggcaacgagacgcccgggggcuacugccugacccgguggaugcugaucgaggccgagcucaagugcuucgggaacaccgccgucgccaagugcaacgagaagcacgacgaggaguucugcgacaugcugcgccuguucgacuucugcaagcaggcgauccggcgccucaagaccgaggcccagaugagcauccagcugaucaacaaggccgugaacgcccugaucaacgaccagcucaucaugaagaaccaccuccgggacaucaugggcauccccuacugcaacuacuccaaguacugguaccugaaccacacggugaccgggaagaccagccugccccgcugcuggcuggucuccaacggcagcuaccugaacgagacccacuucuccgacgacaucgagcagcaggccgacaacaugaucacggagcuccugcagaaggaguacauggaccggcagggcaagaccccgcuggggcucguggaccuguucguguucagcaccuccuucuaccugaucagcaucuuccugcaccucguccgcaucccgacccaccggcacgugaucggcaagcccugccccaagccccaccgccugaaccacauggggaucugcuccugcggccuguacaagcacccgggggugcccgucaaguggaagcggugaggacuaguuauaagacugacuagcccgaugggccucccaacgggcccuccuccccuccuugcaccgagauuaaucaaaggcucuuuucagagccaccaaaaaaaaaaaaaaaaaaaaaaaaaaaaaaaaaaaaaaaaaaaaaaaaaaaaaaaaaaaaaaaaagaauu

SEQ ID NO: 37842 - RNA, 1655 nt, Artificial Sequence
  mRNA product Design i-3 (hSL-A64-N5) comprising derived and/or modified sequence from LASV(Lassa virus/H.sapiens-wt/NGA/2018/ISTH_0959;Clade II)__AVV65099__GPCmut10 (opt1)
aggagaaagcuuaccaugggccagaucaucaccuucuuccaggaggugccccacgucaucgaggaggugaugaacaucgugcugaucgcccucagccugcuggccauccucaaggggaucuacaacgucgugaccugcggccuguucgggcugguguccuuccuccugcugugcggccgcagcugcuccacgaccuacaagggggucuacgagcuccagacccuggagcuggacauggcgagccucaacaugugcaugccgcuguccugcacgaagaacaacagccaccacuacaucauggugggcaacgagaccggccuggagcucacccugaccaacacguccaucaucaaccacaaguucugcaaccugagcgacgcccacaagaagaaccucuacgaccacgcccugauguccaucaucagcaccuuccaccuguccauccccaacuucaaccaguacgaggccaugagcugcgacuucaacgggggcaagaucuccgugcaguacaaccucagccacgccuacgcgaucgacgccgccaaccacugcgggaccaucgccaacggcguccugcagaccuucaugcggauggcguggggcggguccuacaucgcccuggacagcggcaagggguccugggacugcaucaugacgagcuaccaguaccucaucauccagaacaccaccugggaggaccacugccaguucucccgccccagccccaucggcuaccuggggcugcucagccagcggacccgcgacaucuacaucucccggcgccugcugggcacguucaccuggacccucagcgacuccgagggcaacgagacccccgggggcuacugccugacgcgguggaugcugaucgaggccgagcucaagugcuucgggaacaccgccguggccaagugcaacgagaagcacgacgaggaguucugcgacaugcugcgccuguucgacuucugcaagcaggcgauccggcgccucaagaccgaggcccagaugagcauccagcugaucaacaaggccgugaacgcccugaucaacgaccagcucaucaugaagaaccaccuccgggacaucaugggcaucccguacugcaacuacuccaaguacugguaccugaaccacaccgucacggggaagaccagccugccccgcugcuggcugguguccaacggcagcuaccugaacgagacccacuucuccgacgacaucgagcagcaggccgacaacaugaucaccgagcuccugcagaaggaguacaucgaccggcagggcaagacgccccuggggcucguggaccuguucgucuucagcaccuccuucuaccugaucagcaucuuccugcaccucgugaagaucccgacccaccgccacgugaucggcaagcccugccccaagccccaccggcugaaccacauggggaucugcuccugcggccuguacaagcacccggggguccccgugaaguggaagcgcugaggacuaguuauaagacugacuagcccgaugggccucccaacgggcccuccuccccuccuugcaccgagauuaaucaaaggcucuuuucagagccaccaaaaaaaaaaaaaaaaaaaaaaaaaaaaaaaaaaaaaaaaaaaaaaaaaaaaaaaaaaaaaaaaagaauu

SEQ ID NO: 37843 - RNA, 1655 nt, Artificial Sequence
  mRNA product Design i-3 (hSL-A64-N5) comprising derived and/or modified sequence from LASV(LASV003-NIG-2008;Clade II)__AIT17580__GPCmut10 (opt1)
aggagaaagcuuaccaugggccagaucaucaccuucuuccaggaggugccccacgucaucgaggaggugaugaacaucgugcugaucgcccucagccugcuggccauccucaaggggaucuacaacgucgcgaccugcggccuguucgggcugguguccuuccuccugcugugcggccgcagcugcuccacgaccuacaaggggguguacgagcuccagacccuggagcuggacauggccagccucaacaugugcaugccgcuguccugcacgaagaacaacagccaccacuacaucauggucggcaacgagaccggccuggagcucacccugaccaacacguccaucaucaaccacaaguucugcaaccugagcgacgcccacaagaagaaccucuacgaccacgcccugauguccaucaucagcaccuuccaccuguccauccccaacuucaaccaguacgaggccaugagcugcgacuucaacgggggcaagaucuccgugcaguacaaccucagccacaccuacgcgguggacgccgccaaccacugcgggaccaucgccaacggcguccugcagacguucaugcggauggcguggggcggguccuacaucgcccuggacagcggcaagggguccugggacugcaucaugaccagcuaccaguaccucaucauccagaacaccaccugggaggaccacugccaguucucccgccccagccccaucggcuaccuggggcugcucagccagcggacgcgcgacaucuacaucucccggcgccugcugggcaccuucaccuggacccucagcgacuccgagagcaacgagacgccgggcggguacugccugacccgguggaugcugaucgaggccgagcucaagugcuucggcaacaccgccguggccaagugcaacgagaagcacgacgaggaguucugcgacaugcugcgccuguucgacuucugcaagcaggcgauccggcgccucaaggccgaggcccagauguccauccagcugaucaacaaggccgugaacgcccugaucaacgaccagcucaucaugaagaaccaccuccgggacaucauggggauccccuacugcaacuacagcaaguacugguaccugaaccacaccgucacgggccgcaccucccugccccggugcuggcuggugagcaacggguccuaccugaacgagacccacuucagcgacgacaucgagcagcaggcggacaacaugaucaccgagcuccugcagaaggaguacauggaccgccagggcaagacgccccugggccucguggaccuguucgucuucuccaccagcuucuaccugaucuccaucuuccugcaccucgugaagaucccgacccaccggcacgugaucgggaagcccugccccaagccccaccgccugaaccacaugggcaucugcagcugcgggcuguacaagcacccgggcguccccgugaaguggaagcggugaggacuaguuauaagacugacuagcccgaugggccucccaacgggcccuccuccccuccuugcaccgagauuaaucaaaggcucuuuucagagccaccaaaaaaaaaaaaaaaaaaaaaaaaaaaaaaaaaaaaaaaaaaaaaaaaaaaaaaaaaaaaaaaaagaauu

SEQ ID NO: 37844 - RNA, 1655 nt, Artificial Sequence
  mRNA product Design i-3 (hSL-A64-N5) comprising derived and/or modified sequence from LASV(LASV035-NIG-2009;Clade II)__AIT17588__GPCmut10 (opt1)
aggagaaagcuuaccaugggccagaucaucaccuucuuccaggaggugccccacgucaucgaggaggugaugaacaucgugcugaucgcccucagccugcuggccauccucaaggggaucuacaacgucgcgaccugcggccuguucgggcugguguccuuccuccugcugugcggccgcagcugcuccacgaccuacaaggggguguacgagcuccagacccuggagcuggacauggccagccucaacaugugcaugccgcuguccugcacgaagaacaacagccaccacuacaucauggucggcaacgagaccggccuggagcucacccugaccaacacguccaucaucaaccacaaguucugcaaccugagcgacgcccacaagaagaaccucuacgaccacgcccugauguccaucaucagcaccuuccaccuguccauccccaacuucaaccaguacgaggccaugagcugcgacuucaacgggggcaagaucuccgugcaguacaaccucagccacgcguacgccguggacgccgccaaccacugcgggaccaucgcgaacggcguccugcagaccuucaugcggauggccuggggcggguccuacaucgcccuggacagcggcaagggguccugggacugcaucaugacgagcuaccaguaccucaucauccagaacaccaccugggaggaccacugccaguucucccgccccagccccaucggcuaccuggggcugcucagccagcggacccgcgacaucuacaucucccggcgccugcugggcacguucaccuggacccucagcgacuccgagggcaacgagacccccgggggcuacugccugacgcgguggaugcugaucgaggccgagcucaagugcuucgggaacaccgccguggcgaagugcaacgagaagcacgacgaggaguucugcgacaugcugcgccuguucgacuucugcaagcaggccauccggcgccucaaggccgaggcccagaugagcauccagcugaucaacaaggccgugaacgcgcugaucaacgaccagcucaucaugaagaaccaccuccgggacaucaugggcauccccuacugcaacuacuccaaguacugguaccugaaccacaccgucaccgggaagacgagccugccccgcugcuggcugguguccaacggcagcuaccugaacgagacccacuucuccgacgacaucgagcagcaggccgacaacaugaucaccgagcuccugcagaaggaguacaucgaccggcagggcaagaccccgcuggggcucguggaccuguucgucuucagcacguccuucuaccugaucagcaucuuccugcaccucgugaagaucccgacccaccgccacgugaucggcaagcccugccccaagccccaccggcugaaccacauggggaucugcuccugcggccuguacaagcacccggggguccccgugaaguggaagcgcugaggacuaguuauaagacugacuagcccgaugggccucccaacgggcccuccuccccuccuugcaccgagauuaaucaaaggcucuuuucagagccaccaaaaaaaaaaaaaaaaaaaaaaaaaaaaaaaaaaaaaaaaaaaaaaaaaaaaaaaaaaaaaaaaagaauu

SEQ ID NO: 37845 - RNA, 1655 nt, Artificial Sequence
  mRNA product Design i-3 (hSL-A64-N5) comprising derived and/or modified sequence from LASV(LASV1000-NIG-2009;Clade II)__AIT17782__GPCmut10 (opt1)
aggagaaagcuuaccaugggccagaucaucaccuucuuccaggaggugccccacgucaucgaggaggugaugaacaucgugcugaucgcccucagccugcuggccauccucaaggggaucuacaacgucgcgaccugcggccuguucgggcugguguccuuccuccugcugugcggccgcagcugcuccacgaccuacaaggggguguacgagcuccagacccuggagcuggacauggccagccucaacaugugcaugccgcuguccugcacgaagaacaacagccaccacuacaucauggucggcaacgagaccggccuggagcucacccugaccaacacguccaucaucaaccacaaguucugcaaccugagcgacgcccacaagaagaaccucuacgaccacgcccugauguccaucaucagcaccuuccaccuguccauccccaacuucaaccaguacgaggccaugagcugcgacuucaacgggggcaagaucuccgugcaguacaaccucagccacaccuacgcgguggacgccgccaaccacugcgggaccaucgccaacggcguccugcagacguucaugcggauggcguggggcggguccuacaucgcccuggacagcggcaagggguccugggacugcaucaugaccagcuaccaguaccucaucauccagaacaccaccugggaggaccacugccaguucucccgccccagccccaucggcuaccuggggcugcucagccagcggacgcgcgacaucuacaucucccggcgccugcugggcaccuucaccuggacccucagcgacuccgagggcaacgagacgcccgggggcuacugccugacccgguggaugcugaucgaggccgagcucaagugcuucgggaacaccgccguggccaagugcaacgagaagcacgacgaggaguucugcgacaugcugcgccuguucgacuucugcaagcaggcgaucaagcggcucaagaccgaggcccagaugagcauccagcugaucaacaaggccgugaacgcccugaucaacgaccagcucaucaugaagaaccaccuccgcgacaucaugggcauccccuacugcaacuacuccaaguacugguaccugaaccacacggucaccgggaagaccagccugccccggugcuggcugguguccaacggcagcuaccugaacgagacccacuucuccgacgacaucgagcagcaggccgacaacaugaucacggagcuccugcagaaggaguacaucgaccgccagggcaagaccccgcuggggcucguggaccuguucgucuucagcaccuccuucuaccugaucagcaucuuccugcaccucgugaagaucccgacccaccggcacguggucggcaagcccugccccaagccccaccgccugaaccacauggggaucugcuccugcggccuguacaagcacccgggggugcccgugaaguggaagcggugaggacuaguuauaagacugacuagcccgaugggccucccaacgggcccuccuccccuccuugcaccgagauuaaucaaaggcucuuuucagagccaccaaaaaaaaaaaaaaaaaaaaaaaaaaaaaaaaaaaaaaaaaaaaaaaaaaaaaaaaaaaaaaaaagaauu

SEQ ID NO: 37846 - RNA, 1655 nt, Artificial Sequence
  mRNA product Design i-3 (hSL-A64-N5) comprising derived and/or modified sequence from LASV(LASV221-NIG-2010;Clade II)__AIT17624__GPCmut10 (opt1)
aggagaaagcuuaccaugggccagaucaucaccuucuuccaggaggugccccacgucaucgaggaggugaugaacaucgugcugaucgcccucagccugcuggccauccucaaggggaucuacaacgucgcgaccugcggccuguucgggcugguguccuuccuccugcugugcggccgcagcugcuccacgaccuacaaggggguguacgagcuccagacccuggagcuggacauggccagccucaacaugugcaugccgcuguccugcacgaagaacaacagccaccacuacaucauggucggcaacgagaccggccuggagcucacccugaccaacacguccaucaucaaccacaaguucugcaaccugagcgacgcccacaagaagaaccucuacgaccacgcccugauguccaucaucagcaccuuccaccuguccauccccaacuucaaccaguacgaggccaugagcugcgacuucaacgggggcaagaucuccgugcaguacaaccucagccacaccuacgcgaucgacgccgccaaccacugcgggaccaucgccaacggcgugcugcagacguucaugcggauggcguggggcggguccuacaucgcccuggacagcggcaagggguccugggacugcaucaugaccagcuaccaguaccucaucauccagaacaccaccugggaggaccacugccaguucucccgccccagccccaucggcuaccuggggcugcucagccagcggacgcgcgacaucuacaucucccggcgccugcugggcaccuucaccuggacccucagcgacuccgagggcaacgagacgcccgggggcuacugccugacccgguggaugcugaucgaggccgagcucaagugcuucgggaacaccgccgucgccaagugcaacgagaagcacgacgaggaguucugcgacaugcugcgccuguucgacuucugcaagcaggcgauccggcgccucaagaccgaggcccagaugagcauccagcugaucaacaaggccgugaacgcccugaucaacgaccagcucaucaugaagaaccaccuccgggacaucaugggcauccccuacugcaacuacuccaaguacugguaccugaaccacacggugaccgggaagaccagccugccccgcugcuggcuggucuccaacggcagcuaccugaacgagacccacuucuccgacgacaucgagcagcaggccgacaacaugaucacggagaugcuccagaaggaguacauggaccggcagggcaagaccccgcuggggcugguggaccucuucguguucagcaccuccuucuaccugaucagcaucuuccugcaccuggucaagaucccgacccaccgccacgugaucggcaagcccugccccaagccccaccggcucaaccacauggggaucugcuccugcggccuguacaagcacccgggggugcccgucaaguggaagcgcugaggacuaguuauaagacugacuagcccgaugggccucccaacgggcccuccuccccuccuugcaccgagauuaaucaaaggcucuuuucagagccaccaaaaaaaaaaaaaaaaaaaaaaaaaaaaaaaaaaaaaaaaaaaaaaaaaaaaaaaaaaaaaaaaagaauu

SEQ ID NO: 37847 - RNA, 1655 nt, Artificial Sequence
  mRNA product Design i-3 (hSL-A64-N5) comprising derived and/or modified sequence from LASV(LASV237-NIG-2010;Clade II)__AIT17638__GPCmut10 (opt1)
aggagaaagcuuaccaugggccagaucaucaccuucuuccaggaggugccccacgucaucgaggaggugaugaacaucgugcugaucgcccucagccugcuggccauccucaaggggaucuacaacgucgcgaccugcggccuguucgggcugguguccuuccuccugcugugcggccgcagcugcuccacgaccuacaaggggguguacgagcuccagacccuggagcuggacauggccagccucaacaugugcaugccgcuguccugcacgaagaacaacagccaccacuacaucauggucggcaacgagaccggccuggagcucacccugaccaacacguccaucaucaaccacaaguucugcaaccugagcgacgcccacaagaaggaccucuacgaccacgcccugauguccaucaucagcaccuuccaccuguccauccccaacuucaaccaguacgaggccaugagcugcgacuucaacgggggcaagaucuccgugcaguacaaccucagccacaccuacgcgguggacgccgccaaccacugcgggaccaucgccaacggcguccugcagacguucaugcggauggcguggggcggguccuacaucgcccuggacagcggcaagggguccugggacugcaucaugaccagcuaccaguaccucaucauccagaacaccaccugggaggaccacugccaguucucccgccccagccccaucggcuaccuggggcugcucagccagcggacgcgcgacaucuacaucucccggcgccugcugggcaccuucaccuggacccucagcgacuccgagggcaacgagacgcccgggggcuacugccugacccgguggaugcugaucgaggccgagcucaagugcuucgggaacaccgccguggccaagugcaacgagaagcacgacgaggaguucugcgacaugcugcgccuguucgacuucugcaagcaggcgauccggcgccucaagaccgaggcccagaugagcauccagcugaucaacaaggccgugaacgcccugaucaacgaccagcucaucaugaagaaccaccuccgggacaucaugggcauccccuacugcaacuacuccaaguacugguaccugaaccacacggucaccgggaagaccagccugccccgcugcuggcugguguccaacggcagcuaccugaacgagacccacuucuccgacgacaucgagcagcaggccgacaacaugaucacggagcuccugcagaaggaguacauggaccggcagggcaagaccccgcuggggcucguggaccuguucgucuucagcaccuccuucuaccugaucagcaucuuccugcaccucaucaagaucccgacccaccgccacaucacgggcaagcccugccccaagccccaccggcugaaccacauggggaucugcuccugcggccuguacaagcacccgggggugcccgugaaguggaagcgcugaggacuaguuauaagacugacuagcccgaugggccucccaacgggcccuccuccccuccuugcaccgagauuaaucaaaggcucuuuucagagccaccaaaaaaaaaaaaaaaaaaaaaaaaaaaaaaaaaaaaaaaaaaaaaaaaaaaaaaaaaaaaaaaaagaauu

SEQ ID NO: 37848 - RNA, 1655 nt, Artificial Sequence
  mRNA product Design i-3 (hSL-A64-N5) comprising derived and/or modified sequence from LASV(LASV253-NIG-2011;Clade II)__AIT17670__GPCmut10 (opt1)
aggagaaagcuuaccaugggccagaucaucaccuucuuccaggaggugccccacgucaucgaggaggugaugaacaucgugcugaucgcccucagccugcuggccauccucaaggggaucuacaacgucgcgaccugcggccuguucgggcugguguccuuccuccugcugugcggccgcagcugcuccacgaccuacaaggggguguacgagcuccagacccuggagcuggacauggccagccucaacaugugcaugccgcuguccugcacgaagaacaacagccaccacuacaucauggucggcaacgagaccggccuggagcucacccugaccaacacguccaucaucaaccacaaguucugcaaccugagcgacgcccacaagaagaaccucuacgaccacgcccugauguccaucaucagcaccuuccaccuguccauccccaacuucaaccaguacgaggccaugagcugcgacuucaacgggggcaagaucuccgugcaguacaaccucagccacaccuacgcgguggacgccgccaaccacugcgggaccaucgccaacggcguccugcagacguucaugcggauggcguggggcggguccuacaucgcccuggacagcggcaagggguccugggacugcaucaugaccagcuaccaguaccucaucauccagaacaccaccugggaggaccacugccaguucucccgccccagccccaucggcuaccuggggcugcucagccagcggacgcgcgacaucuacaucucccggcgccugcugggcaccuucaccuggacccucagcgacuccgagggcaacgagacgcccgggggcuacugccugacccgguggaugcugaucgaggccgagcucaagugcuucgggaacaccgccguggccaagugcaacgagaagcacgacgaggaguucugcgacaugcugcgccuguucgacuucugcaagcaggcgauccggcgccucaaggccgaggcccagaugagcauccagcugaucaacaaggccgugaacgcccugaucaacgaccagcucaucaugaagaaccaccuccgggacaucaugggcaucccguacugcaacuacuccaaguacugguaccugaaccacaccgucacggggcgcaccagccugccccggugcuggcugguguccaacggcagcuaccugaacgagacccacuucuccgacgacaucgagcagcaggcggacaacaugaucaccgagcuccugcagaaggaguacaucgaccgccagggcaagacgccccuggggcucguggaccuguucgucuucagcaccuccuucuaccugaucagcaucuuccugcaccucgugaagaucccgacccaccggcacaucaucggcaagcccugccccaagccccaccgccugaaccacauggggaucugcuccugcggccuguacaagcacccgggggugcccgucaaguggaagcggugaggacuaguuauaagacugacuagcccgaugggccucccaacgggcccuccuccccuccuugcaccgagauuaaucaaaggcucuuuucagagccaccaaaaaaaaaaaaaaaaaaaaaaaaaaaaaaaaaaaaaaaaaaaaaaaaaaaaaaaaaaaaaaaaagaauu

SEQ ID NO: 37849 - RNA, 1655 nt, Artificial Sequence
  mRNA product Design i-3 (hSL-A64-N5) comprising derived and/or modified sequence from LASV(LASV254-NIG-2011;Clade II)__AIT17674__GPCmut10 (opt1)
aggagaaagcuuaccaugggccagaucaucaccuucuuccaggaggugccccacgucaucgaggaggugaugaacaucgugcugaucgcccucagccugcuggccauccucaaggggaucuacaacgucgcgaccugcggccuguucgggcugguguccuuccuccugcugugcggccgcagcugcuccacgaccuacaaggggguguacgagcuccagacccuggagcuggacaugaccaaccucaacaugugcaugccgcugagcugcaccaagaacaacucccaccacuacaucauggucggcaacgagaccggccuggagcucacccugacgaacaccagcaucaucaaccacaaguucugcaaccuguccgacgcccacaagaagaaccucuacaaccacgcccugaugagcaucaucuccaccuuccaccugagcauccccaacuucaaccaguacgaggccauguccugcgacuucaacgggggcaagaucagcgugcaguacaaccucucccacagcuacgccguggacgcggccaaccacugcgggaccaucgccaacggcguccugcagacguucaugcggauggccuggggcggguccuacaucgcgcuggacagcggcaaggggaacugggacugcaucaugaccuccuaccaguaccucaucauccagaacaccaccugggaggaccacugccaguucagccgccccucccccaucggcuaccuggggcugcucagccagcggacgcgcgacaucuacaucagccggcgccugcugggcaccuucaccuggacccucuccgacagcgagggcaacgagacgcccgggggcuacugccugacccgguggaugcugaucgaggccgagcucaagugcuucgggaacaccgccguggccaagugcaacgagaagcacgacgaggaguucugcgacaugcugcgccuguucgacuucugcaagcaggccauccggcgccucaagaccgaggcgcaggccaacauccagcugaucaacaaggccgugaacgcccugaucaacgaccagcucaucaugaagaaccaccuccgggacaucaugggcauccccuacugcaacuacuccaaguacugguaccugaaccacacggucaccgggaagaccagccugccccgcugcuggcugguguccaacggcagcuaccugaacgagacccacuucuccgacgacaucgagcagcaggccgacaacaugaucacggagcuccugcagaaggaguacauggaccggcagggcaagaccccgcuggggcucguggaccuguucgucuucagcaccuccuucuaccugaucagcaucuuccugcaccucgugaagaucccgacccaccgccacgugaucggcaagcccugccccaagccccaccggcugaaccacauggggaucugcuccugcggccuguacaagcacccggggguccccgugaaguggaagcgcugaggacuaguuauaagacugacuagcccgaugggccucccaacgggcccuccuccccuccuugcaccgagauuaaucaaaggcucuuuucagagccaccaaaaaaaaaaaaaaaaaaaaaaaaaaaaaaaaaaaaaaaaaaaaaaaaaaaaaaaaaaaaaaaaagaauu

SEQ ID NO: 37850 - RNA, 1655 nt, Artificial Sequence
  mRNA product Design i-3 (hSL-A64-N5) comprising derived and/or modified sequence from LASV(Nig08-A19;Clade III)__ADU56618__GPCmut10 (opt1)
aggagaaagcuuaccaugggccagaucgugaccuucuuccaggaggucccccacgugaucgaggaggugaugaacaucguccugaucgcccucagcauccuggccauccugaaggggcucuacaacaucgcgaccugcggccugaucgggcuggugacguuccuccugcuguccggccgcagcugcuccaugaccuacaaggggguguacgagcuccagacccuggagcugaacaugaacacccucaacaugugcaugccgcugagcugcaccaagaacaacucccaccacuacaucauggucggcaacgagaccggccuggagcucacccugacgaacaccagccugcuccaccacaaguucugcaaccuguccgacgcccacaagaagaaccuguacgaccacacccucaugagcaucaucuccaccuuccaccugagcauccccaacuucaaccaguacgaggccauguccugcgacuucaacgggggcaagaucacggugcaguacaaccugagccacuccuacgccaucgacgccgcgaaccacugcgggaccguggccaacggcguccuccagaccuucaugcggauggccuggggcgggagcuacaucgcccuggacuccggccgcgggaagugggacugcaucaugaccagcuaccaguaccugaucauccagaacacgaccugggaggaccacugccaguucucccggcccagccccaucggcuaccucgggcugcugucccagcgcacccgggacaucuacaucagccgccggcuccugggcaccuucacguggacccugagcgacuccgagggcaacgagacccccgggggcuacugccucacccgcuggaugcugaucgaggcggagcugaagugcuucgggaacacggccguggccaagugcaacgagaagcacgacgaggaguucugcgacaugcuccggcuguucgacuucugcaagcaggccauccgccggcugaaggccgaggcgcagaugagcauccagcucaucaacaaggccgugaacgcccugaucaacgaccagcugaucaugaagaaccaccuccgcgacaucaugggcauccccuacugcaacuacuccaaguacugguaccugaaccacaccagcaccgggcggaccucccugccccgcugcuggcucgucagcaacggcuccuaccugaacgagacgcacuucagcgacgacaucgagcagcaggccgacaacaugaucaccgagaugcugcagaaggaguaccucgaccggcagggcaagaccccgcuggggcugguggaccuguucguguucuccaccagcuucuaccucaucuccaucuuccugcaccuggucaagaucccgacgcaccgccacaucgugggcaagcccugccccaagccccaccggcucaaccacauggggaucugcagcugcggccuguacaagcagccgggggugcccguccgcuggaagcggugaggacuaguuauaagacugacuagcccgaugggccucccaacgggcccuccuccccuccuugcaccgagauuaaucaaaggcucuuuucagagccaccaaaaaaaaaaaaaaaaaaaaaaaaaaaaaaaaaaaaaaaaaaaaaaaaaaaaaaaaaaaaaaaaagaauu

SEQ ID NO: 37851 - RNA, 1658 nt, Artificial Sequence
  mRNA product Design i-3 (hSL-A64-N5) comprising derived and/or modified sequence from LASV(G1180-SLE-2010;Clade IV)__AIT17168__GPCmut10 (opt1)
aggagaaagcuuaccaugggccagaucgugaccuucuuccaggaggucccccacgugaucgaggaggugaugaacaucguccugaucgcccucagcauccuggccgugcugaaggggcucuacaacuucgcgaccugcggccugguggggcugcucaccuuccugcugcucugcggccgcuccugcaccgccagccgguacaagggggucuacgagcugcagacccuggagcucaacauggagacccugaacaugugcaugccgcuguccugcaccaagaacaacagccaccacuacaucauggugggcaacgagaccggccucgagcugacccugacgaacaccuccaucaucaaccacaaguucugcaaccucagcgacgcccacaagaagaaccuguacgaccacgcccugauguccaucaucagcaccuuccaccucuccauccccaacuucaaccaguacgaggccaugagcugcgacuucaacgggggcaagaucuccgugcaguacaaccugagccacuccuacgcgggggacgccgccaaccacugcggcaccgucgccaacggggugcugcagacguucaugcgcauggcguggggcggcagcuacaucgcccucgacuccgggcacggcagcugggacugcaucaugaccuccuaccaguaccugaucauccagaacaccaccugggaggaccacugccaguucagccggcccucccccaucggguaccugggccuccugagccagcgcacgcgggacaucuacaucagccgccggcugcucggcaccuucaccuggacccuguccgacagcgaggggaaggacacgccgggcggguacugccugacccgcuggaugcucaucgaggccgagcugaagugcuucggcaacaccgccguggccaagugcaacgagaagcacgacgaggaguucugcgacaugcugcggcuguucgacuucugcaagcaggcgauccagcgccugaaggccgaggcccagauguccauccagcugaucaacaaggccgucaacgcccucaucaacgaccagcugaucaugaagaaccaccuccgggacaucauggggauccccuacugcaacuacagcaaguacugguaccucaaccacaccacgaccggcaagaccucccugcccaagugcuggcuggugagcaacggcuccuaccucaacgagacccacuucagcgacgacaucgagcagcaggcggacaacaugaucacggagaugcugcagaaggaguacauggagcgccaggggaagacgccccugggccucguggaccuguucgucuucuccaccagcuucuaccugaucuccaucuuccugcaccucgugaagaucccgacccaccggcacaucgugggcaagagcugccccaagccccaccgccugaaccacauggggaucugcuccugcgggcuguacaagcagcccggcgucccggugaaguggaagcggugaggacuaguuauaagacugacuagcccgaugggccucccaacgggcccuccuccccuccuugcaccgagauuaaucaaaggcucuuuucagagccaccaaaaaaaaaaaaaaaaaaaaaaaaaaaaaaaaaaaaaaaaaaaaaaaaaaaaaaaaaaaaaaaaagaauu

SEQ ID NO: 37852 - RNA, 1658 nt, Artificial Sequence
  mRNA product Design i-3 (hSL-A64-N5) comprising derived and/or modified sequence from LASV(G1442-SLE-2011;Clade IV)__AIT17180__GPCmut10 (opt1)
aggagaaagcuuaccaugggccagaucgugaccuucuuccaggaggucccccacgugaucgaggaggugaugaacaucguccugaucgcccucagcauccuggccgugcugaaggggcucuacaacguggcgaccugcggccugaucgggcuggucacguuccuccugcugugcggccgcuccugcaccaccacccucuacaaggggguguacgagcugcagacgcuggagcucaacauggagacccugaacaugugcaugccgcugagcugcaccaagaacaacucccaccacuacauccgggugggcaacgagacgggccucgagcugacccugaccaacaccagcaucaucaaccacaaguucugcaaccucuccgacgcccacaagaagaaccuguacgaccacgcccugaugagcaucaucuccacguuccaccucagcauccccaacuucaaccaguacgaggccauguccugcgacuucaacgggggcaagaucagcguccaguacaaccugucccacagcuacgccggggacgcggccaaccacugcggcaccguggccaacggggugcugcagaccuucaugcgcauggccuggggcggcuccuacaucgcgcucgacagcgggcggggcaacugggacugcaucaugaccuccuaccaguaccugaucauccagaacacgaccugggacgaccacugccaguucagccgccccucccccaucggguaccugggccuccugagccagcggacccgcgacgucuacaucucccggcgccugcucggcaccuucacguggacccugagcgacagcgaggggaaggacaccccgggcggguacugccugacccgguggaugcucaucgaggccgagcugaagugcuucggcaacacggccguggccaagugcaacgagaagcacgacgaggaguucugcgacaugcugcgccucuucgacuucugcaagcaggccauccagcggcugaaggcggaggcccagauguccauccagcugaucaacaaggccgugaacgcccucaucaacgaccagcugaucaugaagaaccaccuccgcgacaucauggggauccccuacugcaacuacagcaaguacugguaccugaacaacaccgccaccggcaagaccucccugcccaagugcuggcugaucagcaacggcuccuaccucaacgagacgcacuucagcgacgacaucgagcaggaggcggacaacaugaucaccgagaugcugcagaaggaguacauggagcggcaggggaagacgccccugggccucgucgaccuguucguguucuccaccagcuucuaccugaucuccaucuuccugcaccucgugaagaucccgacccaccgccacaucgucggcaagagcugccccaagccccaccggcugaaccacauggggaucugcuccugcgggcuguacaagcagcccggcgugccggugcgcuggaagcggugaggacuaguuauaagacugacuagcccgaugggccucccaacgggcccuccuccccuccuugcaccgagauuaaucaaaggcucuuuucagagccaccaaaaaaaaaaaaaaaaaaaaaaaaaaaaaaaaaaaaaaaaaaaaaaaaaaaaaaaaaaaaaaaaagaauu

SEQ ID NO: 37853 - RNA, 1658 nt, Artificial Sequence
  mRNA product Design i-3 (hSL-A64-N5) comprising derived and/or modified sequence from LASV(G3010-SLE-2013;Clade IV)__AIT17344__GPCmut10 (opt1)
aggagaaagcuuaccaugggccagaucgugaccuucuuccaggaggucccccacgugaucgaggaggugaugaacaucguccugaucgcccucagcauccuggccgugcugaaggggcucuacaacuucgcgaccugcggccugguggggcuggucacguuccuccugcugugcggccgcuccugcaccaccagccucuacaaggggguguacgagcugcagacccuggagcucaacauggagacgcugaacaugugcaugccgcuguccugcaccaagaacaacagccaccacuacaucauggugggcaacgagaccggccucgagcugacgcugaccaacaccuccaucaucaaccacaaguucugcaaccucagcgacgcccacaagaagaaccuguacaaccacgcccugauguccaucaucagcaccuuccaccucuccauccccaacuucaaccaguacgaggccaugagcugcgacuucaacgggggcaagaucuccguccaguacaaccugagccacuccuacgccggggacgcggccagccacugcggcacgguggccaacggggugcugcagaccuucaugcggauggccuggggcggcuccuacaucgcgcucgacagcggguacggcaagugggacugcaucaugaccuccuaccaguaccugaucauccagaacaccacgugggaggaccacugccaguucagccgccccucccccaucggguaccugggccuccugagccagcggacccgcgacaucuacaucagccggcgccugcucggcaccuucaccuggacgcuguccgacagcgaggggaaggacaccccgggcggguacugccugacccgguggaugcucaucgaggccgagcugaagugcuucggcaacaccgccgucgccaagugcaacgagaagcacgacgaggaguucugcgacaugcugcgccucuucgacuucugcaagcaggccauccagcggcugaagacggaggcgcagauguccauccagcugaucaacaaggccgugaacgcccucaucaacgaccagcugaucaugaagaaccaccuccgcgacaucauggggauccccuacugcaacuacagcaaguacugguaccugaaccacaccaccaccggcaagacgucccugcccaagugcuggcuggugagcaacggcuccuaccucaacgagacccacuucagcgacgacaucgagcagcaggccgacaacaugaucaccgagaugcugcagaaggaguacauggagcggcaggggaagacgccccugggccucgucgaccuguucguguucuccaccagcuucuaccugaucuccaucuuccugcaccucgugaagaucccgacccaccgccacaucgucggcaagagcugccccaagccccaccggcugaaccacauggggaucugcuccugcgggcuguacaagcagcccggcgugccggugcgcuggaagcggugaggacuaguuauaagacugacuagcccgaugggccucccaacgggcccuccuccccuccuugcaccgagauuaaucaaaggcucuuuucagagccaccaaaaaaaaaaaaaaaaaaaaaaaaaaaaaaaaaaaaaaaaaaaaaaaaaaaaaaaaaaaaaaaaagaauu

SEQ ID NO: 37854 - RNA, 1658 nt, Artificial Sequence
  mRNA product Design i-3 (hSL-A64-N5) comprising derived and/or modified sequence from LASV(G502-SLE-2009;Clade IV)__AIT17126__GPCmut10 (opt1)
aggagaaagcuuaccaugggccagaucgugaccuucuuccaggaggucccccacgugaucgaggaggugaugaacaucguccugaucgcccucagcauccuggccgugcugaaggggcucuacaacuucgcgaccugcggccugguggggcugcucacguuccugcugcucugcggccgcuccugcaccaccgggcuguacaagggcgucuacgagcugcagacccucgagcugaacauggagacgcugaacaugugcaugccgcucagcugcaccaagaacaacucccaccacuacaucauggugggcaacgagaccgggcuggagcugacgcucaccaacaccagcaucaucaaccacaaguucugcaaccuguccgacgcccacaagaagaaccuguacgaccacgcccucaugagcaucaucuccaccuuccaccugagcauccccaacuucaaccaguacgaggccauguccugcgacuucaacggcgggaagaucagcgugcaguacaaccugucccacagcuacgccggcgacgcggccgaccacugcgggacggucgccaacggcgugcuccagaccuucaugcggauggccuggggcggguccuacaucgcgcuggacagcggccgcgggcggugggacugcaucaugaccuccuaccaguaccugaucauccagaacaccacgugggaggaccacugccaguucagccgccccucccccaucggcuaccucggccugcugagccagcggacccgcgacaucuacaucucccggcgccuccuggggaccuucaccuggacgcugagcgacagcgagggcaaggacacccccgggggcuacugccucacccgguggaugcugaucgaggccgagcugaagugcuucgggaacaccgccguggccaagugcaacgagaagcacgacgaggaguucugcgacaugcuccgccuguucgacuucugcaagcaggccauccagcggcugaaggcggaggcccagauguccauccagcucaucaacaaggccgucaacgcccugaucaacgaccagcuggugaugaagaaccaccuccgcgacaucaugggcauccccuacugcaacuacagccgguacugguaccugaaccacacgaccaccggccgcaccucccugcccaagugcuggcucgugagcaacggguccuaccugaacgagacgcacuucagcgacgacaucgagcagcaggccgacaacaugaucaccgagaugcugcagaaggaguacauggagcggcagggcaagaccccgcucgggcuggucgaccuguucguguucuccaccagcuucuaccugaucuccaucuuccuccaccuggugaagaucccgacgcaccgccacaucgucggcaagagcugccccaagccccaccggcugaaccacauggggaucugcuccugcggccucuacaagcagcccggcgugccggugaaguggaagcgcugaggacuaguuauaagacugacuagcccgaugggccucccaacgggcccuccuccccuccuugcaccgagauuaaucaaaggcucuuuucagagccaccaaaaaaaaaaaaaaaaaaaaaaaaaaaaaaaaaaaaaaaaaaaaaaaaaaaaaaaaaaaaaaaaagaauu

SEQ ID NO: 37855 - RNA, 1658 nt, Artificial Sequence
  mRNA product Design i-3 (hSL-A64-N5) comprising derived and/or modified sequence from LASV(G733-SLE-2010;Clade IV)__AIT17154__GPCmut10 (opt1)
aggagaaagcuuaccaugggccagaucgugaccuucuuccaggaggucccccacgugaucgaggaggugaugaacaucguccugaucgcccucagcauccuggccgugcugaaggggcucuacaacuucgcgaccugcggcaucguggggcuggucuccuuccugcuccugugcggccgcagcugcacgaccucccuguacaaggggguguacgagcuccagacccuggagcugaacauggagacccucaacaugugcaugccgcugagcugcaccaagaacaacucccaccacuacaucauggugggcaacgagaccggccuggagcucacccugacgaacaccagcaucaucaaccacaaguucugcaaccuguccgacgcccacaagaagaaccucuacgaccacgcccugaugagcaucaucuccaccuuccaccugagcauccccaacuucaaccaguacgaggccauguccugcgacuucaacgggggcaagaucagcguccaguacaaccucucccacagcuacgccggggacgcggccaaccacugcggcaccaucgccaacggggugcugcagacguucaugcggauggccuggggcggcuccuacaucgcgcuggacagcgggcgcgaccggugggacugcaucaugaccuccuaccaguaccucaucauccagaacaccaccugggaggaccacugccaguucagccgccccucccccaucggcuaccuggggcugcucagccagcggacgcgcgacaucuacaucagccggcgccugcugggcaccuucaccuggacccucuccgacagcgagggcaaggacacgcccgggggcuacugccugacccgguggaugcugaucgaggccgagcucaagugcuucgggaacaccgccguggccaagugcaacgagaagcacgacgaggaguucugcgacaugcugcgccuguucgacuucugcaagcaggccauccagcggcucaaggcggaggcccagauguccauccagcugaucaacaaggccgucaacgcccugaucaacgaccagcucaucaugaagaaccaccuccgcgacaucaugggcauccccuacugcaacuacagcaaguacugguaccugaaccacaccacgaccgggaagaccucccugcccaagugcuggcuggugagcaacggcuccuaccugaacgagacccacuucagcgacgacaucgagcagcaggccgacaacaugaucacggagaugcuccagaaggaguacauggagcggcagggcaagaccccgcuggggcugguggaccucuucgucuucuccaccagcuucuaccugaucuccaucuuccugcaccuggugaagaucccgacccaccgccacguggucggcaagagcugccccaagccccaccggcucaaccacauggggaucugcuccugcggccuguacgggcagcccggcgugccggugaaguggaagcgcugaggacuaguuauaagacugacuagcccgaugggccucccaacgggcccuccuccccuccuugcaccgagauuaaucaaaggcucuuuucagagccaccaaaaaaaaaaaaaaaaaaaaaaaaaaaaaaaaaaaaaaaaaaaaaaaaaaaaaaaaaaaaaaaaagaauu

SEQ ID NO: 37856 - RNA, 1658 nt, Artificial Sequence
  mRNA product Design i-3 (hSL-A64-N5) comprising derived and/or modified sequence from MOPV/LASV reassortant(IGS-1;Clade IV)__AFY05576__GPCmut10 (opt1)
aggagaaagcuuaccaugggccagaucgugaccuucuuccaggaggucccccacgugaucgaggaggugaugaacaucguccugaucgcccucagcgugcuggccgugcugaaggggcucuacaacuucgcgaccugcggccuggucgggcuggugacguuccuccugcugugcggccgcuccugcaccaccagccucuacaaggggguguacgagcugcagacccuggagcucaacauggagacgcugaacaugugcaugccgcuguccugcaccaagaacaacagccaccacuacaucauggucggcaacgagaccggccucgagcugacgcugaccaacaccuccaucaucaaccacaaguucugcaaccucagcgacgcccacaagaagaaccuguacgaccacgcccugauguccaucaucagcaccuuccaccucuccauccccaacuucaaccaguacgaggccaugagcugcgacuucaacgggggcaagaucuccgugcaguacaaccugagccacuccuacgccggggacgcggccaaccacugcggcacgguggccaacgggguccugcagaccuucaugcggauggccuggggcggcagcuacaucgcgcucgacuccgggcgcggcaacugggacugcaucaugaccagcuaccaguaccugaucauccagaacaccacgugggaggaccacugccaguucucccggcccagccccaucggguaccugggccuccugucccagcgcacccgggacaucuacaucagccgccggcugcucggcaccuucaccuggacgcugagcgacuccgagggggaggacaccccgggcggguacugccugacccgcuggaugcucaucgaggccgagcugaagugcuucggcaacaccgccguggccaagugcaacgagaagcacgacgaggaguucugcgacaugcugcggcuguucgacuucugcaagcaggccauccagcgccugaaggcggaggcccagaugagcauccagcugaucaacaaggccgugaacgcccucaucaacgaccagcugaucaugaagaaccaccuccgggacaucauggggauccccuacugcaacuacuccaaguacugguaccucaaccacacgaccaccggccgcaccagccugcccaagugcuggcuggucuccaacggcagcuaccucaacgagacgcacuucuccgacgacaucgagcagcaggccgacaacaugaucaccgagaugcugcagaaggaguacauggagcggcaggggaagacgccccugggccucguggaccuguucguguucagcaccuccuucuaccugaucagcaucuuccugcaccucgucaagaucccgacccaccgccacaucguggggaaguccugccccaagccccaccggcugaaccacaugggcaucugcagcugcgggcuguacaagcagcccggcgugccggucaaguggaagcgcugaggacuaguuauaagacugacuagcccgaugggccucccaacgggcccuccuccccuccuugcaccgagauuaaucaaaggcucuuuucagagccaccaaaaaaaaaaaaaaaaaaaaaaaaaaaaaaaaaaaaaaaaaaaaaaaaaaaaaaaaaaaaaaaaagaauu

SEQ ID NO: 37857 - RNA, 1658 nt, Artificial Sequence
  mRNA product Design i-3 (hSL-A64-N5) comprising derived and/or modified sequence from LASV(LM765-SLE-2012;Clade IV)__AIT17814__GPCmut10 (opt1)
aggagaaagcuuaccaugggccagaucgugaccuucuuccaggaggucccccacgugaucgaggaggugaugaacaucguccugaucgcccucagcauccuggccgugcugaaggggcucuacaacuucgcgaccugcggccugguggggcuggucacguuccuccugcugugcggccgcuccugcaccaccagccucuacaaggggguguacgagcugcagacccuggagcucaacauggagacgcugaacaugugcaugccgcuguccugcaccaagaacaacagccaccacuacaucauggugggcaacgagaccggccucgagcugacgcugaccaacaccuccaucaucgaccacaaguucugcaaccucagcgacgcccaccggaagaaccuguacgaccacgcccugauguccaucaucagcaccuuccaccucuccauccccaacuucaaccaguacgaggccaugagcugcgacuucaacgggggcaagaucuccguccaguacaaccugagccacuccuacgccaaggacgcggccgaccacugcgggacgguggccaacggcgugcugcagaccuucaugcgcauggccuggggcgggagcuacaucgcgcucgacuccggccgggggcgcugggacugcaucaugaccagcuaccaguaccugaucauccagaacaccacgugggaggaccacugccaguucucccggcccagccccaucggcuaccuggggcuccugucccagcgcacccgggacaucuacaucagccgccggcugcucggcaccuucaccuggacgcugagcgacuccgagggcaaggacacccccgggggcuacugccugacccgcuggaugcucaucgaggccgagcugaagugcuucgggaacaccgccgucgccaagugcaacgagaagcacgacgaggaguucugcgacaugcugcggcuguucgacuucugcaagcaggccauccagcgccugaaggcggaggcccagaugagcauccagcugaucaacaaggccgugaacgcccucaucaacgaccagcugaucaugaagaaccaccuccgggacaucaugggcauccccuacugcaacuacuccaaguacugguaccucaaccacacgaccaccgggaagaccagccugcccaagugcuggcugguguccaacggcagcuaccucaacgagacgcacuucuccgacgacaucgagcagcaggccgacaacaugaucaccgagaugcugcagaaggaguacauggagcgccagggcaagaccccgcuggggcucgucgaccuguucguguucagcaccuccuucuaccugaucagcaucuuccugcaccucgugaagaucccgacgcaccggcacaucgucggcaagcccugccccaagccccaccgccugaaccacauggggaucugcuccugcggccuguacaagcagccgggggugcccgugaaguggaagcggugaggacuaguuauaagacugacuagcccgaugggccucccaacgggcccuccuccccuccuugcaccgagauuaaucaaaggcucuuuucagagccaccaaaaaaaaaaaaaaaaaaaaaaaaaaaaaaaaaaaaaaaaaaaaaaaaaaaaaaaaaaaaaaaaagaauu

SEQ ID NO: 37858 - RNA, 1658 nt, Artificial Sequence
  mRNA product Design i-3 (hSL-A64-N5) comprising derived and/or modified sequence from LASV(LM776-SLE-2012;Clade IV)__AIT17824__GPCmut10 (opt1)
aggagaaagcuuaccaugggccagaucgugaccuucuuccaggaggucccccacgugaucgaggaggugaugaacaucguccugaucgcccucagcauccuggccgugcugaaggggcucuacaacuucgcgaccugcggccugguggggcuggucacguuccuccugcugugcggccgcuccugcaccaccagcguguacaaggggguguacgagcuccagacccuggagcugaacauggagacgcucaacaugugcaugccgcuguccugcaccaagaacaacagccaccacuacaucauggucggcaacgagaccggccuggagcucacgcugaccaacaccuccaucaucaaccacaaguucugcaaccugagcgacgcccacaagaagaaccucuacgaccacgcccugauguccaucaucagcaccuuccaccuguccauccccaacuucaaccaguacgaggccaugagcugcgacuucaacgggggcaagaucuccgugcaguacaaccucagccacuccuacgccggggacgcggccaaccacugcggcacgguggccaacgggguccugcagaccuucaugcggauggccuggggcggcagcuacaucgcgcuggacuccgggcacggcaagugggacugcaucaugaccagcuaccaguaccucaucauccagaacaccacgugggaggaccacugccaguucucccgccccagccccaucggguaccugggccugcucucccagcggacccgcgacaucuacaucagccggcgccugcugggcaccuucaccuggacgcucagcgacuccgaggggaaggacaccccgggcggguacugccugacccgguggaugcugaucgaggccgagcucaagugcuucggcaacaccgccguggccaagugcaacgagaagcacgacgaggaguucugcgacaugcugcgccuguucgacuucugcaagcaggccauccagcggcucaaggcggaggcccagaugagcauccagcugaucaacaaggccgugaacgcccugaucaacgaccagcucaucaugaagaaccaccuccgcgacaucauggggauccccuacugcaacuacuccaaguacugguaccugaaccacacgaccaccggcaagaccagccugcccaagugcuggcuggucuccaacggcagcuaccugaacgagacgcacuucuccgacgacaucgagcagcaggccgacaacaugaucaccgagaugcuccagaaggaguacauggagcggcaggggaagacgccccugggccugguggaccucuucguguucagcaccuccuucuaccugaucagcaucuuccugcaccuggucaagaucccgacccaccgccacaucguggggaaguccugccccaagccccaccggcucaaccacaugggcaucugcagcugcgggcuguacaagcagcccggcgugccgguccgcuggaagcggugaggacuaguuauaagacugacuagcccgaugggccucccaacgggcccuccuccccuccuugcaccgagauuaaucaaaggcucuuuucagagccaccaaaaaaaaaaaaaaaaaaaaaaaaaaaaaaaaaaaaaaaaaaaaaaaaaaaaaaaaaaaaaaaaagaauu

SEQ ID NO: 37859 - RNA, 1658 nt, Artificial Sequence
  mRNA product Design i-3 (hSL-A64-N5) comprising derived and/or modified sequence from LASV(Mad39;Clade IV)__ANH09722__GPCmut10 (opt1)
aggagaaagcuuaccaugggccagaucgugaccuucuuccaggaggucccccacgugaucgaggaggugaugaacaucguccugaucgcccucagcauccuggccgugcugaaggggcucuacaacguggcgaccugcggccugaucgggcuggucacguuccuccugcugugcggccgcuccugcaccaccacccucuacaaggggguguacgagcugcaggcccuggagcucaacauggagacgcugaacaugugcaugccgcugagcugcaccaagaacaacucccaccacuacauccgggugggcaacgagaccggccucgagcugacgcugaccaacaccagccucaucaaccacaaguucugcaaccuguccgacgcccacaagaagaaccuguacgaccacgcccucaugagcaucaucuccaccuuccaccugagcauccccaacuucaaccaguacgaggccauguccugcgacuucaacgacgggaagaucagcguccaguacaaccugucccacacguacgcgggcgacaccgccaaccacugcgggaccguggccaacggcgugcuccagaccuucaugcgcauggccuggggcgggagcuacaucgcgcuggacuccggccgcgggggcugggacugcaucaugacgagcuaccaguaccugaucauccagaacaccaccugggaggaccacugccaguucucccggcccagccccaucggguaccucggccugcugucccagcggacccgcgacaucuacaucagccggcgccuccugggcacguucaccuggacccuguccgacagcgaggggaaggacaccccgggcggguacugccucacgcgguggaugcugaucgaggccgagcugaagugcuucggcaacaccgccgucgccaagugcaacgagaagcacgacgaggaguucugcgacaugcuccgccuguucgacuucugcaagcaggccauccagcggcugaaggcggaggcccagaugagcauccagcucaucaacaaggccgugaacgcccugaucaacgaccagcugaucaugaagaaccaccuccgcgacaucauggggauccccuacugcaacuacuccaaguacugguaccugaaccacaccgugaccggcaagacgagccugcccaagugcuggcucgucuccaacggcagcuaccugaacgagacccacuucuccgacgacaucgagcagcaggccgacaacaugaucaccgagaugcugcagaaggaguacauggagcggcaggggaagacgccccucggccugguggaccuguucguguucagcaccuccuucuaccugaucagcaucuuccuccaccuggucaagaucccgacccaccgccacgugguggggaagcccugccccaagccccaccggcugaaccacaugggcaucugcuccugcggguucuacaagcagccgggcguccccgugcgcuggaagcggugaggacuaguuauaagacugacuagcccgaugggccucccaacgggcccuccuccccuccuugcaccgagauuaaucaaaggcucuuuucagagccaccaaaaaaaaaaaaaaaaaaaaaaaaaaaaaaaaaaaaaaaaaaaaaaaaaaaaaaaaaaaaaaaaagaauu

SEQ ID NO: 37860 - RNA, 1658 nt, Artificial Sequence
  mRNA product Design i-3 (hSL-A64-N5) comprising derived and/or modified sequence from LASV(Z0947-SLE-2011;Clade IV)__AIT17840__GPCmut10 (opt1)
aggagaaagcuuaccaugggccagaucgugaccuucuuccaggaggucccccacgugaucgaggaggugaugaacaucguccugaucgcccucagcauccuggccgugcugaaggggcucuacaacuucgcgaccugcggccugguggggcuggucacguuccuccugcugugcggccgcuccugcaccaucagccucuacaaggggguguacgagcugcagacccuggagcucaacauggagacccugaacaugugcaugccgcuguccugcaccaagaacaacagccaccacuacaucauggugggcaacgagaccggccucgagcugacccugacgaacaccuccaucaucaaccacaaguucugcaaccucagcgacgcccacaagaagaaccuguacgaccacgcccugauguccaucaucagcaccuuccaccucuccauccccaacuucaaccaguacgaggccaugagcugcgacuucaacgggggcaagaucuccguccaguacaaccugagccacuccuacgccggggacgcggccaaccacugcggcaccguggccaacggggugcugcagacguucaugcggauggccuggggcggcagcuacaucgcgcucgacuccgggcgcgaccggugggacugcaucaugaccagcuaccaguaccugaucauccagaacaccaccugggaggaccacugccaguucucccgccccagccccaucggcuaccuggggcuccugucccagcggacgcgcgacaucuacaucagccggcgccugcucggcaccuucaccuggacccugagcgacuccgagggcaaggacacgcccgggggcuacugccugacccgguggaugcucaucgaggccgagcugaagugcuucgggaacaccgccgucgccaagugcaacgagaagcacgacgaggaguucugcgacaugcugcgccucuucgacuucugcaagcaggccauccagcggcugaaggcggaggcccagaugagcauccagcugaucaacaaggccgugaacgcccucaucaacgaccagcugaucaugaagaaccaccuccgcgacaucaugggcauccccuacugcaacuacuccaaguacugguaccugaaccacaccacgaccgggaagaccagccugcccaagugcuggcugguguccaacggcagcuaccucaacgagacccacuucuccgacgacaucgagcagcaggccgacaacaugaucacggagaugcugcagaaggaguacauggagcggcagggcaagaccccgcuggggcucgucgaccuguucguguucagcaccuccuucuaccugaucagcaucuuccugcaccucgugaagaucccgacccaccgccacaucgucggcaagcccugccccaagccccaccggcugaaccacauggggaucugcuccugcggccuguacaagcagccgggggugcccgugaaguggaagcgcugaggacuaguuauaagacugacuagcccgaugggccucccaacgggcccuccuccccuccuugcaccgagauuaaucaaaggcucuuuucagagccaccaaaaaaaaaaaaaaaaaaaaaaaaaaaaaaaaaaaaaaaaaaaaaaaaaaaaaaaaaaaaaaaaagaauu

SEQ ID NO: 37861 - RNA, 1658 nt, Artificial Sequence
  mRNA product Design i-3 (hSL-A64-N5) comprising derived and/or modified sequence from LASV(Josiah;Clade IV)__NP_694870__GPCmut10 (opt1)
aggagaaagcuuaccaugggccagaucgugaccuucuuccaggaggucccccacgugaucgaggaggugaugaacaucguccugaucgcccucagcgugcuggccgugcugaaggggcucuacaacuucgcgaccugcggccuggucgggcuggugaccuuccuccugcugugcggccgcuccugcaccaccagccucuacaaggggguguacgagcugcagacccuggagcucaacauggagacgcugaacaugugcaugccgcuguccugcaccaagaacaacagccaccacuacaucauggucggcaacgagaccggccucgagcugacccugacgaacaccuccaucaucaaccacaaguucugcaaccucagcgacgcccacaagaagaaccuguacgaccacgcccugauguccaucaucagcaccuuccaccucuccauccccaacuucaaccaguacgaggccaugagcugcgacuucaacgggggcaagaucuccgugcaguacaaccugagccacuccuacgccggggacgcggccaaccacugcggcaccguggccaacgggguccugcagacguucaugcggauggccuggggcggcagcuacaucgcgcucgacuccgggcgcggcaacugggacugcaucaugaccagcuaccaguaccugaucauccagaacaccaccugggaggaccacugccaguucucccggcccagccccaucggguaccugggccuccugucccagcgcacgcgggacaucuacaucagccgccggcugcucggcaccuucaccuggacccugagcgacuccgaggggaaggacacgccgggcggguacugccugacccgcuggaugcucaucgaggccgagcugaagugcuucggcaacaccgccguggccaagugcaacgagaagcacgacgaggaguucugcgacaugcugcggcuguucgacuucugcaagcaggccauccagcgccugaaggcggaggcccagaugagcauccagcugaucaacaaggccgugaacgcccucaucaacgaccagcugaucaugaagaaccaccuccgggacaucauggggauccccuacugcaacuacuccaaguacugguaccucaaccacaccacgaccggccgcaccagccugcccaagugcuggcuggucuccaacggcagcuaccucaacgagacccacuucuccgacgacaucgagcagcaggccgacaacaugaucacggagaugcugcagaaggaguacauggagcggcaggggaagacgccccugggccugguggaccucuucguguucagcaccuccuucuaccugaucagcaucuuccugcaccucgucaagaucccgacccaccgccacaucguggggaaguccugccccaagccccaccggcugaaccacaugggcaucugcagcugcgggcuguacaagcagcccggcgugccggucaaguggaagcgcugaggacuaguuauaagacugacuagcccgaugggccucccaacgggcccuccuccccuccuugcaccgagauuaaucaaaggcucuuuucagagccaccaaaaaaaaaaaaaaaaaaaaaaaaaaaaaaaaaaaaaaaaaaaaaaaaaaaaaaaaaaaaaaaaagaauu

SEQ ID NO: 37862 - RNA, 1655 nt, Artificial Sequence
  mRNA product Design i-3 (hSL-A64-N5) comprising derived and/or modified sequence from LASV(LP;Clade I)__AAF86701__GPCmut10 (opt1)
aggagaaagcuuaccaugggccagaucaucaccuucuuccaggaggugccccacgucaucgaggaggugaugaacaucgugcugaucgcccucagccugcuggccauccucaaggggcuguacaacaucgcgaccugcggcaucaucgggcuggucgccuuccucuuccugugcggcaaguccugcagccugacgcucaagggcggguacgagcugcagacccuggagcucaacauggagacccugaacaugugcaugccgcuguccugcaccaagaacagcucccaccacuacauccgcgugggcaacgagacggggcucgagcugacccugaccaacaccagcaucaucaaccacaaguucugcaaccucuccgacgcccacaagaagaaccuguacgaccacgcccugaugagcaucaucuccacguuccaccucagcauccccaacuucaaccaguacgaggccauguccugcgacuucaacggcgggaagaucagcgugcaguacaaccugucccacagcuacgcgggcgacgccgccgagcacugcgggaccgucgccaacggcgugcugcagaccuucaugcggauggcguggggcgggcgcuacaucgcccucgacuccggcaaggggaacugggacugcaucaugaccagcuaccaguaccugaucauccagaacacgaccugggaggaccacugccaguucucccggcccagccccaucggcuaccugggccuccugucccagcgcacccgggacaucuacaucagccgccggcugcucgggaccuucacguggacccugagcgacuccgagggcaacgagacccccgggggcuacugccugacccgcuggaugcucaucgaggccgagcugaagugcuucgggaacacggccguggccaagugcaacgagaagcacgacgaggaguucugcgacaugcugcggcuguucgacuucugcaagcaggcgauccgccggcugaaggccgaggcccagaugagcauccagcugaucaacaaggccgucaacgcccucaucaacgaccagcugaucaugaagaaccaccuccgcgacaucaugggcauccccuacugcaacuacuccaaguacugguaccucaaccacaccagcuccggccggaccagccugcccaagugcuggcugaucuccaacgggagcuaccucaacgagacccaguucuccgacgacaucgagcagcaggcggacaacaugaucacggagaugcugcagaaggaguacaucgagcgccagggcaagaccccgcuggggcugguggacaucuucaucuucagcaccuccuucuaccucaucagcaucuuccugcaccugaucaagaucccgacccaccggcacaucgugggcaagcccugccccaagccccaccgccucaaccacaugggggucugcuccugcggccuguacaagcacccgggcgugcccacgaaguggaagcggugaggacuaguuauaagacugacuagcccgaugggccucccaacgggcccuccuccccuccuugcaccgagauuaaucaaaggcucuuuucagagccaccaaaaaaaaaaaaaaaaaaaaaaaaaaaaaaaaaaaaaaaaaaaaaaaaaaaaaaaaaaaaaaaaagaauu

SEQ ID NO: 37863 - RNA, 1655 nt, Artificial Sequence
  mRNA product Design i-3 (hSL-A64-N5) comprising derived and/or modified sequence from LASV(803213;Clade II)__AAF86703__GPCmut10 (opt1)
aggagaaagcuuaccaugggccagaucaucaccuucuuccaggaggugccccacgucaucgaggaggugaugaacaucgugcugaucgcccucagccugcuggccauccucaaggggaucuacaacgucgcgaccugcggccuguucgggcugaucuccuuccuccugcugugcggccgcagcugcuccgugacguacaaggggguguacgagcuccagacccuggagcugaacauggccaaccucaacaugugcaugccgcugagcugcaccaagaacaacucccaccacuacaucauggucggcaacgagaccggccuggagcucacgcugaccaacaccagcaucaucaaccacaaguucugcaaccuguccgacgcccacaagaagaaccucuacgaccacgcccugaugagcaucaucuccaccuuccaccugagcauccccaacuucaaccaguacgaggccauguccugcgacuucaacgggggcaagaucagcgugcaguacaaccucucccacagcuucgcgguggacgccgccaaccacugcgggacgaucgccaacggcguccugcagaccuucaugcggauggcguggggcggguccuacaucgcccuggacagcggcaaggggaacugggacugcaucaugaccuccuaccaguaccucaucauccagaacaccacgugggaggaccacugccaguucagccgccccucccccaucggcuaccuggggcugcucagccagcggacccgcgacaucuacaucagccggcgccugcugggcaccuucaccuggacgcucuccgacagcgagggcaacgaggcccccgggggcuacugccugacccgguggaugcugaucgaggccgagcucaagugcuucgggaacaccgccguggcgaagugcaacgagaagcacgacgaggaguucugcgacaugcugcgccuguucgacuucugcaagcaggccaucaagcggcucaagaccgaggcccagauguccauccagcugaucaacaaggccgugaacgcccugaucaacgaccagcucaucaugaagaaccaccuccgcgacaucaugggcauccccuacugcaacuacagccgguacugguaccugaaccacacggucaccgggaagaccucccugccccgcugcuggcuggugagcaacggcuccuaccugaacgagacccacuucagcgacgacaucgagcagcaggcggacaacaugaucacggagaugcuccagaaggaguacauggaccggcagggcaagaccccgcuggggcugguggaccuguucgucuucuccaccagcuucuaccucaucuccaucuuccugcaccuggugaagaucccgacccaccgccacaucgugggcaagcccugccccaagccccaccggcucaaccacauggggaucugcagcugcggccuguacaagcacccggggguccccgugaaguggaagcgcugaggacuaguuauaagacugacuagcccgaugggccucccaacgggcccuccuccccuccuugcaccgagauuaaucaaaggcucuuuucagagccaccaaaaaaaaaaaaaaaaaaaaaaaaaaaaaaaaaaaaaaaaaaaaaaaaaaaaaaaaaaaaaaaaagaauu

SEQ ID NO: 37864 - RNA, 1655 nt, Artificial Sequence
  mRNA product Design i-3 (hSL-A64-N5) comprising derived and/or modified sequence from LASV(GA391;Clade III)__CAA36645__GPCmut10 (opt1)
aggagaaagcuuaccaugggccagaucgugaccuucuuccaggaggucccccacgugaucgaggaggugaugaacaucguccugaucgcccucagcauccuggccauccugaaggggcucuacaacguggcgaccugcggccugaucgggcuggugaccuuccuccugcuguccggccgcagcugcucccucaucuacaaggggaccuacgagcugcagacccuggagcucaacauggagacccugaacaugugcaugccgcugagcugcacgaagaacaacucccaccacuacauccgggucggcaacgagaccggccucgagcugacccugaccaacacgagcauccucaaccacaaguucugcaaccuguccgacgcccacaagcgcaaccuguacgaccacagccucauguccaucaucagcaccuuccaccuguccauccccaacuucaaccaguacgaggccaugagcugcgacuucaacgggggcaagaucaccgugcaguacaaccugucccacagcuucgccguggacgccgcggggcacugcggcacccucgccaacgggguccugcagacguucaugcggauggccuggggcggcuccuacaucgcccuggacagcgggcgcggcaacugggacugcaucaugaccuccuaccaguaccucaucauccagaacaccaccugggacgaccacugccaguucagccggcccucccccaucggguaccugggccugcucagccagcgcacgcgggacaucuacaucagccgccggcugcugggcaccuucaccuggacccucuccgacagcgaggggaacgagacgccgggcggguacugccugacccgcuggaugcugaucgaggcggagcucaagugcuucggcaacaccgccguggccaagugcaacgagaagcacgacgaggaguucugcgacaugcugcggcuguucgacuucugcaagcaggccauccgccggcucaagaccgaggcccagauguccauccagcugaucaacaaggcggugaacgcccugaucaacgaccagcucaucaugaagaaccaccuccgcgacaucauggggauccccuacugcaacuacagccgguacugguaccugaaccacacguccaccggcaagaccagccugccccgcugcuggcugaucuccaacggcagcuaccugaacgagaccaaguucuccgacgacaucgagcagcaggccgacaacaugaucacggagaugcugcagaaggaguacaucgaccggcaggggaagacgccccucggccuggucgaccuguucguguucagcaccuccuucuaccucaucagcaucuuccugcaccuggugaagaucccgacccaccgccacaucgucgggaagcccugccccaagccccaccggcucaaccacaugggcaucugcuccugcgggcuguacaagcagccgggcgugcccgugcgcuggaagcggugaggacuaguuauaagacugacuagcccgaugggccucccaacgggcccuccuccccuccuugcaccgagauuaaucaaaggcucuuuucagagccaccaaaaaaaaaaaaaaaaaaaaaaaaaaaaaaaaaaaaaaaaaaaaaaaaaaaaaaaaaaaaaaaaagaauu

SEQ ID NO: 37865 - RNA, 1658 nt, Artificial Sequence
  mRNA product Design i-3 (hSL-A64-N5) comprising derived and/or modified sequence from LASV(AV;Clade V)__CCA30314__GPCmut10 (opt1)
aggagaaagcuuaccaugggccagaucgugaccuucuuccaggaggucccccacgugaucgaggaggugaugaacaucguccugaucgcccucagcauccuggccgugcugaaggggcucuacaacaucgcgaccugcggccugaucgggcugaucacguuccuccugcugugcggccgcuccugcagcuccaaccucuacaaggggguguacgagcugcagagccuggaccucaacauggagacccugaacaugugcaugccgcuguccugcaccaagaacaacagccaccacuacauccgggucggcaacgacaccggccucgagcugacgcugaccaacaccuccauccucaaccacaaguucugcaaccugagcgacgcccacaagaaggaccuguacgaccacgcccucauguccaucaucagcaccuuccaccuguccauccccaacuucaaccaguacgaggccaugagcugcgacuucaacgggggcaagaucuccgugcaguacaaccugagccacuccuacgccaucgacgcggccaaccacugcgggacgguggccaacggcauccuccagaccuucaugcgcauggccuggggcgggagcuacaucgcgcuggacuccggccgggggaacugggacugcaucaugaccagcuaccaguaccugaucauccagaacaccacgugggagaaccacugccaguucucccgccccagccccaucggcuaccucgggcugcugagccagcggacccgcgacaucuacaucucccggcgccuccugggcaccuucaccuggacgcugagcgacuccgagggcaacgccacccccgggggcuacugccucacccgguggaugcugaucgaggccgagcugaagugcuucgggaacaccgccgucgccaagugcaacgagaagcacgacgaggaguucugcgacaugcuccgccuguucgacuucugcaagcaggcgaucagccggcugaaguccgaggcccagaugagcauccagcucaucaacaaggccgugaacgcccugaucaacgaccagcugaucaugaagaaccaccuccgcgacaucaugggcauccccuacugcaacuacuccaaguacugguaccugaaccacacgaucaccgggaagaccagccugcccaagugcuggcucguguccaacggcagcuaccugaacgagacccacuucuccgacgacaucgagcagcaggccgacaacaugaucacggagaugcugcagaaggaguacauggagcggcagggcaagaccccgcuggggcucgucgaccuguucguguucagcaccuccuucuaccugaucagcaucuuccuccgccuggugaagaucccgacccaccggcacaucgucggcaagcccugccccaagccccaccgccugaaccacauggggaucugcuccugcggccucuacaagcagccgggggugcccgugcgguggaagcgcugaggacuaguuauaagacugacuagcccgaugggccucccaacgggcccuccuccccuccuugcaccgagauuaaucaaaggcucuuuucagagccaccaaaaaaaaaaaaaaaaaaaaaaaaaaaaaaaaaaaaaaaaaaaaaaaaaaaaaaaaaaaaaaaaagaauu
